United States Patent Application Publication US 2023/0026259 A1 - sequence listing, part 26

SEQ ID NO: 108483 - DNA, 3845 bp, Homo sapiens
  Payload ID: 1317
  Gene Symbol: ARCN1
  Gene Name: archain 1
  Uniprot ID: P48444
  ENST ID: ENST00000264028
  CDS Start-End: 96-1631
agcaggtccagagctgctggtgctcccgttccccagaccctacccctatccccagtggagccggagtgcgggcgcgccccaccaccgccctcaccatggtgctgttggcagcagcggtctgcacaaaagcaggaaaggctattgtttctcgacagtttgtggaaatgacccgaactcggattgagggcttattagcagcttttccaaagctcatgaacactggaaaacaacatacgtttgttgaaacagagagtgtaagatatgtctaccagcctatggagaaactgtatatggtactgatcactaccaaaaacagcaacattttagaagatttggagaccctaaggctcttctcaagagtgatccctgaatattgccgagccttagaagagaatgaaatatctgagcactgttttgatttgatttttgcttttgatgaaattgtcgcactgggataccgggagaatgttaacttggcacagatcagaaccttcacagaaatggattctcatgaggagaaggtgttcagagccgtcagagagactcaagaacgtgaagctaaggctgagatgcgtcgtaaagcaaaggaattacaacaggcccgaagagatgcagagagacagggcaaaaaagcaccaggatttggcggatttggcagctctgcagtatctggaggcagcacagctgccatgatcacagagaccatcattgaaactgataaaccaaaagtggcacctgcaccagccaggccttcaggccccagcaaggctttaaaacttggagccaaaggaaaggaagtagataactttgtggacaaattaaaatctgaaggtgaaaccatcatgtcctctagtatgggcaagcgtacttctgaagcaaccaaaatgcatgctccacccattaatatggaaagtgtacatatgaagattgaagaaaagataacattaacctgtggacgagacggaggattacagaatatggagttgcatggcatgatcatgcttaggatctcagatgacaagtatggccgaattcgtcttcatgtggaaaatgaagataagaaaggggtgcagctacagacccatccaaatgtggataaaaaacttttcactgcagagtctctaattggcctgaagaatccagagaagtcatttccagtcaacagtgacgtaggggtgctaaagtggagactacaaaccacagaggaatcttttattccactgacaattaattgctggccctcggagagtggaaatggctgtgatgtcaacatagaatatgagctacaagaagataatttagaactgaatgatgtggttatcaccatcccactcccgtctggtgtcggcgcgcctgttatcggtgagatcgatggggagtatcgacatgacagtcgacgaaataccctggagtggtgcctgcctgtgattgatgccaaaaataagagtggcagcctggagtttagcattgctgggcagcccaatgacttcttccctgttcaagtttcctttgtctccaagaaaaattactgtaacatacaggttaccaaagtgacccaggtagatggaaacagccccgtcaggttttccacagagaccactttcctagtggataagtatgaaattctgtaataccaagaagagggagctgaaaaggaaaattttcagattaataaagaagacgccaatgatggctgaagagtttttcccagatttacaagccactggagaccccttttttctgatacaatgcacgattctctgcgcgcaaggaccctcgactcacccccatgtttcagtgtcacagagacattctttgataaggaaatggcacaaacataaagggaaaggctgctaattttctttggcagattgtattggccagcaggaaagcaagctctccagagaatgcccccagttaaatacctcctctacctttacctaagttgctcctttatttttattttattattattattattattattattattttttgagatggagtctcactttgtaacccaggctggaatgcaatggcatgatctcagctcactgcaacctccgcctcctgggttcaagcaagtctcctgcctcagcctccgagtagctgggactacaggtgcacgccaccacgcctggctaattttttgtattttagtagagacggggtttcaccgtgttgcccaggctggtcgcgaactcctgagctcaggcaatccgcccacctcagcctcccaaagtgttgggattacaggcatgagccaccatgcccagctgctcctttattttaatccctaaatataatccctaaatatagttatatttcatacttagtttgtttttaaaaagttttctctgtagaaaattttaatcattcataccctttacctttaggtttttctttctatacattcagtcaggcactgggatcatctgtttacaggcattatatttatttggcactcctggaacaagtatatctaacccattcttgatttttggactattcaggtgaactatttgaggggtatggggtctagaagttaaaagatacgcatgtcttctgttcttttcccgtatcaattcattccttcatctctttgccaagttgttttcctttcagggcctgtccttccagtttagaacagtaccatgaatcccacttgtgtcaatattaaagatagctgagaagcacctttcaaatggcacagtccctcttcaagatgtctaaaagaatggttatgtctgtccagttagggatttcacatccacatgtaatcatgtctgctgctgttgctacccaaattttcatttctccacattttgggtacttaagctaaaacgtaatggccacagtctgtaatccattcacattcctcagtttcaccacctccctcttccagactgcactctctgtcatcagtcccctcctttctaacagaaatggggttatgattttgaaggctgtgggttcagggagtctttgccaatcctgttggccctaaactatcaaggaggctccatttcaccatttgattttttgcatttcaggaggcaactgattgtttcgatatgtacatattactcacgtataccccatttccttccagtcagcccaacattttccaccagtctgtccccatctctgaaatccttccttctctttccccctaagtcttttgagtgtcatcatgtactggtggtttctcggttccatctcatccatttccttttcaatggagactacagcgtcagccagctcagccttggcttttaactcaatattccagtccataggggtggttaaaagttgctgcaaggctgcaggcactggcagtgggaagaggcagacgactagatgacttctgcacttttagctggttgaaaagtaccactcccactctgaacatctggccgtccctgcaaagagtgtactgtgcttgaagcagagcactcacacataaatggctgtgtgtggaattgcttgccaaagaagtttctagcctttccctttcccctaactgcatcagggaagaattcttatctctagcttggtttccacatgaggtttttctgagaagggcttgggacaagaagtctgtcatgttagttaagcaggcaagaaatcctactaatccagttttgtttgaaagttgtttgtccgtatgattttttaaaagtcaagtttaatttcaaaaaaccttttttttctgagattacttttggggtaatatttaaaatgagagacattttgtaaccctgtaaaatacatagggaatataacattccagtgtatacaaagaaggcaaattctttaatcaaataaagcgcattataaaatga

SEQ ID NO: 108484 - DNA, 4038 bp, Homo sapiens
  Payload ID: 1317
  Gene Symbol: ARCN1
  Gene Name: archain 1
  ENST ID: ENST00000359415
  CDS Start-End: 166-1824
gaagcggcagcggttcctgtcaagggggcagcaggtccagagctgctggtgctcccgttccccagaccctacccctatccccagtggagccggagtgcgggcgcgccccaccaccgccctcaccatgataacttgatttaaaacatcgtccagtgtacctgagagatggcagaatgtaatttggtggcaatcctaataagttctattgacaaccctttagataagaacttggataatggggggaattcatgcttggactttaggccactgaacagcttttctcagcctcaggtgctgttggcagcagcggtctgcacaaaagcaggaaaggctattgtttctcgacagtttgtggaaatgacccgaactcggattgagggcttattagcagcttttccaaagctcatgaacactggaaaacaacatacgtttgttgaaacagagagtgtaagatatgtctaccagcctatggagaaactgtatatggtactgatcactaccaaaaacagcaacattttagaagatttggagaccctaaggctcttctcaagagtgatccctgaatattgccgagccttagaagagaatgaaatatctgagcactgttttgatttgatttttgcttttgatgaaattgtcgcactgggataccgggagaatgttaacttggcacagatcagaaccttcacagaaatggattctcatgaggagaaggtgttcagagccgtcagagagactcaagaacgtgaagctaaggctgagatgcgtcgtaaagcaaaggaattacaacaggcccgaagagatgcagagagacagggcaaaaaagcaccaggatttggcggatttggcagctctgcagtatctggaggcagcacagctgccatgatcacagagaccatcattgaaactgataaaccaaaagtggcacctgcaccagccaggccttcaggccccagcaaggctttaaaacttggagccaaaggaaaggaagtagataactttgtggacaaattaaaatctgaaggtgaaaccatcatgtcctctagtatgggcaagcgtacttctgaagcaaccaaaatgcatgctccacccattaatatggaaagtgtacatatgaagattgaagaaaagataacattaacctgtggacgagacggaggattacagaatatggagttgcatggcatgatcatgcttaggatctcagatgacaagtatggccgaattcgtcttcatgtggaaaatgaagataagaaaggggtgcagctacagacccatccaaatgtggataaaaaacttttcactgcagagtctctaattggcctgaagaatccagagaagtcatttccagtcaacagtgacgtaggggtgctaaagtggagactacaaaccacagaggaatcttttattccactgacaattaattgctggccctcggagagtggaaatggctgtgatgtcaacatagaatatgagctacaagaagataatttagaactgaatgatgtggttatcaccatcccactcccgtctggtgtcggcgcgcctgttatcggtgagatcgatggggagtatcgacatgacagtcgacgaaataccctggagtggtgcctgcctgtgattgatgccaaaaataagagtggcagcctggagtttagcattgctgggcagcccaatgacttcttccctgttcaagtttcctttgtctccaagaaaaattactgtaacatacaggttaccaaagtgacccaggtagatggaaacagccccgtcaggttttccacagagaccactttcctagtggataagtatgaaattctgtaataccaagaagagggagctgaaaaggaaaattttcagattaataaagaagacgccaatgatggctgaagagtttttcccagatttacaagccactggagaccccttttttctgatacaatgcacgattctctgcgcgcaaggaccctcgactcacccccatgtttcagtgtcacagagacattctttgataaggaaatggcacaaacataaagggaaaggctgctaattttctttggcagattgtattggccagcaggaaagcaagctctccagagaatgcccccagttaaatacctcctctacctttacctaagttgctcctttatttttattttattattattattattattattattattttttgagatggagtctcactttgtaacccaggctggaatgcaatggcatgatctcagctcactgcaacctccgcctcctgggttcaagcaagtctcctgcctcagcctccgagtagctgggactacaggtgcacgccaccacgcctggctaattttttgtattttagtagagacggggtttcaccgtgttgcccaggctggtcgcgaactcctgagctcaggcaatccgcccacctcagcctcccaaagtgttgggattacaggcatgagccaccatgcccagctgctcctttattttaatccctaaatataatccctaaatatagttatatttcatacttagtttgtttttaaaaagttttctctgtagaaaattttaatcattcataccctttacctttaggtttttctttctatacattcagtcaggcactgggatcatctgtttacaggcattatatttatttggcactcctggaacaagtatatctaacccattcttgatttttggactattcaggtgaactatttgaggggtatggggtctagaagttaaaagatacgcatgtcttctgttcttttcccgtatcaattcattccttcatctctttgccaagttgttttcctttcagggcctgtccttccagtttagaacagtaccatgaatcccacttgtgtcaatattaaagatagctgagaagcacctttcaaatggcacagtccctcttcaagatgtctaaaagaatggttatgtctgtccagttagggatttcacatccacatgtaatcatgtctgctgctgttgctacccaaattttcatttctccacattttgggtacttaagctaaaacgtaatggccacagtctgtaatccattcacattcctcagtttcaccacctccctcttccagactgcactctctgtcatcagtcccctcctttctaacagaaatggggttatgattttgaaggctgtgggttcagggagtctttgccaatcctgttggccctaaactatcaaggaggctccatttcaccatttgattttttgcatttcaggaggcaactgattgtttcgatatgtacatattactcacgtataccccatttccttccagtcagcccaacattttccaccagtctgtccccatctctgaaatccttccttctctttccccctaagtcttttgagtgtcatcatgtactggtggtttctcggttccatctcatccatttccttttcaatggagactacagcgtcagccagctcagccttggcttttaactcaatattccagtccataggggtggttaaaagttgctgcaaggctgcaggcactggcagtgggaagaggcagacgactagatgacttctgcacttttagctggttgaaaagtaccactcccactctgaacatctggccgtccctgcaaagagtgtactgtgcttgaagcagagcactcacacataaatggctgtgtgtggaattgcttgccaaagaagtttctagcctttccctttcccctaactgcatcagggaagaattcttatctctagcttggtttccacatgaggtttttctgagaagggcttgggacaagaagtctgtcatgttagttaagcaggcaagaaatcctactaatccagttttgtttgaaagttgtttgtccgtatgattttttaaaagtcaagtttaatttcaaaaaaccttttttttctgagattacttttggggtaatatttaaaatgagagacattttgtaaccctgtaaaatacatagggaatataacattccagtgtatacaaagaaggcaaattctttaatcaaataaagcgcattataaaatga

SEQ ID NO: 108485 - DNA, 1709 bp, Homo sapiens
  Payload ID: 1317
  Gene Symbol: ARCN1
  Gene Name: archain 1
  Uniprot ID: P48444
  ENST ID: ENST00000392859
  CDS Start-End: 159-1430
gacgtggcttggggccgccatcttggcaagaggcgaagcggcagcggttcctgtcaagggggcagcaggtccagagctgctggtgctcccgttccccagaccctacccctatccccagtggagccggagtgcgggcgcgccccaccaccgccctcaccatgatccctgaatattgccgagccttagaagagaatgaaatatctgagcactgttttgatttgatttttgcttttgatgaaattgtcgcactgggataccgggagaatgttaacttggcacagatcagaaccttcacagaaatggattctcatgaggagaaggtgttcagagccgtcagagagactcaagaacgtgaagctaaggctgagatgcgtcgtaaagcaaaggaattacaacaggcccgaagagatgcagagagacagggcaaaaaagcaccaggatttggcggatttggcagctctgcagtatctggaggcagcacagctgccatgatcacagagaccatcattgaaactgataaaccaaaagtggcacctgcaccagccaggccttcaggccccagcaaggctttaaaacttggagccaaaggaaaggaagtagataactttgtggacaaattaaaatctgaaggtgaaaccatcatgtcctctagtatgggcaagcgtacttctgaagcaaccaaaatgcatgctccacccattaatatggaaagtgtacatatgaagattgaagaaaagataacattaacctgtggacgagacggaggattacagaatatggagttgcatggcatgatcatgcttaggatctcagatgacaagtatggccgaattcgtcttcatgtggaaaatgaagataagaaaggggtgcagctacagacccatccaaatgtggataaaaaacttttcactgcagagtctctaattggcctgaagaatccagagaagtcatttccagtcaacagtgacgtaggggtgctaaagtggagactacaaaccacagaggaatcttttattccactgacaattaattgctggccctcggagagtggaaatggctgtgatgtcaacatagaatatgagctacaagaagataatttagaactgaatgatgtggttatcaccatcccactcccgtctggtgtcggcgcgcctgttatcggtgagatcgatggggagtatcgacatgacagtcgacgaaataccctggagtggtgcctgcctgtgattgatgccaaaaataagagtggcagcctggagtttagcattgctgggcagcccaatgacttcttccctgttcaagtttcctttgtctccaagaaaaattactgtaacatacaggttaccaaagtgacccaggtagatggaaacagccccgtcaggttttccacagagaccactttcctagtggataagtatgaaattctgtaataccaagaagagggagctgaaaaggaaaattttcagattaataaagaagacgccaatgatggctgaagagtttttcccagatttacaagccactggagaccccttttttctgatacaatgcacgattctctgcgcgcaaggaccctcgactcacccccatgtttcagtgtcacagagacattctttgataaggaaatggcacaaacataaagggaaaggctgctaattttctttggcagattgtattggccagcaggaaagcaagctctccagagaatg

SEQ ID NO: 108486 - DNA, 1669 bp, Homo sapiens
  Payload ID: 1317
  Gene Symbol: ARCN1
  Gene Name: archain 1
  ENST ID: ENST00000534182
  CDS Start-End: 113-364
gttcctgtcaagggggcagcaggtccagagctgctggtgctcccgttccccagaccctacccctatccccagtggagccggagtgcgggcgcgccccaccaccgccctcaccatggtgctgttggcagcagcggtctgcacaaaagcaggaaaggctattgtttctcgacagtttgtggaaatgacccgaactcggattgagggcttattagcagcttttccaaagctcatgaacactggaaaacaacatacgtttgttgaaacagagagtatacgcatgtcttctgttcttttcccgtatcaattcattccttcatctctttgccaagttgttttcctttcagggcctgtccttccagtttagaacagtaccatgaatcccacttgtgtcaatattaaagatagctgagaagcacctttcaaatggcacagtccctcttcaagatgtctaaaagaatggttatgtctgtccagttagggatttcacatccacatgtaatcatgtctgctgctgttgctacccaaattttcatttctccacattttgggtacttaagctaaaacgtaatggccacagtctgtaatccattcacattcctcagtttcaccacctccctcttccagactgcactctctgtcatcagtcccctcctttctaacagaaatggggttatgattttgaaggctgtgggttcagggagtctttgccaatcctgttggccctaaactatcaaggaggctccatttcaccatttgattttttgcatttcaggaggcaactgattgtttcgatatgtacatattactcacgtataccccatttccttccagtcagcccaacattttccaccagtctgtccccatctctgaaatccttccttctctttccccctaagtcttttgagtgtcatcatgtactggtggtttctcggttccatctcatccatttccttttcaatggagactacagcgtcagccagctcagccttggcttttaactcaatattccagtccataggggtggttaaaagttgctgcaaggctgcaggcactggcagtgggaagaggcagacgactagatgacttctgcacttttagctggttgaaaagtaccactcccactctgaacatctggccgtccctgcaaagagtgtactgtgcttgaagcagagcactcacacataaatggctgtgtgtggaattgcttgccaaagaagtttctagcctttccctttcccctaactgcatcagggaagaattcttatctctagcttggtttccacatgaggtttttctgagaagggcttgggacaagaagtctgtcatgttagttaagcaggcaagaaatcctactaatccagttttgtttgaaagttgtttgtccgtatgattttttaaaagtcaagtttaatttcaaaaaaccttttttttctgagattacttttggggtaatatttaaaatgagagacattttgtaaccctgtaaaatacatagggaatataacattccagtgtatacaaagaaggcaaattctttaatcaaataaagcgcattataaaatgagatgtttattggattattgactcactttggtgtctgcttgttgattcaggatgctgtaatgggacctaacattaaaaattaatgacatgttttttttaagagaaa

SEQ ID NO: 108487 - DNA, 2238 bp, Homo sapiens
  Payload ID: 1317
  Gene Symbol: ARCN1
  Gene Name: archain 1
  ENST ID: ENST00000614498
  CDS Start-End: 125-694
gaagcggcagcggttcctgtcaagggggcagcaggtccagagctgctggtgctcccgttccccagaccctacccctatccccagtggagccggagtgcgggcgcgccccaccaccgccctcaccatggtgctgttggcagcagcggtctgcacaaaagcaggaaaggctattgtttctcgacagtttgtggaaatgacccgaactcggattgagggcttattagcagcttttccaaagctcatgaacactggaaaacaacatacgtttgttgaaacagagagtgtaagatatgtctaccagcctatggagaaactgtatatggtactgatcactaccaaaaacagcaacattttagaagatttggagaccctaaggctcttctcaagagtgatccctgaatattgccgagccttagaagagaatgaaatatctgagcactgttttgatttgatttttgcttttgatgaaattgtcgcactgggataccgggagaatgttaacttggcacagatcagaaccttcacagaaatggattctcatgaggagaaggtgttcagagccgtcagagagactcaagaacgtgaagctaaggctgagatgcgtcgtaaagcaaaggaattacaacaggcccaaagtgttgggattacaggcatgagccaccatgcccagctgctcctttattttaatccctaaatataatccctaaatatagttatatttcatacttagtttgtttttaaaaagttttctctgtagaaaattttaatcattcataccctttacctttaggtttttctttctatacattcagtcaggcactgggatcatctgtttacaggcattatatttatttggcactcctggaacaagtatatctaacccattcttgatttttggactattcaggtgaactatttgaggggtatggggtctagaagttaaaagatacgcatgtcttctgttcttttcccgtatcaattcattccttcatctctttgccaagttgttttcctttcagggcctgtccttccagtttagaacagtaccatgaatcccacttgtgtcaatattaaagatagctgagaagcacctttcaaatggcacagtccctcttcaagatgtctaaaagaatggttatgtctgtccagttagggatttcacatccacatgtaatcatgtctgctgctgttgctacccaaattttcatttctccacattttgggtacttaagctaaaacgtaatggccacagtctgtaatccattcacattcctcagtttcaccacctccctcttccagactgcactctctgtcatcagtcccctcctttctaacagaaatggggttatgattttgaaggctgtgggttcagggagtctttgccaatcctgttggccctaaactatcaaggaggctccatttcaccatttgattttttgcatttcaggaggcaactgattgtttcgatatgtacatattactcacgtataccccatttccttccagtcagcccaacattttccaccagtctgtccccatctctgaaatccttccttctctttccccctaagtcttttgagtgtcatcatgtactggtggtttctcggttccatctcatccatttccttttcaatggagactacagcgtcagccagctcagccttggcttttaactcaatattccagtccataggggtggttaaaagttgctgcaaggctgcaggcactggcagtgggaagaggcagacgactagatgacttctgcacttttagctggttgaaaagtaccactcccactctgaacatctggccgtccctgcaaagagtgtactgtgcttgaagcagagcactcacacataaatggctgtgtgtggaattgcttgccaaagaagtttctagcctttccctttcccctaactgcatcagggaagaattcttatctctagcttggtttccacatgaggtttttctgagaagggcttgggacaagaagtctgtcatgttagttaagcaggcaagaaatcctactaatccagttttgtttgaaagttgtttgtccgtatgattttttaaaagtcaagtttaatttcaaaaaaccttttttttctgagattacttttggggtaatatttaaaatgagagacattttgtaaccctgtaaaatacatagggaatataacattccagtgtatacaaagaaggcaaattctttaatcaaataaagcgcattataaaatg

SEQ ID NO: 108488 - DNA, 2512 bp, Homo sapiens
  Payload ID: 1318
  Gene Symbol: ACAP1
  Gene Name: ArfGAP with coiled-coil, ankyrin repeat and PH domains 1
  Uniprot ID: Q15027
  ENST ID: ENST00000158762
  CDS Start-End: 207-2429
agcactgcctggaagtgtggggtgagagctcctcctaggacacccctttccccttggggaaagaattgtgcccccaggcccttccccgcggaggtccctctcctccttccccctcatctccccttcctgggacagaaagtgcctccacctgcatccccaggggcccggcctccagggcccgctggccccacagcaggcaagctgagatgacggtcaagctggatttcgaggagtgtctcaaggactcaccccgtttccgagcctctattgagctggtggaagccgaagtgtcagaattggagacccgtctggaaaagctcctgaaactgggcactggtctcctggaaagtgggcgccattaccttgctgccagccgcgccttcgttgtcggcatttgtgacctggcccgcctgggtccaccagagcccatgatggcggagtgtctggaaaaattcaccgtgagcctgaaccacaagctggacagccatgcggagcttctagatgccacccaacacacactgcagcagcagatccagaccctggtcaaggaaggtctgcggggtttccgagaggctcgccgggatttctggcggggggctgagagcctggaggctgccctgacccacaacgcagaggttcccaggcgccgggcccaggaggcagaagaggcaggagctgctttgaggacggctcgagctgggtaccggggacgggcactggattatgccctgcagatcaacgtgattgaggacaagaggaagtttgacatcatggagtttgtgctgcgtttggtggaggcccaggctacccatttccagcagggccatgaggagctgagccggctgtcccagtatcgaaaggagctgggcgcccagttgcaccagctggtcttgaattcagcacgagagaagagggacatggagcagagacacgtgctgctgaaacagaaggagctgggtggggaggagccagaaccaagcttaagagaggggcctggtggcctggtgatggaaggacatctcttcaaacgggccagcaacgcatttaagacctggagcagacgctggttcaccattcagagcaaccaactggtttaccagaagaagtacaaggaccctgtgactgtggtggtggatgaccttcgtctctgcacagtgaaactctgccctgactcagaaaggcggttctgctttgaggtggtgtccaccagcaagtcctgcctcctccaggctgactcagagcgcctcctgcagctgtgggtcagtgctgtgcagagcagcattgcttctgccttcagtcaggctcgccttgatgacagcccccggggtccaggccagggctcaggacacctggccataggctctgctgccaccctgggctctggtggaatggccaggggaagggagcctgggggagtcgggcacgtggtggcccaggtccagagtgtggatggcaatgcccagtgctgcgactgccgggagccagccccggagtgggccagcatcaaccttggtgtcaccctctgcattcagtgttccggcatccacaggagccttggtgttcacttctccaaagtccggtctctgacccttgactcatgggagccagaactagtgaagctcatgtgtgagctgggaaatgtcatcatcaaccagatctatgaggcccgcgtggaggccatggcagtgaagaaaccagggcccagctgctcccggcaggagaaggaggcctggattcacgctaaatacgtggagaagaagttcctgaccaagctgcctgagattcgagggcgaagaggtggccgggggcgcccaagggggcagcctcctgtgcccccaaagccttccatcaggccccggccagggagcttgagatccaagccagagcccccctctgaggacctgggaagcctgcaccctggggccctactgtttcgagcgtctgggcatcctccatctcttcccaccatggctgatgcccttgcccatggagctgatgtcaactgggtcaatgggggccaagataatgccacaccgctgatccaggccacagctgctaattctcttctggcctgtgagtttctcctccagaacggggcgaacgtgaaccaagcggacagtgcgggccggggcccgctgcaccacgcaaccattcttggccacacggggctcgcctgcctgttcctgaaacggggagctgatctgggggctcgagactctgaaggcagggaccctctgaccatcgccatggaaacagccaacgctgacatcgtcaccctgctacgactggcaaagatgagggaggctgaagcggcccaggggcaggcaggagatgagacgtatcttgacatcttccgcgacttctccctcatggcgtcagacgacccggagaagctgagccgtcgcagtcatgacctccacacgctgtgacccgaggcccacggggcccgcgcctgcctcccttccccgccaccgggccctctgccattaaagcctccgtgcttcgctcttcc

SEQ ID NO: 108489 - DNA, 870 bp, Homo sapiens
  Payload ID: 1318
  Gene Symbol: ACAP1
  Gene Name: ArfGAP with coiled-coil, ankyrin repeat and PH domains 1
  ENST ID: ENST00000570457
  CDS Start-End: 427-870
ccttggggaaagaattgtgcccccaggcccttccccgcggaggtccctctcctccttccccctcatctccccttcctgggacagaaagtgcctccacctgcatccccaggggcccggcctccagggcccgctggccccacagcaggcaagctgagatgacggtcaagctggatttcgaggagtgtctcaaggactcaccccgtttccgacagaccagatggacccaagctctcttcccatgaccccctctttcccagagcctctattgagctggtggaagccgaagtgtcagaattggagacccgtctggaaaagctcctgaaactgggcactggtctcctggaaagtgggcgccattaccttgctgccagccgcgccttcgttgtcggcatttgtgacctggcccgcctgggtccaccagagcccatgatggcggagtgtctggaaaaattcaccgtgagcctgaaccacaagctggacagccatgcggagcttctagatgccacccaacacacactgcagcagcagatccagaccctggtcaaggaaggtctgcggggtttccgagaggctcgccgggatttctggcggggggctgagagcctggaggctgccctgacccacaacgcagaggttcccaggcgccgggcccaggaggcagaagaggcaggagctgctttgaggacggctcgagctgggtaccggggacgggcactggattatgccctgcagatcaacgtgattgaggacaagaggaagtttgacatcatggagtttgtgctgcgtttggtggaggcccaggctacccatttccagcagggccatgaggagctgagccggctgtcccagtatcgaaaggagctgggcgcc

SEQ ID NO: 108490 - DNA, 614 bp, Homo sapiens
  Payload ID: 1318
  Gene Symbol: ACAP1
  Gene Name: ArfGAP with coiled-coil, ankyrin repeat and PH domains 1
  ENST ID: ENST00000575425
  CDS Start-End: 310-614
agaattgtgcccccaggcccttccccgcggaggtccctctcctccttccccctcatctccccttcctgggacagaaagtgcctccacctgcatccccaggggcccggcctccagggcccgctggccccacagcaggcaagctgagatgacggtcaagctggatttcgaggagtgtctcaaggactcaccccgtttccgctcctgaaactgggcactggtctcctggaaagtgggcgccattaccttgctgccagccgcgccttcgttgtcggcatttgtgacctggcccgcctgggtccaccagagcccatgatggcggagtgtctggaaaaattcaccgtgagcctgaaccacaagctggacagccatgcggagcttctagatgccacccaacacacactgcagcagcagatccagaccctggtcaaggaaggtctgcggggtttccgagaggctcgccgggatttctggcggggggctgagagcctggaggctgccctgacccacaacgcagaggttcccaggcgccgggcccaggaggcagaagaggcaggagctgctttgaggacggctcgagctgggtaccggggacgggcactggattatgccctgca

SEQ ID NO: 108491 - DNA, 317 bp, Homo sapiens
  Payload ID: 1318
  Gene Symbol: ACAP1
  Gene Name: ArfGAP with coiled-coil, ankyrin repeat and PH domains 1
  ENST ID: ENST00000575415
  CDS Start-End: 102-236
ctcccaaagtgttgggattacaggcgtgagccaccgcgcccggccaaagatagtgtcgttcatttcttaattccctcctcttcaggctacgactggcaaagatgagggaggctgaagcggcccaggggcaggcaggagatgagacgtatcttgacatcttccgcgacttctccctcatggcgtcagacgacccggagaagctgagccgtcgcagtcatgacctccacacgctgtgacccgaggcccacggggcccgcgcctgcctcccttccccgccaccgggccctctgccattaaagcctccgtgcttcgctctt

SEQ ID NO: 108492 - DNA, 274 bp, Homo sapiens
  Payload ID: 1318
  Gene Symbol: ACAP1
  Gene Name: ArfGAP with coiled-coil, ankyrin repeat and PH domains 1
  ENST ID: ENST00000570504
  CDS Start-End: 58-192
gaaaggctgcgcgaagtgtgcactgggacgtggagtagaaggctacgactggcaaagatgagggaggctgaagcggcccaggggcaggcaggagatgagacgtatcttgacatcttccgcgacttctccctcatggcgtcagacgacccggagaagctgagccgtcgcagtcatgacctccacacgctgtgacccgaggcccacggggcccgcgcctgcctcccttccccgccaccgggccctctgccattaaagcctccgtgcttcgctcttc

SEQ ID NO: 108493 - DNA, 412 bp, Homo sapiens
  Payload ID: 1318
  Gene Symbol: ACAP1
  Gene Name: ArfGAP with coiled-coil, ankyrin repeat and PH domains 1
  ENST ID: ENST00000574499
  CDS Start-End: 133-330
ggagtagaaggcaggcgggagggcgggcagggtgcaaggatgcttggcccaccctgagaggcgtaattcgcccatcaacattgctgtcaggcatctttttagcactagacgtgaccccgggggtgggggcagatgaacggaacgcaacccagctcaaaggatgggaagttgtgggggaggctacgactggcaaagatgagggaggctgaagcggcccaggggcaggcaggagatgagacgtatcttgacatcttccgcgacttctccctcatggcgtcagacgacccggagaagctgagccgtcgcagtcatgacctccacacgctgtgacccgaggcccacggggcccgcgcctgcctcccttccccgccaccgggccctctgccattaaagcctccgtgcttcgctcttc

SEQ ID NO: 108494 - DNA, 320 bp, Homo sapiens
  Payload ID: 1318
  Gene Symbol: ACAP1
  Gene Name: ArfGAP with coiled-coil, ankyrin repeat and PH domains 1
  ENST ID: ENST00000571471
  CDS Start-End: 105-239
gctgacgccgaaacagaagcctgtgctgtggggcctcggaaaggggctgggccagcgccggggccaggctcgagaaaggctgcgcgaagctacgactggcaaagatgagggaggctgaagcggcccaggggcaggcaggagatgagacgtatcttgacatcttccgcgacttctccctcatggcgtcagacgacccggagaagctgagccgtcgcagtcatgacctccacacgctgtgacccgaggcccacggggcccgcgcctgcctcccttccccgccaccgggccctctgccattaaagcctccgtgcttcgctctt

SEQ ID NO: 108495 - DNA, 7160 bp, Homo sapiens
  Payload ID: 1319
  Gene Symbol: ACAP2
  Gene Name: ArfGAP with coiled-coil, ankyrin repeat and PH domains 2
  Uniprot ID: Q15057
  ENST ID: ENST00000326793
  CDS Start-End: 232-2568
cgtttccctgcggccagcgctctacttggggcgggaggaagaggggcgggactggggcctgactagtcgtcgccgtcttcgcggctgctatgaccagcgggcgaggcgcccttcgcagctccgcgcaacgctagtcgcggccgtgcgcccgccgtagccgtctgcgtcccagcgcggccgctcccgcggccccctcggctttgccagcgccgcctgcgaggcggaggcaggatgaagatgactgtggatttcgaggagtgtctgaaggactcgccccgcttcagggcagctttggaagaagtagaaggtgatgtggcagaattggaactaaaacttgataagcttgtgaaactttgtattgcaatgattgatactggaaaagccttttgtgttgcaaataaacagttcatgaatgggattcgagacctggctcagtattctagtaatgatgctgtcgttgagacaagtttgaccaagttttctgacagtcttcaagaaatgataaattttcacacaatcctgtttgaccaaactcagagatcaattaaggcacagcttcagaactttgttaaagaagatcttagaaaattcaaagatgccaagaagcaattcgaaaaagtcagtgaagaaaaagaaaatgcgttagtaaaaaatgcccaagtacaaagaaacaaacaacatgaagttgaagaagccaccaacattctgacagcaacaagaaaatgtttccgacacatagccctcgattatgtgcttcagattaatgttcttcaatcaaaaaggagatcagaaatcctaaaatcaatgttgtcatttatgtatgcccatttggccttctttcatcaaggatatgatctgtttagtgaacttggaccctacatgaaggatcttggtgcacagttggatcgactggttgtggatgcagcaaaggagaaaagagaaatggagcaaaaacattccaccattcaacaaaaggatttctccagtgatgattctaagttagaatataacgtagatgctgcaaatggcatagttatggaaggatatctgttcaaacgagccagcaatgccttcaaaacttggaacaggcgctggttttcaatacagaataatcagttggtttaccagaaaaaatttaaggataatccgactgtggtagttgaagacctcaggctttgcacagtgaaacattgtgaagacatagagcgacgattctgctttgaggtggtctcgccaacaaaaagttgcatgctccaggcagattccgaaaagctgcgccaggcatggattaaggctgttcagaccagtattgctactgcttatagagagaagggtgatgaatcagagaagctggataagaaatcatctccatccacaggaagcctagattctggaaatgagtccaaagagaaattattgaaaggagaaagtgcgcttcagcgggtccagtgtatccctggcaatgccagctgttgtgactgtggcctggcagatccacggtgggccagcatcaacctgggcatcaccttgtgtatcgagtgctccggaattcaccggagccttggggttcatttttcaaaagtacgatctttaactttagacacctgggagccagaacttttaaagcttatgtgtgagttggggaatgatgttataaatcgagtttatgaagctaatgtggaaaaaatgggaataaagaaaccccaaccaggacaaagacaggagaaggaggcatatatcagagcaaaatatgtggagaggaaatttgtggataaatattctatatcattatcacctcctgagcagcaaaaaaagtttgtctctaaaagttctgaagaaaagaggctgagcatttctaaatttgggccaggggaccaagtcagagcatctgcccaaagttcagtcagaagtaatgacagtggaattcagcagagctctgatgatggaagagaatctttaccctccacggtgtcagccaatagtttatatgagcctgaaggagaaaggcaagattcttctatgtttcttgactcgaaacatcttaatccaggacttcagctttatagggcgtcatatgaaaaaaaccttcctaaaatggctgaggctttggctcatggtgcagacgtgaactgggccaattcagaggaaaacaaagcgacaccacttattcaggctgtattagggggctctttggtgacgtgtgagttcctcctacagaatggtgctaatgtcaaccaaagagatgtccaagggcggggaccattgcaccatgccaccgtcttagggcacacagggcaggtatgtttattcctaaaacgaggtgccaatcaacatgccactgatgaagaagggaaagaccctttgagcatagctgtggaagcagccaatgctgatatagtcaccttgttacgtttagcaagaatgaatgaagagatgcgggaatcagaaggactttatggacagccaggtgatgaaacttatcaggacatatttcgtgatttttcccaaatggcatccaataatccagagaaactaaatcgtttccagcaagattcacagaaattctgaatttttttaaaaatgggaaaatatgaaatctggtgaccccctaatgtatacagctaaaaaatcacaatttttttactgctttaattctacttaattttggtagatattgaatggcttggaaaagaggtacccattcatatatttataaattaaaacatagttatctagtagtaggagaggaacctagtttaggacctcttttattaaaaaagcctatttaaagggctatttctgtagacagaagttcagtctagatttaggccatctctaggttacaagatgataggaggttagacaaaagtgattcttttgccaatgggtggtggcattgatttttttcctccatgcatcttgcccaggatcactcagtcaagcatgtcttcatcaagtggaagccaactgtcctgcctgcctcaagaatatgtgttttctttagcttccctgaggctttttggtggttcagaaataggtgtgtgtgttgatgtgtttttggtaacctagctttcatacacataatatatgatttattagaactagagaatgtgttttccccgtttgttcataaatgcggtcggttatacttcttaggtgacaggttattgtccagtactttaatgtatgtatgtataatggctgtacaggtagaccataattcagtcctttagatttattttatgcagcaaaaagaagctcttttttttttttaatcacaaaaaaaaaccccagttcaaaatgtgtagttcttcattgttgggttgattccccaaaaccttgacagatgtatcgatggaataaaagtatgttttaaaggttacttgaatgtcacaaaattatgccttcatcaaaactttaaaggaaaaatcaatttataaaatcatgtaggccatttttatatttgaaatttgtccttttaaagatagttttgctgttgctcctagtgaaagaaaaatctctgtacaaaggagaaaaagaaccccacttattcttagttaatactaaaatatatagcaataaattgctgtttattttttctacatctattttgtgtacttgtacacagtgtacattcttttaaattatatcgtgtatatagctttagtattcggttacatgattcacagacccctgaattccaaaatattatggataaacattaccatttatatgctacaaattagtctgattccatctttgaaaatgtcttaaagtataaaataattaatttgctttttttttttttttttcccgagatggcgtcttgctgtgtcacccaggctggagtgcagtggcacgatctcagctcactgcagcctcctcctcttgggttcaagcaattctcctgcctcagcctcccgagtagctgggactacaggcacccgccaccattccgagctaatttctatatttttagtaaagacgggtttcaccattttggccaggttggtctcgaactcctgacctcaggtgatcagcctgctttagcctcccagagtgctgggattacaggcgtgagccaccgcacccagcctaatttgccttttgattccttcccattgttgtcaacaattaagtctattcttcttttagaaattatatgtaaatgatattattgatactctttctaaataagaggttttaaaatatataaaaactttatgatccaattatagataaattttctaacatttcccagtcactagggttttataagttgattaaacatcaaatcagaatctagccaagcaggaattatattgaaataagttcacattacagaaaaggttccataatttggccaaactgcatgcatgtaatgcttatttagtaatggtcactgtatgttagataaggataaaaatatatttgtgaattacttctgaggaaatgctaacttccacagcattgtatttaattataacaataacaggaacattaaatctttatctttgctgtttcacctcaaagtcatagatcatctggctttttaggcaccttcactaaaggcaaaaatctgatttgtagtttttattagcatgtaccttgaaattatttgaccaagaagctcaaagaaaagaagtacgttaaagaaaaagaaaaaacctcacttttcctttatagtgtcccttcctgttttaattcctaaagatcctgacttttatctgaggaagtctaggtagttttccttttggatctggccattggtgcgtgtttcattcagatcacctctggaatctctgtggttgtgaaggcaattccttatgagactcttgcctcctgtggcttacgtgatgaattgttaatatggcagtaattaattagtatctacttaaatttagtggtcagaaatgtatttgaagtgccttaaagatgatcatggttcagaatatcttcagagaaagcaaaatctttaatattgcagggagcctagcaatacaagtacacatttctgtggcttgatttcttgaatatgctgagacccaatttggactacatttggcagaaatgatggagtaaacagcaaggctttaaattaaattaatagttacaaggtaggttggctcttaggtgaatttagccatgtcaactaatagcttttatatggtatgtaacaaatctgaattatgttatgctgtgaattattcagtgcattataagaaatcttagttaatcatgcttttgggcttcattagtcaatgtgattggccttttattttctttccataacttatctgctattattagtttcttattccttattattaatctgttagctcattatcattagcttactaacttgaaagttagattaatatcaaaataagaatagcagcactatgaagagttaataaaatgcaatttcatgttagagctagaataaaagtaattgagcagtcatttgcaaatgcttcattataacatttatgtgcttaagatttctaaggttttaaaaagttacctttaatacaatccttagaaactcagaaatttcctgatattcattagattatggtgtttgcctaatttataccggttttcactgtatattttaatgaactttgattggttacttttccagacatacagatttaatttggaatatgaactttggttcttcatgagtgcattttgaaaaagaaaaaaagtacacattcagaatctggccaatttaagtttgtattttaaaaatattttatgcatgttaagtatggtcgcagtaaatgaaattgtgtttaagactaaatttactaccgttttgaacagacattcccagatcattcttatattgtcagataacacttgtgtataatatcactttggatcatggacatgagctggaaaaatgatgtatttttgtagattgtatgtccagaatgactttagaaccgcatgatacggtggaaggagcactggactagtcgtcactaccctttttggattcagggctcctcacaattaaaatgagtgtaatgaaacaaggtgaaaatatagaagcatccctttgtatactgttttgctacttacagtgtacttggcattgctttatctcactggattctcatggtaggatttctgagatcttaatctaagctccaaagttgtctacttttttgatcctagggtgctccttttgttttacagagcagggtcacttgatttgctagctggtggcagaattggcaccattacccaggtctgactgaccaccagtcagaggcactttatttgtatcatgaaatgatttgaaatcattgtaaagcagcgaagtctgataatgaatgccagctttccttgtgctttgataacaaagactccaaatattctggagaacctggataaaagtttgaagggctagattgggatttgaagacaaaattgtaggaaatcttacatttttgcaataacaaacattaatgaaagcaaaacattataaaagtaattttaattcaccacatacttatcaatttcttgatgcttccaaatgacatctacagatatggttttgtggacatctttttctgtttacataaatttatccacttaaaatgtgataatgtggagacaaagcaagatttgattacataaacttttctctgcattggtcttttcactatcttatttgctaacttttcttatttttcttcaacctccccaccctccattttttggatattaaacagggaaagcttgctacattataaagattgttggcaccatttattttacacaaaggctaaaggttaacttttggaaatgatgagctacttttatatatgtgtttactcatgctttgtgatatttctggatcattccagtcataaagacttattacatgtactatttcttgctacctgtgaaaaggtatattttaaagaatgtataaccaacagtccatttactttttattagtatgtagaggatttgtatctaattcatgaatgtagttttacagtagtttgtcattgtaaatggagcaaagtacattatcttctaaaatgtacattatgtaagaattgtaaatatacttaagtaatttgtatgccaaaaaattacaataagtcaataaagatctcacctctggcttagttctttca

SEQ ID NO: 108496 - DNA, 700 bp, Homo sapiens
  Payload ID: 1319
  Gene Symbol: ACAP2
  Gene Name: ArfGAP with coiled-coil, ankyrin repeat and PH domains 2
  ENST ID: ENST00000447662
  CDS Start-End: 59-208
gcggccgctcccgcggccccctcggctttgccagcgccgcctgcgaggcggaggcaggatgaagatgactgtggatttcgaggagtgtctgaaggactcgccccgcttcagatgccgtgagagcaggggcttgttttaccgcttgctgtttcctaagtctctagtacagtgcgtgacatccattctggagctgggaagtccaagataaagatgccagcagattagtgtctggtgagggccagctatctctgctttcaagatggcaccttgttgatgtgtcctcaatggcagaaggtggaagggcaaaaaagggaccattaggaccctttcttcagcctcttttataagagcactaatccattcatgaaggcggagccctcatgtcttcatcacttccccaaaggccccacctcttcatactgtgacaatggagatcaagtttcaacatgaattttggagagacacaaacattcaaaccatagcagggcagctttggaagaagtagaaggtgatgtggcagaattggaactaaaacttgataagcttgtgaaactttgtattgcaatgattgatactggaaaagccttttgtgttgcaaataaacagttcatgaatgggattcgagacctggctcagtattctagtaatgatgctgtcgttgagacaagtttgaccaagttttctgacagtcttcaagaaa

SEQ ID NO: 108497 - DNA, 235 bp, Homo sapiens
  Payload ID: 1319
  Gene Symbol: ACAP2
  Gene Name: ArfGAP with coiled-coil, ankyrin repeat and PH domains 2
  ENST ID: ENST00000439666
  CDS Start-End: 83-235
gaggcaggatgaagatgactgtggatttcgaggagtgtctgaaggactcgccccgcttcagcttgtgaaactttgtattgcaatgattgatactggaaaagccttttgtgttgcaaataaacagttcatgaatgggattcgagacctggctcagtattctagtaatgatgctgtcgttgagacaagtttgaccaagttttctgacagtcttcaagaaatgataaattttcacaca

SEQ ID NO: 108498 - DNA, 684 bp, Homo sapiens
  Payload ID: 1319
  Gene Symbol: ACAP2
  Gene Name: ArfGAP with coiled-coil, ankyrin repeat and PH domains 2
  ENST ID: ENST00000450200
  CDS Start-End: 1-684
gagccttggggttcatttttcaaaagtacgatctttaactttagacacctgggagccagaacttttaaagcttatgtgtgagttggggaatgatgttataaatcgagtttatgaagctaatgtggaaaaaatgggaataaagaaaccccaaccaggacaaagacaggagaaggaggcatatatcagagcaaaatatgtggagaggaaatttgtggataaatattctatatcattatcacctcctgagcagcaaaaaaagtttgtctctaaaagttctgaagaaaagaggctgagcatttctaaatttgggccaggggaccaagtcagagcatctgcccaaagttcagtgattgctgtaaatagcgacgaggccaggcgggagtctctgttttgtcctgatgagctagattcactcttctcctactttgatacttcttcaaaactgcgtagtatcagaagtaatgacagtggaattcagcagagctctgatgatggaagagaatctttaccctccacggtgtcagccaatagtttatatgagcctgaaggagaaaggcaagattcttctatgtttcttgactcgaaacatcttaatccaggacttcagctttatagggcgtcatatgaaaaaaaccttcctaaaatggctgaggctttggctcatggtgcagacgtgaactgggc

SEQ ID NO: 108499 - DNA, 766 bp, Homo sapiens
  Payload ID: 1319
  Gene Symbol: ACAP2
  Gene Name: ArfGAP with coiled-coil, ankyrin repeat and PH domains 2
  ENST ID: ENST00000439758
  CDS Start-End: 1-766
cagtgaagaaaaagaaaatgcgttagtaaaaaatgcccaagtacaaagaaacaaacaacatgaagttgaagaagccaccaacattctgacagcaacaagaaaatgtttccgacacatagccctcgattatgtgcttcagattaatgttcttcaatcaaaaaggagatcagaaatcctaaaatcaatgttgtcatttatgtatgcccatttggccttctttcatcaaggatatgatctgtttagtgaacttggaccctacatgaaggatcttggtgcacagttggatcgactggttgtggatgcagcaaaggagaaaagagaaatggagcaaaaacattccaccattcaacaaaaggctgcgttacaggatttctccagtgatgattctaagttagaatataacgtagatgctgcaaatggcatagttatggaaggatatctgttcaaacgagccagcaatgccttcaaaacttggaacaggcgctggttttcaatacagaataatcagttggtttaccagaaaaaatttaaggataatccgactgtggtagttgaagacctcaggctttgcacagtgaaacattgtgaagacatagagcgacgattctgctttgaggtggtctcgccaacaaaaagttgcatgctccaggcagattccgaaaagctgcgccaggcatggattaaggctgttcagaccagtattgctactgcttatagagagaagggtgatgaatcagagaagctggataagaaatcatctccatcc

SEQ ID NO: 108500 - DNA, 3207 bp, Homo sapiens
  Payload ID: 1319
  Gene Symbol: ACAP2
  Gene Name: ArfGAP with coiled-coil, ankyrin repeat and PH domains 2
  ENST ID: ENST00000618471
  CDS Start-End: 61-2394
gcgcggccgctcccgcggccccctcggctttgccagcgccgcctgcgaggcggaggcaggatgaagatgactgtggatttcgaggagtgtctgaaggactcgccccgcttcagggcagctttggaagaagtagaaggtgatgtggcagaattggaactaaaacttgataagcttgtgaaactttgtattgcaatgattgatactggaaaagccttttgtgttgcaaataaacagttcatgaatgggattcgagacctggctcagtattctagtaatgatgctgtcgttgagacaagtttgaccaagttttctgacagtcttcaagaaatgataaattttcacacaatcctgtttccaaactcagagatcaattataaaagtttcactaagtttttctttagagatcttagaaaattcaaagatgccaagaagcaattcgaaaaagtcagtgaagaaaaagaaaatgcgttagtaaaaaatgcccaagtacaaagaaacaaacaacatgaagttgaagaagccaccaacattctgacagcaacaagaaaatgtttccgacacatagccctcgattatgtgcttcagattaatgttcttcaatcaaaaaggagatcagaaatcctaaaatcaatgttgtcatttatgtatgcccatttggccttctttcatcaaggatatgatctgtttagtgaacttggaccctacatgaaggatcttggtgcacagttggatcgactggttgtggatgcagcaaaggagaaaagagaaatggagcaaaaacattccaccattcaacaaaaggatttctccagtgatgattctaagttagaatataacgtagatgctgcaaatggcatagttatggaaggatatctgttcaaacgagccagcaatgccttcaaaacttggaacaggcgctggttttcaatacagaataatcagttggtttaccagaaaaaatttaaggataatccgactgtggtagttgaagacctcaggctttgcacagtgaaacattgtgaagacatagagcgacgattctgctttgaggtggtctcgccaacaaaaagttgcatgctccaggcagattccgaaaagctgcgccaggcatggattaaggctgttcagaccagtattgctactgcttatagagagaagggtgatgaatcagagaagctggataagaaatcatctccatccacaggaagcctagattctggaaatgagtccaaagagaaattattgaaaggagaaagtgcgcttcagcgggtccagtgtatccctggcaatgccagctgttgtgactgtggcctggcagatccacggtgggccagcatcaacctgggcatcaccttgtgtatcgagtgctccggaattcaccggagccttggggttcatttttcaaaagtacgatctttaactttagacacctgggagccagaacttttaaagcttatgtgtgagttggggaatgatgttataaatcgagtttatgaagctaatgtggaaaaaatgggaataaagaaaccccaaccaggacaaagacaggagaaggaggcatatatcagagcaaaatatgtggagaggaaatttgtggataaatattctatatcattatcacctcctgagcagcaaaaaaagtttgtctctaaaagttctgaagaaaagaggctgagcatttctaaatttgggccaggggaccaagtcagagcatctgcccaaagttcagtcagaagtaatgacagtggaattcagcagagctctgatgatggaagagaatctttaccctccacggtgtcagccaatagtttatatgagcctgaaggagaaaggcaagattcttctatgtttcttgactcgaaacatcttaatccaggacttcagctttatagggcgtcatatgaaaaaaaccttcctaaaatggctgaggctttggctcatggtgcagacgtgaactgggccaattcagaggaaaacaaagcgacaccacttattcaggctgtattagggggctctttggtgacgtgtgagttcctcctacagaatggtgctaatgtcaaccaaagagatgtccaagggcggggaccattgcaccatgccaccgtcttagggcacacagggcaggtatgtttattcctaaaacgaggtgccaatcaacatgccactgatgaagaagggaaagaccctttgagcatagctgtggaagcagccaatgctgatatagtcaccttgttacgtttagcaagaatgaatgaagagatgcgggaatcagaaggactttatggacagccaggtgatgaaacttatcaggacatatttcgtgatttttcccaaatggcatccaataatccagagaaactaaatcgtttccagcaagattcacagaaattctgaatttttttaaaaatgggaaaatatgaaatctggtgaccccctaatgtatacagctaaaaaatcacaatttttttactgctttaattctacttaattttggtagatattgaatggcttggaaaagaggtacccattcatatatttataaattaaaacatagttatctagtagtaggagaggaacctagtttaggacctcttttattaaaaaagcctatttaaagggctatttctgtagacagaagttcagtctagatttaggccatctctaggttacaagatgataggaggttagacaaaagtgattcttttgccaatgggtggtggcattgatttttttcctccatgcatcttgcccaggatcactcagtcaagcatgtcttcatcaagtggaagccaactgtcctgcctgcctcaagaatatgtgttttctttagcttccctgaggctttttggtggttcagaaataggtgtgtgtgttgatgtgtttttggtaacctagctttcatacacataatatatgatttattagaactagagaatgtgttttccccgtttgttcataaatgcggtcggttatacttcttaggtgacaggttattgtccagtactttaatgtatgtatgtataatggctgtacaggtagaccataattcagtcctttagatttattttatgcagcaaaaagaagctcttttttttttttaatcacaaaaaaaaaccccagttcaaaatgtgtagttcttcattgttgggttgattccccaaaaccttgacagatgtatcgatggaataaaagtatgttttaaaggtt

SEQ ID NO: 108501 - DNA, 1647 bp, Homo sapiens
  Payload ID: 1319
  Gene Symbol: ACAP2
  Gene Name: ArfGAP with coiled-coil, ankyrin repeat and PH domains 2
  ENST ID: ENST00000635383
  CDS Start-End: 7-1647
ggcaggatgaagatgactgtggatttcgaggagtgtctgaaggactcgccccgcttcagggcagctttggaagaagtagaaggtgatgtggcagaattggaactaaaacttgataagcttgtgaaactttgtattgcaatgattgatactggaaaagccttttgtgttgcaaataaacagttcatgaatgggattcgagacctggctcagtattctagtaatgatgctgtcgttgagacaagtttgaccaagttttctgacagtcttcaagaaatgataaattttcacacaatcctgtttgaccaaactcagagatcaattaaggcacagcttcagaactttgttaaagaagatcttagaaaattcaaagatgccaagaagcaattcgaaaaagtcagtgaagaaaaagaaaatgcgttagtaaaaaatgcccaagtacaaagaaacaaacaacatgaagttgaagaagccaccaacattctgacagcaacaagaaaatgtttccgacacatagccctcgattatgtgcttcagattaatgttcttcaatcaaaaaggagatcagaaatcctaaaatcaatgttgtcatttatgtatgcccatttggccttctttcatcaaggatatgatctgtttagtgaacttggaccctacatgaaggatcttggtgcacagttggatcgactggttgtggatgcagcaaaggagaaaagagaaatggagcaaaaacattccaccattcaacaaaaggatttctccagtgatgattctaagttagaatataacgtagatgctgcaaatggcatagttatggaaggatatctgttcaaacgagccagcaatgccttcaaaacttggaacaggaaaaagcccgatcacatcaggcgctggttttcaatacagaataatcagttggtttaccagaaaaaatttaaggataatccgactgtggtagttgaagacctcaggctttgcacagtgaaacattgtgaagacatagagcgacgattctgctttgaggtggtctcgccaacaaaaagttgcatgctccaggcagattccgaaaagctgcgccaggcatggattaaggctgttcagaccagtattgctactgcttatagagagaagggtgatgaatcagagaagctggataagaaatcatctccatccacaggaagcctagattctggaaatgagtccaaagagaaattattgaaaggagaaagtgcgcttcagcgggtccagtgtatccctggcaatgccagctgttgtgactgtggcctggcagatccacggtgggccagcatcaacctgggcatcaccttgtgtatcgagtgctccggaattcaccggagccttggggttcatttttcaaaagtacgatctttaactttagacacctgggagccagaacttttaaagcttatgtgtgagttggggaatgatgttataaatcgagtttatgaagctaatgtggaaaaaatgggaataaagaaaccccaaccaggacaaagacaggagaaggaggcatatatcagagcaaaatatgtggagaggaaatttgtggataaatattctatatcattatcacctcctgagcagcaaaaaaagtttgtctctaaaagttctgaagaaaagaggctgagc

SEQ ID NO: 108502 - DNA, 2280 bp, Homo sapiens
  Payload ID: 1320
  Gene Symbol: ACAP3
  Gene Name: ArfGAP with coiled-coil, ankyrin repeat and PH domains 3
  Uniprot ID: Q96P50
  ENST ID: ENST00000353662
  CDS Start-End: 1-2280
atggtggaagccggtaaggcctacgtcagcaccagcaggcttttcgtgagcggcgtccgcgacctgtcccagcagtgccagggcgacaccgtcatctcggaatgtctgcagaggttcgctgacagcctacaggaggtggtgaactaccacatgatcctgtttgaccaggcccagaggtccgtgcggcagcagctccagagctttgtcaaagaggatgtgcggaagttcaaggagacaaagaagcagtttgacaaggtgcgggaggacctggagctgtccctggtgaggaacgcccaggccccgaggcaccggccccacgaggtggaggaagccaccggggccctcaccctcaccaggaagtgcttccgccacctggcactggactatgtgctccagatcaatgttctgcaggccaagaagaagtttgagatcctggactctatgctgtccttcatgcacgcccagtccagcttcttccagcagggctacagcctcctgcaccagctggacccctacatgaagaagctggcagccgagctggaccagctggtgatcgactctgcggtggaaaagcgtgagatggagcgaaagcacgccgccatccagcagcggacgctgctgcaggacttctcctacgatgagtccaaagtggagtttgacgtggacgcgcccagtggggtggtgatggagggctacctcttcaagagggccagcaacgctttcaagacatggaaccggcgctggttctccattcagaacagccagctggtctaccagaagaagctcaaggatgccctcaccgtggtggtggatgacctccgcctgtgctctgtgaagccgtgtgaggacatcgagcggaggttctgcttcgaggtgctgtcacccaccaagagctgcatgctgcaggctgactccgagaagctgcggcaagcctgggtccaggctgtgcaggccagcatcgcctccgcctaccgcgagagccctgacagttgctatagcgagaggctggaccgcacagcatccccgtccacgagcagcatcgactccgccaccgacactcgggagcgtggcgtgaagggcgagagtgtgctgcagcgtgtgcagagtgtggccggcaacagccagtgcggcgactgcggccagccggacccccgctgggccagcatcaacctgggcgtgctgctctgcattgagtgctccggcatccacaggagcctgggtgtccactgctccaaggtgcggtccctgacgctggactcgtgggagcctgagctgctaaagctgatgtgtgagcttggaaacagcgctgtgaatcagatctatgaggcccagtgtgagggtgcaggcagcaggaaacccacagccagcagctcccggcaggacaaggaggcctggatcaaggacaaatacgtggaaaagaagtttctgcggaaggcgcccatggcaccagccctggaggccccaagacgctggagggtgcagaagtgcctgcggccccacagctctccccgcgctcccactgcccgccgcaaggtccggcttgagcccgttctgccctgtgtggccgctctgtcctcagtgggcaccctggatcgtaagttccgccgagactccctcttctgtcccgacgagctggactcgctcttctcctacttcgacgcaggggccgcaggggctggccctcgcaagggtgcagagtcggaggagtccagcggtgaggcagacggggacactgaggccgaggcctggggcctggcggacgtgcgcgagctgcacccggggctcttggcgcaccgcgcagcgcgtgcccgcgaccttcctgcgctggcggcggcgctggcccacggggccgaggtcaactgggcggacgcggaggatgagggcaagacgccgctggtgcaggccgtgctagggggctccttgatcgtctgtgagttcctgctgcaaaacggagcggacgtgaaccaaagagacagccggggccgggcgcccctgcaccacgccacgctgctgggccgcaccggccaggtttgcctgttcctgaagcggggcgcggaccagcacgccctggaccaagagcagcgggacccgttggccatcgcagtgcaggcggccaacgctgacatcgtgacactgctccgtctggcgcgcatggcggaggaaatgcgcgaggccgaggctgcccctggtcccccgggcgccctggcgggcagccccacggagctccagttccgcaggtgtatccaggagttcatcagcctccacctggaagagagctag

SEQ ID NO: 108503 - DNA, 3896 bp, Homo sapiens
  Payload ID: 1320
  Gene Symbol: ACAP3
  Gene Name: ArfGAP with coiled-coil, ankyrin repeat and PH domains 3
  Uniprot ID: Q96P50
  ENST ID: ENST00000354700
  CDS Start-End: 204-2708
agtgacagcgggcggtgcgcgcgggcggctgactttggcgacgctccccggcggtgacaggcggggcggggcgcggcgcggcggcctcattccggggcgggcgggcgccgaggcggcgcgggcgggacgagcggtccgggccggcgcggctgccgctcggcgccgcggtcctcgtgccagtgagcgccgcggccgccgcagccatgaccgtggagttcgaggagtgcgtcaaggactccccgcgcttcagggcgaccattgacgaggtggagacggacgtggtggagattgaggccaaactggacaagctggtgaagctgtgcagtggcatggtggaagccggtaaggcctacgtcagcaccagcaggcttttcgtgagcggcgtccgcgacctgtcccagcagtgccagggcgacaccgtcatctcggaatgtctgcagaggttcgctgacagcctacaggaggtggtgaactaccacatgatcctgtttgaccaggcccagaggtccgtgcggcagcagctccagagctttgtcaaagaggatgtgcggaagttcaaggagacaaagaagcagtttgacaaggtgcgggaggacctggagctgtccctggtgaggaacgcccaggccccgaggcaccggccccacgaggtggaggaagccaccggggccctcaccctcaccaggaagtgcttccgccacctggcactggactatgtgctccagatcaatgttctgcaggccaagaagaagtttgagatcctggactctatgctgtccttcatgcacgcccagtccagcttcttccagcagggctacagcctcctgcaccagctggacccctacatgaagaagctggcagccgagctggaccagctggtgatcgactctgcggtggaaaagcgtgagatggagcgaaagcacgccgccatccagcagcggacgctgctgcaggacttctcctacgatgagtccaaagtggagtttgacgtggacgcgcccagtggggtggtgatggagggctacctcttcaagagggccagcaacgctttcaagacatggaaccggcgctggttctccattcagaacagccagctggtctaccagaagaagctcaaggatgccctcaccgtggtggtggatgacctccgcctgtgctctgtgaagccgtgtgaggacatcgagcggaggttctgcttcgaggtgctgtcacccaccaagagctgcatgctgcaggctgactccgagaagctgcggcaagcctgggtccaggctgtgcaggccagcatcgcctccgcctaccgcgagagccctgacagttgctatagcgagaggctggaccgcacagcatccccgtccacgagcagcatcgactccgccaccgacactcgggagcgtggcgtgaagggcgagagtgtgctgcagcgtgtgcagagtgtggccggcaacagccagtgcggcgactgcggccagccggacccccgctgggccagcatcaacctgggcgtgctgctctgcattgagtgctccggcatccacaggagcctgggtgtccactgctccaaggtgcggtccctgacgctggactcgtgggagcctgagctgctaaagctgatgtgtgagcttggaaacagcgctgtgaatcagatctatgaggcccagtgtgagggtgcaggcagcaggaaacccacagccagcagctcccggcaggacaaggaggcctggatcaaggacaaatacgtggaaaagaagtttctgcggaaggcgcccatggcaccagccctggaggccccaagacgctggagggtgcagaagtgcctgcggccccacagctctccccgcgctcccactgcccgccgcaaggtccggcttgagcccgttctgccctgtgtggccgctctgtcctcagtgggcaccctggatcgtaagttccgccgagactccctcttctgtcccgacgagctggactcgctcttctcctacttcgacgcaggggccgcaggggctggccctcgcagtctgagtagcgacagtggccttgggggcagctcggatggcagctcggacgtcctggctttcggctcgggctctgtggtggacagcgtcactgaggaggagggtgcagagtcggaggagtccagcggtgaggcagacggggacactgaggccgaggcctggggcctggcggacgtgcgcgagctgcacccggggctcttggcgcaccgcgcagcgcgtgcccgcgaccttcctgcgctggcggcggcgctggcccacggggccgaggtcaactgggcggacgcggaggatgagggcaagacgccgctggtgcaggccgtgctagggggctccttgatcgtctgtgagttcctgctgcaaaacggagcggacgtgaaccaaagagacagccggggccgggcgcccctgcaccacgccacgctgctgggccgcaccggccaggtttgcctgttcctgaagcggggcgcggaccagcacgccctggaccaagagcagcgggacccgttggccatcgcagtgcaggcggccaacgctgacatcgtgacactgctccgtctggcgcgcatggcggaggaaatgcgcgaggccgaggctgcccctggtcccccgggcgccctggcgggcagccccacggagctccagttccgcaggtgtatccaggagttcatcagcctccacctggaagagagctagggccgggcaggccgggcagctgccaccccgcccggcccgacgccccgcatgccccgaagtccctggcgcccacccggccgcggccctgcgtgtgacccgcgggtcgatacctggcagccccagtgctggggcgccgcggccctgctcgcccaggaggagagcgagggccccacactgagtctcttgaagcctcacgtttccctgggggggtgctgcatcgtcgggtgtccctcaccccacctggggaacctctgtcttcaggtcaccccttttcaggggcctgggttgctcatgtcacaagccacttttaaggcccgtgtcacctgtgtccctgtgtcctcagggcctgtgttacttcgtgccccacttctgcccagaacactgacctgttagctggctccctcctgcacaccccagagcctcctcccagggcagaaagggtggcccatccagggaaccaacgagtacctcacttagtgaccccagcatccaggctggcgtcgcgggtgctgggcgggaggggctctggcctgggtcctcagccctggctggacgcgggcgtcccaaggccacgtggctggccacgaaggtccccgtgccagacagccccagccgcatcccggcctcctccggaggcaccttctcctggtactcggcccagagcctgcgcataaagccactttgccactttgcagccctcatctcatgttctttgtagcggaccgagtgggtttgctataggcctcgtctgactttgtcttgcgtcttttctctgtggactcttgaggacgcctgagccccagccctgcccctgaccagcctcccccttgggtccaggggtctttcggctcatattgcagggcctgccaatgccttcacgcaccccttccccaaaggtgcccggcagggaggcagggcctcccccactcagcgcaggtcaggctaaggccagtcggctggtcactatgcaatgctgccctggggaggctccctgagggcacagtgggcgctggacccggccccccaactctcttgcctgctgcctgtgaccctgaagaacagaattgattcttgcccctctccctgtgtgagcttggccccgcctcttgccccaggcccctgctggcgggtctcaccccccacccctcgctttgaataaagcacttgcgcccactgcctgctcctggg

SEQ ID NO: 108504 - DNA, 582 bp, Homo sapiens
  Payload ID: 1320
  Gene Symbol: ACAP3
  Gene Name: ArfGAP with coiled-coil, ankyrin repeat and PH domains 3
  ENST ID: ENST00000354980
  CDS Start-End: 7-165
gcagccatgaccgtggagttcgaggagtgcgtcaaggactccccgcgcttcagagcagcgcgtggggaacaggcagctggagccgcgtttaaggcctgggggcgaccattgacgaggtggagacggacgtggtggagattgaggccaaactggacaagctggtgaagctgtgcagtggcatggtggaagccggtaaggcctacgtcagcaccagcaggcttttcgtgagcggcgtccgcgacctgtcccagcagtgccagggcgacaccgtcatctcggaatgtctgcagaggttcgctgacagcctacaggaggtggtgaactaccacatgatcctgtttgaccaggcccagaggtccgtgcggcagcagctccagagctttgtcaaagaggatgtgcggaagttcaaggagacaaagaagcagtttgacaaggtgcgggaggacctggagctgtccctggtgaggaacgcccaggccccgaggcaccggccccacgaggtggaggaagccaccggggccctcaccctcaccaggaagtgcttccgccacctggcactggactatgtgctccagatcaatg

SEQ ID NO: 108505 - DNA, 2363 bp, Homo sapiens
  Payload ID: 1321
  Gene Symbol: ADAP1
  Gene Name: ArfGAP with dual PH domains 1
  Uniprot ID: O75689
  ENST ID: ENST00000265846
  CDS Start-End: 221-1345
ccgggccccgcgccggcactcgctcagcgaccgcggcggagacacgagcggcggcggcggagcccagagggcggcgggaatgcggaaccggcgcgcgggctgaggccgcccgggatggcgcaggggcggcggcggcgggcggcctgcgcggggccctagcgagccgggctgacgctcccggccccggccccggcatcggcatcgcgggcgcatcgcggccatggccaaggagcggcgcagggcggtcctggagctgctgcagcggccggggaacgcgcgctgcgcggactgcggcgccccggatcccgactgggcctcctacactctgggcgtcttcatctgcctgagctgctcgggaatccaccggaatatcccccaggtcagcaaggtgaagtccgtccgcctggacgcctgggaggaggcccaagtggagttcatggcctcccacgggaacgacgccgcgagagccaggtttgagtccaaagtaccctccttctactaccggcccacgccctccgactgccagctccttcgagagcagtggatccgggccaagtacgagcgacaggagttcatctacccggagaagcaggagccctactcggcagggtaccgtgagggttttctctggaagcgtggccgggacaacgggcagtttttgagccggaagtttgtgctgacagaacgagagggtgctctgaagtatttcaacagaaatgatgccaaggagcccaaggccgtgatgaagatcgagcacctgaacgccaccttccagccggccaagatcggccacccccacggcctgcaggtcacctacctgaaggacaacagcacccgtaacatcttcatctaccatgaggacgggaaggagattgtggactggttcaatgcactccgagctgctcgcttccactacctgcaggtggcattcccaggggccggcgacgcagatctggtgccaaagctctccaggaactacctgaaggaaggctacatggagaagacggggcccaagcaaacggaaggcttccggaagcgctggttcaccatggatgaccgcaggctcatgtacttcaaagaccccctggacgccttcgcccgaggggaagtcttcattggcagcaaggagagtggctacacggtgctgcatgggttcccgccgtccacccagggccaccactggccacatggcatcaccatcgtcacgcccgaccgcaagtttctgtttgcctgcgagacggagtccgaccagagggagtgggtggcggccttccagaaggcggtggacaggcccatgctgccccaggagtacgcagtggaggcgcacttcaagcataaaccttagcgagtgcggctggaggaccacggacattggactcactgtggctggacggaggggacccgtggatgggggggctctggcgtcctgaggccacctggccccacctgctcctcagggcagcccggcgcggccaggtagggcccgagcttcagcttccaggatgcttctctggaacctcaaggcaggcagcccaggccctgggcctgatctctaaccccgtcatgctgctgctgaccacacccagccaacctgcccctccctgacccggggccccctttcctccagggcccagtctggctcccgagctcagacacagcccccaggagccgcccaccacggctgtgggaacttccaggcctcagcgcagagccctgcttggggccagcacggtgggcagctgccggccgctggggactgggccctgctcgcatgccgccccgccctccccccacctccacgactatttattgagcgcctgttgtgtgtcacggggctatgagggccgtggggtgtttgggtggattatccacacaggtcccggcccctgcccgggctggagttgccacagcctgtgctcctggtcctcacctggaggggccagcaggctgccgtcccaccacacgtggcctctgcgcccagcacggtgctcgccgacagtggtgtctgaacccttggggacgagggcctgggccgcggtgaggccaccagaggcaggagtggccctgggggtcccgggcactgtcgcgcttgctgcaggcggcccagccgtgtatttatttttcacctatctccttcctgtcaaggcaggccgggctccagggctccccttgcgtggggcatgtaggtgggggaggcgtctgcaggtcacctggggggcccagccctctcccagccttgcctggctgagctgtgttccaggggagccctggacaagccctcataggcagggagggggtttccgaggccaggcatccgccgccccgtgtcgcatcctggaataaaatgtggctctggcatggtt

SEQ ID NO: 108506 - DNA, 576 bp, Homo sapiens
  Payload ID: 1321
  Gene Symbol: ADAP1
  Gene Name: ArfGAP with dual PH domains 1
  ENST ID: ENST00000454383
  CDS Start-End: 1-576
gtgccgggtccaacctctctgtgagcagctccagttcatggcctcccacgggaacgacgccgcgagagccaggtttgagtccaaagtaccctccttctactaccggcccacgccctccgactgccagctccttcgagagcagtggatccgggccaagtacgagcgacaggagttcatctacccggagaagcaggagccctactcggcagggtaccgtgagggttttctctggaagcgtggccgggacaacgggcagtttttgagccggaagtttgtgctgacagaacgagagggtgctctgaagtatttcaacagaaatgatgccaaggagcccaaggccgtgatgaagatcgagcacctgaacgccaccttccagccggccaagatcggccacccccacggcctgcaggtcacctacctgaaggacaacagcacccgtaacatcttcatctaccatgaggacgggaaggagattgtggactggttcaatgcactccgagctgctcgcttccactacctgcaggtggcattcccaggggccggcgacgcagatctggtgccaaagctctccaggaa

SEQ ID NO: 108507 - DNA, 559 bp, Homo sapiens
  Payload ID: 1321
  Gene Symbol: ADAP1
  Gene Name: ArfGAP with dual PH domains 1
  ENST ID: ENST00000435943
  CDS Start-End: 72-559
tgttccagtttgttttcagccgggtgtactgcattaaccctgcaagaagaaaatggaaagaatttgaaaagatgctggggtgtgcagaggaagggcacgcgagtctgggaagagatcccgactgggcctcctacactctgggcgtcttcatctgcctgagctgctcgggaatccaccggaatatcccccaggtcagcaaggtgaagtccgtccgcctggacgcctgggaggaggcccaagtggagttcatggcctcccacgggaacgacgccgcgagagccaggtttgagtccaaagtaccctccttctactaccggcccacgccctccgactgccagctccttcgagagcagtggatccgggccaagtacgagcgacaggagttcatctacccggagaagcaggagccctactcggcagggtaccgtgagggttttctctggaagcgtggccgggacaacgggcagtttttgagccggaagtttgtgctgacagaacgagagggtgctctgaagtatttcaacagaaatgatgccaaggagcccaaggccgtgatgaa

SEQ ID NO: 108508 - DNA, 622 bp, Homo sapiens
  Payload ID: 1321
  Gene Symbol: ADAP1
  Gene Name: ArfGAP with dual PH domains 1
  ENST ID: ENST00000437486
  CDS Start-End: 1-622
gtaattccctgggagtggaaaaggctggggcggctgcctgtgcacctgggccgtgccgggcctgtgtgtgggtcgtggtttctgcaatggtattggcttcactcgagctccttcgagagcagtggatccgggccaagtacgagcgacaggagttcatctacccggagaagcaggagccctactcggcagggtaccgtgagggttttctctggaagcgtggccgggacaacgggcagtttttgagccggaagtttgtgctgacagaacgagagggtgctctgaagtatttcaacagaaatgatgccaaggagcccaaggccgtgatgaagatcgagcacctgaacgccaccttccagccggccaagatcggccacccccacggcctgcaggtcacctacctgaaggacaacagcacccgtaacatcttcatctaccatgaggacgggaaggagattgtggactggttcaatgcactccgagctgctcgcttccactacctgcaggtggcattcccaggggccggcgacgcagatctggtgccaaagctctccaggaactacctgaaggaaggctacatggagaagacggggcccaagcaaacggaaggcttccggaagcgctg

SEQ ID NO: 108509 - DNA, 2093 bp, Homo sapiens
  Payload ID: 1321
  Gene Symbol: ADAP1
  Gene Name: ArfGAP with dual PH domains 1
  Uniprot ID: O75689
  ENST ID: ENST00000449296
  CDS Start-End: 165-1073
tttccttctccctcagcctgtttcgtaaacatgttctgggtccctgcagtgtgtccctgcagagtcccctcagagactctgtcctagccacatctgggtctctcgctcaccagcccatctccaggcccccgtgtctggcgcctgttggctctttgctaaatttcatggcctcccacgggaacgacgccgcgagagccaggtttgagtccaaagtaccctccttctactaccggcccacgccctccgactgccagctccttcgagagcagtggatccgggccaagtacgagcgacaggagttcatctacccggagaagcaggagccctactcggcagggtaccgtgagggttttctctggaagcgtggccgggacaacgggcagtttttgagccggaagtttgtgctgacagaacgagagggtgctctgaagtatttcaacagaaatgatgccaaggagcccaaggccgtgatgaagatcgagcacctgaacgccaccttccagccggccaagatcggccacccccacggcctgcaggtcacctacctgaaggacaacagcacccgtaacatcttcatctaccatgaggacgggaaggagattgtggactggttcaatgcactccgagctgctcgcttccactacctgcaggtggcattcccaggggccggcgacgcagatctggtgccaaagctctccaggaactacctgaaggaaggctacatggagaagacggggcccaagcaaacggaaggcttccggaagcgctggttcaccatggatgaccgcaggctcatgtacttcaaagaccccctggacgccttcgcccgaggggaagtcttcattggcagcaaggagagtggctacacggtgctgcatgggttcccgccgtccacccagggccaccactggccacatggcatcaccatcgtcacgcccgaccgcaagtttctgtttgcctgcgagacggagtccgaccagagggagtgggtggcggccttccagaaggcggtggacaggcccatgctgccccaggagtacgcagtggaggcgcacttcaagcataaaccttagcgagtgcggctggaggaccacggacattggactcactgtggctggacggaggggacccgtggatgggggggctctggcgtcctgaggccacctggccccacctgctcctcagggcagcccggcgcggccaggtagggcccgagcttcagcttccaggatgcttctctggaacctcaaggcaggcagcccaggccctgggcctgatctctaaccccgtcatgctgctgctgaccacacccagccaacctgcccctccctgacccggggccccctttcctccagggcccagtctggctcccgagctcagacacagcccccaggagccgcccaccacggctgtgggaacttccaggcctcagcgcagagccctgcttggggccagcacggtgggcagctgccggccgctggggactgggccctgctcgcatgccgccccgccctccccccacctccacgactatttattgagcgcctgttgtgtgtcacggggctatgagggccgtggggtgtttgggtggattatccacacaggtcccggcccctgcccgggctggagttgccacagcctgtgctcctggtcctcacctggaggggccagcaggctgccgtcccaccacacgtggcctctgcgcccagcacggtgctcgccgacagtggtgtctgaacccttggggacgagggcctgggccgcggtgaggccaccagaggcaggagtggccctgggggtcccgggcactgtcgcgcttgctgcaggcggcccagccgtgtatttatttttcacctatctccttcctgtcaaggcaggccgggctccagggctccccttgcgtggggcatgtaggtgggggaggcgtctgcaggtcacctggggggcccagccctctcccagccttgcctggctgagctgtgttccaggggagccctggacaagccctcataggcagggagggggtttccgaggccaggcatccgccgccccgtgtcgcatcctggaataaaatgtggctctggcatggttcc

SEQ ID NO: 108510 - DNA, 742 bp, Homo sapiens
  Payload ID: 1321
  Gene Symbol: ADAP1
  Gene Name: ArfGAP with dual PH domains 1
  ENST ID: ENST00000453175
  CDS Start-End: 1-738
tatttcaacagaaatgatgccaaggagcccaaggccgtgatgaagatcgagcacctgaacgccaccttccagccggccaagatcggccacccccacggcctgcaggtcacctacctgaaggacaacagcacccgtaacatcttcatctaccatgaggacgggaagacttgcttgagctacaaaataaggatcttcataaaaatagcaccatctgaaaggaaggcaagttggcccaggccccagcagcaccagggccacagagagattgtggactggttcaatgcactccgagctgctcgcttccactacctgcaggtggcattcccaggggccggcgacgcagatctggtgccaaagctctccaggaactacctgaaggaaggctacatggagaagacggggcccaagcaaacggaaggcttccggaagcgctggttcaccatggatgaccgcaggctcatgtacttcaaagaccccctggacgccttcgcccgaggggaagtcttcattggcagcaaggagagtggctacacggtgctgcatgggttcccgccgtccacccagggccaccactggccacatggcatcaccatcgtcacgcccgaccgcaagtttctgtttgcctgcgagacggagtccgaccagagggagtgggtggcggccttccagaaggcggtggacaggcccatgctgccccaggagtacgcagtggaggcgcacttcaagcataaaccttagcgag

SEQ ID NO: 108511 - DNA, 2085 bp, Homo sapiens
  Payload ID: 1321
  Gene Symbol: ADAP1
  Gene Name: ArfGAP with dual PH domains 1
  ENST ID: ENST00000446141
  CDS Start-End: 1-1073
tttccttctccctcagcctgtttcgtaaacatgttctgggtccctgcagtgtgtccctgcagagtcccctcagagactctgtcctagccacatctgggtctctcgctcaccagcccatctccaggcccccgtgtctggcgcctgttggctctttgctaaatttcatggcctcccacgggaacgacgccgcgagagccaggtttgagtccaaagtaccctccttctactaccggcccacgccctccgactgccagctccttcgagagcagtggatccgggccaagtacgagcgacaggagttcatctacccggagaagcaggagccctactcggcagggtaccgtgagggttttctctggaagcgtggccgggacaacgggcagtttttgagccggaagtttgtgctgacagaacgagagggtgctctgaagtatttcaacagaaatgatgccaaggagcccaaggccgtgatgaagatcgagcacctgaacgccaccttccagccggccaagatcggccacccccacggcctgcaggtcacctacctgaaggacaacagcacccgtaacatcttcatctaccatgaggacgggaaggagattgtggactggttcaatgcactccgagctgctcgcttccactacctgcaggtggcattcccaggggccggcgacgcagatctggtgccaaagctctccaggaactacctgaaggaaggctacatggagaagacggggcccaagcaaacggaaggcttccggaagcgctggttcaccatggatgaccgcaggctcatgtacttcaaagaccccctggacgccttcgcccgaggggaagtcttcattggcagcaaggagagtggctacacggtgctgcatgggttcccgccgtccacccagggccaccactggccacatggcatcaccatcgtcacgcccgaccgcaagtttctgtttgcctgcgagacggagtccgaccagagggagtgggtggcggccttccagaaggcggtggacaggcccatgctgccccaggagtacgcagtggaggcgcacttcaagcataaaccttagcgagtgcggctggaggaccacggacattggactcactgtggctggacggaggggacccgtggatgggggggctctggcgtcctgaggccacctggccccacctgctcctcagggcagcccggcgcggccaggtagggcccgagcttcagcttccaggatgcttctctggaacctcaaggcaggcagcccaggccctgggcctgatctctaaccccgtcatgctgctgctgaccacacccagccaacctgcccctccctgacccggggccccctttcctccagggcccagtctggctcccgagctcagacacagcccccaggagccgcccaccacggctgtgggaacttccaggcctcagcgcagagccctgcttggggccagcacggtgggcagctgccggccgctggggactgggccctgctcgcatgccgccccgccctccccccacctccacgactatttattgagcgcctgttgtgtgtcacggggctatgagggccgtggggtgtttgggtggattatccacacaggtcccggcccctgcccgggctggagttgccacagcctgtgctcctggtcctcacctggaggggccagcaggctgccgtcccaccacacgtggcctctgcgcccagcacggtgctcgccgacagtggtgtctgaacccttggggacgagggcctgggccgcggtgaggccaccagaggcaggagtggccctgggggtcccgggcactgtcgcgcttgctgcaggcggcccagccgtgtatttatttttcacctatctccttcctgtcaaggcaggccgggctccagggctccccttgcgtggggcatgtaggtgggggaggcgtctgcaggtcacctggggggcccagccctctcccagccttgcctggctgagctgtgttccaggggagccctggacaagccctcataggcagggagggggtttccgaggccaggcatccgccgccccgtgtcgcatcctggaataaaatgtggctctggc

SEQ ID NO: 108512 - DNA, 560 bp, Homo sapiens
  Payload ID: 1321
  Gene Symbol: ADAP1
  Gene Name: ArfGAP with dual PH domains 1
  ENST ID: ENST00000453823
  CDS Start-End: 1-560
ctggctgcggcctcaggcgagtggtgttcaggagcttgaagttcatggcctcccacgggaacgacgccgcgagagccaggtttgagtccaaagtaccctccttctactaccggcccacgccctccgactgccagctccttcgagagcagtggatccgggccaagtacgagcgacaggagttcatctacccggagaagcaggagccctactcggcagggtaccgtgagggttttctctggaagcgtggccgggacaacgggcagtttttgagccggaagtttgtgctgacagaacgagagggtgctctgaagtatttcaacagaaatgatgccaaggagcccaaggccgtgatgaagatcgagcacctgaacgccaccttccagccggccaagatcggccacccccacggcctgcaggtcacctacctgaaggacaacagcacccgtaacatcttcatctaccatgaggacgggaaggagattgtggactggttcaatgcactccgagctgctcgcttccactacctgcaggtggcattcccaggggccggcgacgcagat

SEQ ID NO: 108513 - DNA, 2178 bp, Homo sapiens
  Payload ID: 1321
  Gene Symbol: ADAP1
  Gene Name: ArfGAP with dual PH domains 1
  Uniprot ID: O75689
  ENST ID: ENST00000539900
  CDS Start-End: 1-1158
atgttccagtttgttttcagccgggtgtactgcattaaccctgcaagaagaaaatggaaagaatttgaaaagatgctggggtgtgcagaggaagggcacgcgagtctgggaagagatcccgactgggcctcctacactctgggcgtcttcatctgcctgagctgctcgggaatccaccggaatatcccccaggtcagcaaggtgaagtccgtccgcctggacgcctgggaggaggcccaagtggagttcatggcctcccacgggaacgacgccgcgagagccaggtttgagtccaaagtaccctccttctactaccggcccacgccctccgactgccagctccttcgagagcagtggatccgggccaagtacgagcgacaggagttcatctacccggagaagcaggagccctactcggcagggtaccgtgagggttttctctggaagcgtggccgggacaacgggcagtttttgagccggaagtttgtgctgacagaacgagagggtgctctgaagtatttcaacagaaatgatgccaaggagcccaaggccgtgatgaagatcgagcacctgaacgccaccttccagccggccaagatcggccacccccacggcctgcaggtcacctacctgaaggacaacagcacccgtaacatcttcatctaccatgaggacgggaaggagattgtggactggttcaatgcactccgagctgctcgcttccactacctgcaggtggcattcccaggggccggcgacgcagatctggtgccaaagctctccaggaactacctgaaggaaggctacatggagaagacggggcccaagcaaacggaaggcttccggaagcgctggttcaccatggatgaccgcaggctcatgtacttcaaagaccccctggacgccttcgcccgaggggaagtcttcattggcagcaaggagagtggctacacggtgctgcatgggttcccgccgtccacccagggccaccactggccacatggcatcaccatcgtcacgcccgaccgcaagtttctgtttgcctgcgagacggagtccgaccagagggagtgggtggcggccttccagaaggcggtggacaggcccatgctgccccaggagtacgcagtggaggcgcacttcaagcataaaccttagcgagtgcggctggaggaccacggacattggactcactgtggctggacggaggggacccgtggatgggggggctctggcgtcctgaggccacctggccccacctgctcctcagggcagcccggcgcggccaggtagggcccgagcttcagcttccaggatgcttctctggaacctcaaggcaggcagcccaggccctgggcctgatctctaaccccgtcatgctgctgctgaccacacccagccaacctgcccctccctgacccggggccccctttcctccagggcccagtctggctcccgagctcagacacagcccccaggagccgcccaccacggctgtgggaacttccaggcctcagcgcagagccctgcttggggccagcacggtgggcagctgccggccgctggggactgggccctgctcgcatgccgccccgccctccccccacctccacgactatttattgagcgcctgttgtgtgtcacggggctatgagggccgtggggtgtttgggtggattatccacacaggtcccggcccctgcccgggctggagttgccacagcctgtgctcctggtcctcacctggaggggccagcaggctgccgtcccaccacacgtggcctctgcgcccagcacggtgctcgccgacagtggtgtctgaacccttggggacgagggcctgggccgcggtgaggccaccagaggcaggagtggccctgggggtcccgggcactgtcgcgcttgctgcaggcggcccagccgtgtatttatttttcacctatctccttcctgtcaaggcaggccgggctccagggctccccttgcgtggggcatgtaggtgggggaggcgtctgcaggtcacctggggggcccagccctctcccagccttgcctggctgagctgtgttccaggggagccctggacaagccctcataggcagggagggggtttccgaggccaggcatccgccgccccgtgtcgcatcctggaataaaatgtggctctggcatggttcc

SEQ ID NO: 108514 - DNA, 1946 bp, Homo sapiens
  Payload ID: 1321
  Gene Symbol: ADAP1
  Gene Name: ArfGAP with dual PH domains 1
  ENST ID: ENST00000617043
  CDS Start-End: 87-926
gtaattccctgggagtggaaaaggctggggcggctgcctgtgcacctgggccgtgccgggcctgtgtgtgggtcgtggtttctgcaatggtattggcttcactcgagctccttcgagagcagtggatccgggccaagtacgagcgacaggagttcatctacccggagaagcaggagccctactcggcagggtaccgtgagggttttctctggaagcgtggccgggacaacgggcagtttttgagccggaagtttgtgctgacagaacgagagggtgctctgaagtatttcaacagaaatgatgccaaggagcccaaggccgtgatgaagatcgagcacctgaacgccaccttccagccggccaagatcggccacccccacggcctgcaggtcacctacctgaaggacaacagcacccgtaacatcttcatctaccatgaggacgggaaggagattgtggactggttcaatgcactccgagctgctcgcttccactacctgcaggtggcattcccaggggccggcgacgcagatctggtgccaaagctctccaggaactacctgaaggaaggctacatggagaagacggggcccaagcaaacggaaggcttccggaagcgctggttcaccatggatgaccgcaggctcatgtacttcaaagaccccctggacgccttcgcccgaggggaagtcttcattggcagcaaggagagtggctacacggtgctgcatgggttcccgccgtccacccagggccaccactggccacatggcatcaccatcgtcacgcccgaccgcaagtttctgtttgcctgcgagacggagtccgaccagagggagtgggtggcggccttccagaaggcggtggacaggcccatgctgccccaggagtacgcagtggaggcgcacttcaagcataaaccttagcgagtgcggctggaggaccacggacattggactcactgtggctggacggaggggacccgtggatgggggggctctggcgtcctgaggccacctggccccacctgctcctcagggcagcccggcgcggccaggtagggcccgagcttcagcttccaggatgcttctctggaacctcaaggcaggcagcccaggccctgggcctgatctctaaccccgtcatgctgctgctgaccacacccagccaacctgcccctccctgacccggggccccctttcctccagggcccagtctggctcccgagctcagacacagcccccaggagccgcccaccacggctgtgggaacttccaggcctcagcgcagagccctgcttggggccagcacggtgggcagctgccggccgctggggactgggccctgctcgcatgccgccccgccctccccccacctccacgactatttattgagcgcctgttgtgtgtcacggggctatgagggccgtggggtgtttgggtggattatccacacaggtcccggcccctgcccgggctggagttgccacagcctgtgctcctggtcctcacctggaggggccagcaggctgccgtcccaccacacgtggcctctgcgcccagcacggtgctcgccgacagtggtgtctgaacccttggggacgagggcctgggccgcggtgaggccaccagaggcaggagtggccctgggggtcccgggcactgtcgcgcttgctgcaggcggcccagccgtgtatttatttttcacctatctccttcctgtcaaggcaggccgggctccagggctccccttgcgtggggcatgtaggtgggggaggcgtctgcaggtcacctggggggcccagccctctcccagccttgcctggctgagctgtgttccaggggagccctggacaagccctcataggcagggagggggtttccgaggccaggcatccgccgccccgtgtcgcatcctggaataaaatgtggctctggcatggttcc

SEQ ID NO: 108515 - DNA, 2118 bp, Homo sapiens
  Payload ID: 1321
  Gene Symbol: ADAP1
  Gene Name: ArfGAP with dual PH domains 1
  Uniprot ID: O75689
  ENST ID: ENST00000611167
  CDS Start-End: 190-1098
agaccagctccggaaatggtgagcggctgagtcacctcgggcgtcctgggagcagatcccgactgggcctcctacactctgggcgtcttcatctgcctgagctgctcgggaatccaccggaatatcccccaggtcagcaaggtgaagtccgtccgcctggacgcctgggaggaggcccaagtggagttcatggcctcccacgggaacgacgccgcgagagccaggtttgagtccaaagtaccctccttctactaccggcccacgccctccgactgccagctccttcgagagcagtggatccgggccaagtacgagcgacaggagttcatctacccggagaagcaggagccctactcggcagggtaccgtgagggttttctctggaagcgtggccgggacaacgggcagtttttgagccggaagtttgtgctgacagaacgagagggtgctctgaagtatttcaacagaaatgatgccaaggagcccaaggccgtgatgaagatcgagcacctgaacgccaccttccagccggccaagatcggccacccccacggcctgcaggtcacctacctgaaggacaacagcacccgtaacatcttcatctaccatgaggacgggaaggagattgtggactggttcaatgcactccgagctgctcgcttccactacctgcaggtggcattcccaggggccggcgacgcagatctggtgccaaagctctccaggaactacctgaaggaaggctacatggagaagacggggcccaagcaaacggaaggcttccggaagcgctggttcaccatggatgaccgcaggctcatgtacttcaaagaccccctggacgccttcgcccgaggggaagtcttcattggcagcaaggagagtggctacacggtgctgcatgggttcccgccgtccacccagggccaccactggccacatggcatcaccatcgtcacgcccgaccgcaagtttctgtttgcctgcgagacggagtccgaccagagggagtgggtggcggccttccagaaggcggtggacaggcccatgctgccccaggagtacgcagtggaggcgcacttcaagcataaaccttagcgagtgcggctggaggaccacggacattggactcactgtggctggacggaggggacccgtggatgggggggctctggcgtcctgaggccacctggccccacctgctcctcagggcagcccggcgcggccaggtagggcccgagcttcagcttccaggatgcttctctggaacctcaaggcaggcagcccaggccctgggcctgatctctaaccccgtcatgctgctgctgaccacacccagccaacctgcccctccctgacccggggccccctttcctccagggcccagtctggctcccgagctcagacacagcccccaggagccgcccaccacggctgtgggaacttccaggcctcagcgcagagccctgcttggggccagcacggtgggcagctgccggccgctggggactgggccctgctcgcatgccgccccgccctccccccacctccacgactatttattgagcgcctgttgtgtgtcacggggctatgagggccgtggggtgtttgggtggattatccacacaggtcccggcccctgcccgggctggagttgccacagcctgtgctcctggtcctcacctggaggggccagcaggctgccgtcccaccacacgtggcctctgcgcccagcacggtgctcgccgacagtggtgtctgaacccttggggacgagggcctgggccgcggtgaggccaccagaggcaggagtggccctgggggtcccgggcactgtcgcgcttgctgcaggcggcccagccgtgtatttatttttcacctatctccttcctgtcaaggcaggccgggctccagggctccccttgcgtggggcatgtaggtgggggaggcgtctgcaggtcacctggggggcccagccctctcccagccttgcctggctgagctgtgttccaggggagccctggacaagccctcataggcagggagggggtttccgaggccaggcatccgccgccccgtgtcgcatcctggaataaaatgtggctctggcatggttcc

SEQ ID NO: 108516 - DNA, 2934 bp, Homo sapiens
  Payload ID: 1322
  Gene Symbol: ADAP2
  Gene Name: ArfGAP with dual PH domains 2
  Uniprot ID: Q9NPF8
  ENST ID: ENST00000330889
  CDS Start-End: 336-1481
tatgcccttgttcctctttcatagacgcggaaactgagacccacagaggttgaataggttgtccacagtctcgtagctaccaagtgacaggccacgatttgatctcaggccagtgtgttaaactccaatttgcgtgctcctgtccctccccgcgcgtcggcggagctcggggccggactggacctgccgagggaggggcggacagtcctgacggtgcggggcggggctggcggctgcccaggcctggctgaggcgccgcggccgggtccctctccacctgccgggcggagcgcacgggccatgggctgagccccgctgagcccgccgggccggccatgggcgatcgcgagcgcaacaagaagcggctgctggagctgctgcgggcgccggacacaggcaacgcgcactgcgccgactgcggggcggcagatcccgactgggcctcttacaagctggggatcttcatctgtctcaactgctgcggcgtccaccgtaacttccctgacatcagcagagttaaatctgtgcgacttgacttctgggacgacagtattgtggagtttatgatccacaatggaaacctccgtgtgaaggccaagttcgaagccagagtcccagctttctactacatcccccaggccaacgactgcctggtcttaaaggaacaatggattcgagctaagtatgagagacgggaatttatggctgatggggaaaccatctcgctcccaggtaaccgagaaggattcctgtggaagcgaggaagggacaactcacagtttctgagaaggaagtttgtacttctggcaagagaaggcctcctgaagtacttcacaaaggaacagggtaaaagccccaaagctgtcatcagcattaaggacttgaatgccaccttccagacagagaagatagggcacccccatgggctgcagatcacctacaggagagatggccacaccaggaacctgtttgtgtatcatgaaagtgggaaggagatagtggactggttcaatgccctccgtgcagcccgtctgcagtacctaaaaatggcctttcctgaactcccagagtctgagctcgtgccattcctcaccaggaactacctcaaacaaggcttcatggaaaagactgggccaaagcagaaagaacctttcaagaaaaggtggttcgccctggattgccatgagcggaggctgctctattacaagaacccactggatgccttcgagcagggccaggtttttcttgggaacaaggagcagggatatgaagcctacgaagacctgcccaagggcatccgaggaaatcgctggaaagccggactcaccattgtcaccccagagcggagatttgtcctcacttgccccagtgagaaggaacagcaggaatggctggaaagtttgcggggtgtcctgtccagccccttgacgcccctcaaccggcttactgcatcaacagagagtggccgcagcagcaggtgacccattaactgaggaactggctgccactgaacacctggaactccttgtgggaagaagtttgcacctcggccctggctgcccaccatcagtgccccgcagtcagcagccattcctggcagtgaactctgccaggactgaagctgtggctttatccatcagctccctgggccttccccgcaacccacctcggggatctgaggatctggtgcatagatgaacatctatcccctcctcccccatacacacctaggcttgaaatgccctacaggcccagaactttctcacatctgaaatggaggcattgcaatgaaaaggcacccacagcatcatgcaagtggcatcttgtaaaaaaaaaaaaaaagtttaatctgaatctaaccatgaggaaataatcagacaaatccacattaggggcattctgctaaacatctgacccagactcttcaaaaatgaagagtgaaagataaagtagtcaatggccgggcgcagtgagattgcgccattgcattccagcctgggtgacagagcgagactccgtatcagaaagaaaaagaggaactgaatgaaatctcagatggctgaaatgttagagaaacagagcaccaagtcccctgctctgtgactcgttgttcctttcctctgtcttcaagcaccacgcagaaatacactggatgttctctctttgcttcaatggagacccaaggagctgggaggtctcttaagagactctctgattctccgtggctgggtgtgatggctcatgcccataatcccagccctttgggaagctgaggcaggaggattgagaccaggagttcgagaagagcctgggcaacatagtgagaccccatctctacaaagaaaaaaaaattagctggacatggtaatgaatgcctgtagtcccagctactccggacactgatgtgagaggatcacttgagccagggaggtcatggctacagtgacccctcattgcaccactttacttagcctgggtgacagagtgagaccctatctcaaaaaaaaaaaaaatctatgcattgtatgggactttcctttggatcccccaatcaaaggataagcaatgcgtaagcctgtgtccttcctgaagcttctcgactgcccagatagggaggtgagtcctctctatctcctctggctctggaagcaccttgaaaatgtgcattttcaaggacacttgctgggttgtgcattaagggccagtttacttgtctgcctctttgaccacctgtgaactctgttgggtgtactctgctaagttctggggatgaggaaattaataaaggtacagtcttgccttcaaggaacttatggtctagaggagaagaacgagaagtatagataggcagtaacaaagctacttgaagaggccaactgggattctaagggtgggaaagaacagacacaagagataaagtcctaatgaaatgga

SEQ ID NO: 108517 - DNA, 296 bp, Homo sapiens
  Payload ID: 1322
  Gene Symbol: ADAP2
  Gene Name: ArfGAP with dual PH domains 2
  ENST ID: ENST00000584989
  CDS Start-End: 1-296
gaaagtgggaaggagatagtggactggttcaatgccctccgtgcagcccgtctgcagtacctaaaaatggcctttcctgaactcccagagtctgagcagaaagaacctttcaagaaaaggtggttcgccctggattgccatgagcggaggctgctctattacaagaacccactggatgccttcgagcagggccaggtttttcttgggaacaaggagcagggatatgaagcctacgaagacctgcccaagggcatccgaggaaatcgctggaaagccggactcaccattgtcacccc

SEQ ID NO: 108518 - DNA, 676 bp, Homo sapiens
  Payload ID: 1322
  Gene Symbol: ADAP2
  Gene Name: ArfGAP with dual PH domains 2
  ENST ID: ENST00000580526
  CDS Start-End: 68-322
cctctccacctgccgggcggagcgcacgggccatgggctgagccccgctgagcccgccgggccggccatgggcgatcgcgagcgcaacaagaagcggctgctggagctgctgcgggcgccggacacaggcaacgcgcactgcgccgactgcggggcggcagatcccgactgggcctcttacaagctggggatcttcatctgtctcaactgctgcggcgtccaccgtaacttccctgacatcagcagagttaaatctgtgcgacttgacttctgggacgacagtattgtggagggtcttaaaggaacaatggattcgagctaagtatgagagacgggaatttatggctgatggggaaaccatctcgctcccaggtaaccgagaaggattcctgtggaagcgaggaagggacaactcacagtttctgagaaggaagtttgtacttctggcaagagaaggcctcctgaagtacttcacaaaggaacagggtaaaagccccaaagctgtcatcagcattaaggacttgaatgccaccttccagacagagaagatagggcacccccatgggctgcagatcacctacaggagagatggccacaccaggaacctgtttgtgtatcatgaaagtgggaaggagatagtggactggttcaatgccctccgtgcagcccgtctgca

SEQ ID NO: 108519 - DNA, 907 bp, Homo sapiens
  Payload ID: 1322
  Gene Symbol: ADAP2
  Gene Name: ArfGAP with dual PH domains 2
  ENST ID: ENST00000584828
  CDS Start-End: 1-437
tgtttgtgtatcatgaaagtgggaaggagatagtggactggttcaatgccctccgtgcagcccgtctgcagtacctaaaaatggcctttcctgaactcccagagtctgagctcgtgccattcctcaccaggaactacctcaaacaaggcttcatggaaaagactgggccaaagcagaaagaacctttcaagaaaaggtggttcgccctggattgccatgagcggaggctgctctattacaagaacccactggatgccttcgagcagggccaggtttttcttgggaacaaggagcagggatatgaagcctacgaagacctgcccaagggcatccgaggaaatcgctggaaagccggactcaccattgtcaccccagagcggagatttgtcctcacttgccccactgcatcaacagagagtggccgcagcagcaggtgacccattaactgaggaactggctgccactgaacacctggaactccttgtgggaagaagtttgcacctcggccctggctgcccaccatcagtgccccgcagtcagcagccattcctggcagtgaactctgccaggactgaagctgtggctttatccatcagctccctgggccttccccgcaacccacctcggggatctgaggatctggtgcatagatgaacatctatcccctcctcccccatacacacctaggcttgaaatgccctacaggcccagaactttctcacatctgaaatggaggcattgcaatgaaaaggcacccacagcatcatgcaagtggcatcttgtaaaaaaaaaaaaaaagtttaatctgaatctaaccatgaggaaataatcagacaaatccacattaggggcattctgctaaacatctgacccagactcttcaaaaatgaagagtgaaagataaagt

SEQ ID NO: 108520 - DNA, 2271 bp, Homo sapiens
  Payload ID: 1322
  Gene Symbol: ADAP2
  Gene Name: ArfGAP with dual PH domains 2
  ENST ID: ENST00000585130
  CDS Start-End: 336-656
tatgcccttgttcctctttcatagacgcggaaactgagacccacagaggttgaataggttgtccacagtctcgtagctaccaagtgacaggccacgatttgatctcaggccagtgtgttaaactccaatttgcgtgctcctgtccctccccgcgcgtcggcggagctcggggccggactggacctgccgagggaggggcggacagtcctgacggtgcggggcggggctggcggctgcccaggcctggctgaggcgccgcggccgggtccctctccacctgccgggcggagcgcacgggccatgggctgagccccgctgagcccgccgggccggccatgggcgatcgcgagcgcaacaagaagcggctgctggagctgctgcgggcgccggacacaggcaacgcgcactgcgccgactgcggggcggcagatcccgactgggcctcttacaagctggggatcttcatctgtctcaactgctgcggcgtccaccgtaacttccctgacatcagcagagttaaatctgtgcgacttgacttctgggacgacagtattgtggagtttatgatccacaatggaaacctccgtgtgaaggccaagttcgaagccagagtcccagctttctactacatcccccaggccaacgactgcctgtaaccgagaaggattcctgtggaagcgaggaagggacaactcacagtttctgagaaggaagtttgtacttctggcaagagaaggcctcctgaagtacttcacaaaggaacagggtaaaagccccaaagctgtcatcagcattaaggacttgaatgccaccttccagacagagaagatagggcacccccatgggctgcagatcacctacaggagagatggccacaccaggaacctgtttgtgtatcatgaaagtgggaaggagatagtggactggttcaatgccctccgtgcagcccgtctgcagtacctaaaaatggcctttcctgaactcccagagtctgagctcgtgccattcctcaccaggaactacctcaaacaaggcttcatggaaaagactgggccaaagcagaaagaacctttcaagaaaaggtggttcgccctggattgccatgagcggaggctgctctattacaagaacccactggatgccttcgagcagggccaggtttttcttgggaacaaggagcagggatatgaagcctacgaagacctgcccaagggcatccgaggaaatcgctggaaagccggactcaccattgtcaccccagagcggagatttgtcctcacttgccccagtgagaaggaacagcaggaatggctggaaagtttgcggggtgtcctgtccagccccttgacgcccctcaaccggcttactgcatcaacagagagtggccgcagcagcaggtgacccattaactgaggaactggctgccactgaacacctggaactccttgtgggaagaagtttgcacctcggccctggctgcccaccatcagtgccccgcagtcagcagccattcctggcagtgaactctgccaggactgaagctgtggctttatccatcagctccctgggccttccccgcaacccacctcggggatctgaggatctggtgcatagatgaacatctatcccctcctcccccatacacacctaggcttgaaatgccctacaggcccagaactttctcacatctgaaatggaggcattgcaatgaaaaggcacccacagcatcatgcaagtggcatcttgtaaaaaaaaaaaaaaagtttaatctgaatctaaccatgaggaaataatcagacaaatccacattaggggcattctgctaaacatctgacccagactcttcaaaaatgaagagtgaaagataaagtagtcaatggccgggcgcagtgagattgcgccattgcattccagcctgggtgacagagcgagactccgtatcagaaagaaaaagaggaactgaatgaaatctcagatggctgaaatgttagagaaacagagcaccaagtcccctgctctgtgactcgttgttcctttcctctgtcttcaagcaccacgcagaaatacactggatgttctctctttgcttcaatggagacccaaggagctgggaggtctcttaagagactctctgattctccgtggctgggtgtgatggctcatgcccataatcccagccctttgggaagctgaggcaggaggattgagaccaggagttcgagaagagcctgggcaacatagtgagaccccatctctacaaagaaaaaaaaa

SEQ ID NO: 108521 - DNA, 1598 bp, Homo sapiens
  Payload ID: 1322
  Gene Symbol: ADAP2
  Gene Name: ArfGAP with dual PH domains 2
  ENST ID: ENST00000580525
  CDS Start-End: 84-1247
gcgccgcggccgggtccctctccacctgccgggcggagcgcacgggccatgggctgagccccgctgagcccgccgggccggccatgggcgatcgcgagcgcaacaagaagcggctgctggagctgctgcgggcgccggacacaggcaacgcgcactgcgccgactgcggggcggcagatcccgactgggcctcttacaagctggggatcttcatctgtctcaactgctgcggcgtccaccgtaacttccctgacatcagcagagttaaatctgtgcgacttgacttctgggacgacagtattgtggaggttgctgttgtcttgcagtttatgatccacaatggaaacctccgtgtgaaggccaagttcgaagccagagtcccagctttctactacatcccccaggccaacgactgcctggtcttaaaggaacaatggattcgagctaagtatgagagacgggaatttatggctgatggggaaaccatctcgctcccaggtaaccgagaaggattcctgtggaagcgaggaagggacaactcacagtttctgagaaggaagtttgtacttctggcaagagaaggcctcctgaagtacttcacaaaggaacagggtaaaagccccaaagctgtcatcagcattaaggacttgaatgccaccttccagacagagaagatagggcacccccatgggctgcagatcacctacaggagagatggccacaccaggaacctgtttgtgtatcatgaaagtgggaaggagatagtggactggttcaatgccctccgtgcagcccgtctgcagtacctaaaaatggcctttcctgaactcccagagtctgagctcgtgccattcctcaccaggaactacctcaaacaaggcttcatggaaaagactgggccaaagcagaaagaacctttcaagaaaaggtggttcgccctggattgccatgagcggaggctgctctattacaagaacccactggatgccttcgagcagggccaggtttttcttgggaacaaggagcagggatatgaagcctacgaagacctgcccaagggcatccgaggaaatcgctggaaagccggactcaccattgtcaccccagagcggagatttgtcctcacttgccccagtgagaaggaacagcaggaatggctggaaagtttgcggggtgtcctgtccagccccttgacgcccctcaaccggcttactgcatcaacagagagtggccgcagcagcaggtgacccattaactgaggaactggctgccactgaacacctggaactccttgtgggaagaagtttgcacctcggccctggctgcccaccatcagtgccccgcagtcagcagccattcctggcagtgaactctgccaggactgaagctgtggctttatccatcagctccctgggccttccccgcaacccacctcggggatctgaggatctggtgcatagatgaacatctatcccctcctcccccatacacacctaggcttgaaatgccctacaggcccagaactttctcacatctgaaatggaggcattgcaatgaaaaggcacccacagcatcatgcaagtggcatcttgtaaaaa

SEQ ID NO: 108522 - DNA, 1080 bp, Homo sapiens
  Payload ID: 1322
  Gene Symbol: ADAP2
  Gene Name: ArfGAP with dual PH domains 2
  ENST ID: ENST00000581285
  CDS Start-End: 81-1080
ccgcggccgggtccctctccacctgccgggcggagcgcacgggccatgggctgagccccgctgagcccgccgggccggccatgggcgatcgcgagcgcaacaagaagcggctgctggagctgctgcgggcgccggacacaggcaacgcgcactgcgccgactgcggggcggcagatcccgactgggcctcttacaagctggggatcttcatctgtctcaactgctgcggcgtccaccgtaacttccctgacatcagcagagttaaatctgtgcgacttgacttctgggacgacagtattgtggagtttatgatccacaatggaaacctccgtgtgaaggccaagttcgaagccagagtcccagctttctactacatcccccaggccaacgactgcctggtcttaaaggaacaatggattcgagctaagtatgagagacgggaatttatggctgatggggaaaccatctcgctcccaggtaaccgagaaggattcctgtggaagcgaggaagggacaactcacagtttctgagaaggaagtttgtacttctggcaagagaaggcctcctgaagtacttcacaaaggaacagggtaaaagccccaaagctgtcatcagcattaaggacttgaatgccaccttccagacagagaagatagggcacccccatgggctgcagatcacctacaggagagatggccacaccaggaacctgtttgtgtatcatgaaagtgggaagctcgtgccattcctcaccaggaactacctcaaacaaggcttcatggaaaagactgggccaaagcagaaagaacctttcaagaaaaggtggttcgccctggattgccatgagcggaggctgctctattacaagaacccactggatgccttcgagcagggccaggtttttcttgggaacaaggagcagggatatgaagcctacgaagacctgcccaagggcatccgaggaaatcgctggaaagccggactcaccattgtcaccccagagcggagatttgtcctcacttgccccagtgagaaggaacagcaggaatggctggaaagtttgcggggtgtcctgtcca

SEQ ID NO: 108523 - DNA, 584 bp, Homo sapiens
  Payload ID: 1322
  Gene Symbol: ADAP2
  Gene Name: ArfGAP with dual PH domains 2
  ENST ID: ENST00000581548
  CDS Start-End: 242-584
ccaggcctggctgaggcgccgcggccgggtccctctccacctgccgggcggagcgcacgggccatgggctgagccccgctgagcccgccgggccggccatgggcgatcgcgagcgcaacaagaagcggctgctggagctgctgcgggcgccggacacaggcaacgcgcactgcgccgactgcggggcggcagggtcttaaaggaacaatggattcgagctaagtatgagagacgggaatttatggctgatggggaaaccatctcgctcccaggtaaccgagaaggattcctgtggaagcgaggaagggacaactcacagtttctgagaaggaagtttgtacttctggcaagagaaggcctcctgaagtacttcacaaaggaacagggtaaaagccccaaagctgtcatcagcattaaggacttgaatgccaccttccagacagagaagatagggcacccccatgggctgcagatcacctacaggagagatggccacaccaggaacctgtttgtgtatcatgaaagtgggaaggagatagtggactggttcaatgccctccgtgcagcccgtctgcagtacctaa

SEQ ID NO: 108524 - DNA, 8668 bp, Homo sapiens
  Payload ID: 1323
  Gene Symbol: AGFG1
  Gene Name: ArfGAP with FG repeats 1
  Uniprot ID: P52594
  ENST ID: ENST00000310078
  CDS Start-End: 261-1949
aggagaagtcgggaaggtggcggcggcggcggcggttgtcccggctgtgccggttggtgtggcccgtcagcccgcgtaccacagcgcccgggccgcgtcgagcccagtacagccaagccgctgcggccgggtccggcgcgggcggcgcgcgcagacggagggcggcggccgcggccagggcggcccgtgggaccgcgggcccccggcgcagcgctgcccggctcccggccctgccggcctcctcccttggcgccgcggccatggcggccagcgcgaagcggaagcaggaggagaagcacctgaagatgctgcgggacatgaccggcctcccgcacaaccgaaagtgcttcgactgcgaccagcgcggccccacctacgttaacatgacggtcggctccttcgtgtgtacctcctgctccggcagcctgcgaggattaaatccaccacacagggtgaaatctatctccatgacaacattcacacaacaggaaattgaattcttacaaaaacatggaaatgaagtctgtaaacagatttggctaggattatttgatgatagatcttcagcaattccagacttcagggatccacaaaaagtgaaagagtttctacaagaaaagtatgaaaagaaaagatggtatgtcccgccagaacaagccaaagtcgtggcatcagttcatgcatctatttcagggtcctctgccagtagcacaagcagcacacctgaggtcaaaccactgaaatctcttttaggggattctgcaccaacactgcacttaaataagggcacacctagtcagtccccagttgtaggtcgttctcaagggcagcagcaggagaagaagcaatttgaccttttaagtgatctcggctcagacatctttgctgctccagctcctcagtcaacagctacagccaattttgctaactttgcacatttcaacagtcatgcagctcagaattctgcaaatgcagattttgcaaactttgatgcatttggacagtctagtggttcgagtaattttggaggtttccccacagcaagtcactctccttttcagccccaaactacaggtggaagtgctgcatcagtaaatgctaattttgctcattttgataacttccccaaatcctccagtgctgattttggaaccttcaatacttcccagagtcatcaaacagcatcagctgttagtaaagtttcaacgaacaaagctggtttacagactgcagacaaatatgcagcacttgctaatttagacaatatcttcagtgccgggcaaggtggtgatcagggaagtggctttgggaccacaggtaaagctcctgttggttctgtggtttcagttcccagtcagtcaagtgcatcttcagacaagtatgcagctctggcagaactagacagcgttttcagttctgcagccacctccagtaatgcgtatacttccacaagtaatgctagcagcaatgtttttggaacagtgccagtggttgcttctgcacagacacagcctgcttcatcaagtgtgcctgctccatttggagctacgccttccacaaatccatttgttgctgctgctggtccttctgtggcatcttctacaaacccatttcagaccaatgccagaggagcaacagcggcaacctttggcactgcatccatgagcatgcccacaggattcggcactcctgctccctacagtcttcccaccagctttagtggcagctttcagcagcctgcctttccagcccaagcagctttccctcaacagacagctttttctcaacagcccaatggtgcaggttttgcagcatttggacaaacaaagccagtagtaaccccttttggtcaagttgcagctgctggagtatctagtaatccttttatgactggtgcaccaacaggacaatttccaacaggaagctcatcaaccaatcctttcttatagccttatatagacaatttactggaacgaacttttatgtggtcacattacatctctccacctcttgcactgttgtcttgtttcactgatcttagctttaaacacaagagaagtctttaaaaagcctgcattgtgtattaaacaccaggtaatatgtgcaaaaccgagggctccagtaacaccttctaacctgtgaattggcagaaaagggtagcggtatcatgtatattaaaattggctaatattaagttattgcagataccacattcattatgctgcagtactgtacatatttttcttagaaattagctatttgtgcatatcagtatttgtaactttaacacattgttatgtgagaaatgttactggggaaatagatcagccacttttaaggtgctgtcatatatcttggaatgaatgacctaaaatcattttaaccattgctactggaaagtaacagagtcaaaattggaaggttttattcattcttgaatttttcctttctaaagagctcttctatttatacatgcctaaattcttttaaaatgtagagggatacctgtctgcataataaagctgatcatgttttgctacagtttgcaggtgaaaaaaaataaatattataaaatatgctattgtttttgtgttcttgctgcaatgcctttaccaaagtggccttaaatatgagtagtgaattgagaacatcttgaattcttaaaagacttcttagtgactttttataaaaaggccatgtagaaaatttattaaaactactatgactgctacattcaggaatatgccagtggtaaagcatttaaatgtagcttgtcagatttaccataatcctactaatttctttgcagcttattaattttgtgaaatttgtatatatgaagaatttgcatgtatgtgtatttacaaatttttctaagtatcttgaattctcagactgcaaaaggcctattttaactattgattttttttaaaaaaaattgtctttgaatgtattggaagtagacatgcattaactgtgacattattgcacctcagtttttttctttctttttttgggcaaactgatattatctataggatatttgtttatgtttgttttttgggggaaagaaactggaactcagtgttaccttaaagttacggaatactttgttttaaaggaaaagataataagtttagttatatctttttgttaatattcaaatgaacttgtttaagtatctatgtacagtaatgcctcattcatctagaggtaatctggcagtcttgtgaaaaccgaacacaactcagaaacttggaatcgttttttttaaaaatgcctctgagcaacccatataagtcacaaagtctgtgtgttagagcttatgcatttgtttttatgagagattttaataaatttaattatttgcttgtccagactatagcatattagctgtttagaagggatggcttgaaaggaaggagactgaaaaacactctgagagcatacactgtccaaggccattagtgtaaggaccgctacccagcctagaggacatcactatactacatcatctgatgattattctttattatgcctctaggtaattaagtaaaggtgaaattgcatacacagatatgtagtacatattttaaaagttttatcttaaattgattaaaactttttaaaaagctttggtattaaaagaggtaaacatcagtttcctcaaacattttattcatgttgaatgcctttttgcaatgatgactgagttgttatcatagtattttaaaacctgtatagtgttttagacttgttaaaacattgctgtctagtgtacatctagctaaaagtgtggtttatctaaaccgttttaataagcaagatgactgggaaatctctgccccttttctgagcagtatgcctcttcttttagaattaaatgaatgctgcacaggtccagatgtgtgttgatgtagacttgaaatgtctccacattttggaggacttcctcagcccttttcattgagggaaaatatatttgaatttctgttttagattgtatcgggtcccagttgattcatgtgtacaaagttatgctacctaattacagaccattacccaaatatcctaccaggctttccatctgaatagtaaattaaacagttgttatcaaaatgattttaaagactatttctttttctgggtaactattgaagtttgtaattaaatgggggctcttactgactttaaattagcgcttataaaataaaaatgtttagttcaagaagagacccaagctgggtatggtggtgtgagagcctgtgagtcctagctacctggaggtgaggtgggaacatcacttgagcccaggagttggaggctgcagtgcgctacgatcacaccactgcacaccagcctggggatagagtgagatcccatctctaaaaaatgaaaaaaagaagagaggtagctttaaagtggtttttctcatgatattcactgtttattattaaagaaaatcagctttcgttagacttttacatttagatttattctagttttatatagaccatcaaaattatgttgagtactaaaaaggagaaaaaatcctggaaggtaacaaggctgaagaccttcaaatttcctggcttactggtttagtcacatcatttttcctgttcaggtatctgcagatatccctgttcaggaaagatcttttttcaggatggcaaacttttgacatagtttaaagacattttttccccattttttgaaatagagaatattttattatttttgtgaaaatagagttttggtaatcactttcttcctcaaaataagtccttctgttaatttgtaaaagcacattagtgctttacctgtgaaattccccgcccccctgcacacacacccactttagtacagttcctgtcaattggcaacatggagagggtgacctggctgctggtttaccactgtaccaacatctctggagcattttagtttcagaaccttaacactccccaacagctttgttgatgtagcttgtatctctgagaatttattgtattaaaattaatactgagatatttttaaaacatgtttatttatttaagtataacagtaataaactaataacttgctaacataaataccatttttgataaaaataacttttccaaaacaaaaactaatgagaacaggaacattgttttacattttatgcatttaaatctggcttaataaaagcagtgagattttcatgctgcttttgcattccaacttaaaaattacacagcatacacacgctggaaaactccactgtgcacttgtgagatcaggagaatgaaaactatgtaatatctcagtagtacaatgaaaatagtttgacttttcacagcctttcaaagaaagggttgtagggaccattaagggtctccagactctttgagaaccactatactttaaatttgtgtatttctagaacagtatttacttgcagggcaaacataactattccctgggttttttttgtttgctagtgagaactgaaattgcagactttttaacactacttcaaggtaataatagcagtggtattatgggctgtgtatgagatagtcatttgtaaaacaattttcatatttcatctcttacaatccctgcagtggacctatacttttaggatgaaagaagcaaagcatagagaggttaagctagtggcagctttttgctctggggaacagatttggattaaatgctatcacatttatatatgaatgcattctttcttaatattttgaaattctgaacaagttaacgttcttgtcttgtatatctaaaaaaactttaatcacttgaattcctttcataatttgatgaaatcagtacagtttattcttggtttttttttttaactttagaagtaaattaatatggtaactagtggagcgtgctttagattgaagactcatctgaagtatcacagactcctattttgtaaagcattccacctttattgatacagtttgtggcctatacacttttaaaatttattttttaaaaggtgatattaaaatttgtatttaacctgttgtattcatcctcattagttaagtttttctttttatgttttaaaacttagtgacattaaacttttcacgtggttgtttgtgaacagatgaatatataaccacgatgtaatccagtgttgtgctgctgaatgtttaacaaccatctttcatgaaagaaaaaaggccctgttttgtagcatttactaatatttatggtataaatactgtcttcatggtgattttacctgccaatctgatgtcattaaatgcagtttgatgaaagagatagccaaccagtggctttcccaagccttggcaaaccagcttcagcacagcaaaggacatacaattccacaactcattaattaaatgtattggtcatttgatgattatatccagtatttggagagcttttatattgttaattcatttagcaagcatttgaacacttgtttatttttagagatatactgggcactgaggtatttaatctgcaaagacccaagtatcgtgaaccttggttttaaaaagtccaattattgtgctcttataggggttgcacattcaaggcttacactgaattctgtctgcagttctgttttgtgtgaccagcacagtgttttaaaacgttgcattctgaatccatctttttgaaatggggcatgtactcttaaggtggccactagcttaccattcccaatttttcttagtctcaaacattcacatgtttttcaaggccttggagttggcaaatcctgaatatatagtgaaggtaggaaatagctcttcttatgccacatcttagtctgattttgaagtcagttgtgtaagtttgggctgacagtggtattttccagtgaagactatcgccaagaatgcatatcattctgcttattttattctagtggataaaaattcaacgtatatttaagtgtatttttgacatctgtgcttgtccaacacagggctgtagggactgatgaaaagagaatgttgtgatttgagcttttataaaaaaagataagtgatcctagataaaatattttagatggtgattaaaatgcccatagattaattttttaatcggttctctgaaatcttgagatgttatccaagttacaatttaagcaatgagagtaaaatttgaattctaaattctcagcatcttccctcattcttgagtggagagacagaggaagcaaacgccaaggagccttctaattttgactatatgatcattaactaaaggcagcaagggattgtaaactaatcttacatagtcaatgtttcatagaatgctttggttacaatcaggttttttaaagactttaaaggttttttgtatgctataatatatgcttatgatttctaaaaattatgcagtatacacaaagggcataaagtcaaaaagtgtgtctccctctgtgactttattctcataccccagaggcatataatttcttgtattcttgtgtagtctttaagaaatgttatcgtttattttatatatggctctctctctgtatgcctcttcctgttcttattttaaatgttcaagtttgtgacttggttcttgtttaacttggttgtctttccatattgccaccttccagctctaacattaatgtctccaggattccattatatggatgtccctttgggagaacatttgtttatagacttttctactaaaaatattgttataatgataatatccttatgcatatatgaagattactcttgattctgcctgactggaaactttattaataaagtagacattattctattttgaggctcaccagctgtgtaggtatgatcttgtgcttccatttaagaaattcttccatttaaagaagaaaaaaaatctctctgactatctgaagatatatgaaaaagcctatgcttttaaattaaactgttaagacagtccattgaaagattgtggaagttcacatctattttgcaccttaattttttcattgtccctactcatgactctaaaaagtgcatggcttggggctatactttgttttgcagtttgttggtatcgtgcctttccttatctacattagcttagactataccttatttttaagaagagaaagtggaaattaactgtggcaaaacctattttggcacaaccacatttgttcattatacaaaattagcttcctatgctttagaaaaaatgtgagttattactctgaaagttgtgattctgattcctcatggtttggagctcagaaatttcttaacatgtctttgctgttagtcaagcacaggatttgttttctgcaaaagtttattttcaatgaagaatacttgtcctaatagctcataaaaagtacctttgcactttaaatcctaggaatagggaacaaggaaacttactgggaagttcaaaagaaagaataacaggaccttctagtcagcagggcatgtttggaaaatgttaatacgccatgatttttgaagaccaattttagttcaggaggtggttttaaatattggatgaaaacttacaggctgttttcaatattcatttctgaaatactttagtatgatagataaatttggttaagttcttgttcattgtgaaatactgttggaagaatttttttcaaaataaagacttctgaatttgtgta

SEQ ID NO: 108525 - DNA, 1669 bp, Homo sapiens
  Payload ID: 1323
  Gene Symbol: AGFG1
  Gene Name: ArfGAP with FG repeats 1
  Uniprot ID: P52594
  ENST ID: ENST00000373671
  CDS Start-End: 51-1619
gcgctgcccggctcccggccctgccggcctcctcccttggcgccgcggccatggcggccagcgcgaagcggaagcaggaggagaagcacctgaagatgctgcgggacatgaccggcctcccgcacaaccgaaagtgcttcgactgcgaccagcgcggccccacctacgttaacatgacggtcggctccttcgtgtgtacctcctgctccggcagcctgcgaggattaaatccaccacacagggtgaaatctatctccatgacaacattcacacaacaggaaattgaattcttacaaaaacatggaaatgaagtctgtaaacagatttggctaggattatttgatgatagatcttcagcaattccagacttcagggatccacaaaaagtgaaagagtttctacaagaaaagtatgaaaagaaaagatggtatgtcccgccagaacaagccaaagtcgtggcatcagttcatgcatctatttcagggtcctctgccagtagcacaagcagcacacctgaggtcaaaccactgaaatctcttttaggggattctgcaccaacactgcacttaaataagggcacacctagtcagtccccagttgtaggtcgttctcaagggcagcagcaggagaagaagcaatttgaccttttaagtgatctcggctcagacatctttgctgctccagctcctcagtcaacagctacagccaattttgctaactttgcacatttcaacagtcatgcaggtggaagtgctgcatcagtaaatgctaattttgctcattttgataacttccccaaatcctccagtgctgattttggaaccttcaatacttcccagagtcatcaaacagcatcagctgttagtaaagtttcaacgaacaaagctggtttacagactgcagacaaatatgcagcacttgctaatttagacaatatcttcagtgccgggcaaggtggtgatcagggaagtggctttgggaccacaggtaaagctcctgttggttctgtggtttcagttcccagtcagtcaagtgcatcttcagacaagtatgcagctctggcagaactagacagcgttttcagttctgcagccacctccagtaatgcgtatacttccacaagtaatgctagcagcaatgtttttggaacagtgccagtggttgcttctgcacagacacagcctgcttcatcaagtgtgcctgctccatttggagctacgccttccacaaatccatttgttgctgctgctggtccttctgtggcatcttctacaaacccatttcagaccaatgccagaggagcaacagcggcaacctttggcactgcatccatgagcatgcccacaggattcggcactcctgctccctacagtcttcccaccagctttagtggcagctttcagcagcctgcctttccagcccaagcagctttccctcaacagacagctttttctcaacagcccaatggtgcaggttttgcagcatttggacaaacaaagccagtagtaaccccttttggtcaagttgcagctgctggagtatctagtaatccttttatgactggtgcaccaacaggacaatttccaacaggaagctcatcaaccaatcctttcttatagccttatatagacaatttactggaacgaacttttatgtggtcacattacat

SEQ ID NO: 108526 - DNA, 2912 bp, Homo sapiens
  Payload ID: 1323
  Gene Symbol: AGFG1
  Gene Name: ArfGAP with FG repeats 1
  ENST ID: ENST00000409315
  CDS Start-End: 54-1679
gcagcgctgcccggctcccggccctgccggcctcctcccttggcgccgcggccatggcggccagcgcgaagcggaagcaggaggagaagcacctgaagatgctgcgggacatgaccggcctcccgcacaaccgaaagtgcttcgactgcgaccagcgcggccccacctacgttaacatgacggtcggctccttcgtgtgtacctcctgctccggcagcctgcgaggattaaatccaccacacagggtgaaatctatctccatgacaacattcacacaacaggaaattgaattcttacaaaaacatggaaatgaagtctgtaaacagatttggctaggattatttgatgatagatcttcagcaattccagacttcagggatccacaaaaagtgaaagagtttctacaagaaaagtatgaaaagaaaagatggtatgtcccgccagaacaagccaaagtcgtggcatcagttcatgcatctatttcagggtcctctgccagtagcacaagcagcacacctgaggtcaaaccactgaaatctcttttaggggattctgcaccaacactgcacttaaataagggcacacctagtcagtccccagttgtaggtcgttctcaagggcagcagcaggagaagaagcaatttgaccttttaagtgatctcggctcagacatctttgctgctccagctcctcagtcaacagctacagccaattttgctaactttgcacatttcaacagtcatgcagctcagaattctgcaaatgcagattttgcaaactttgatgcatttggacagtctagtggttcgagtaattttggaggtttccccacagcaagtcactctccttttcagccccaaactacaggtggaagtgctgcatcagtaaatgctaattttgctcattttgataacttccccaaatcctccagtgctgattttggaaccttcaatacttcccagagtcatcaaacagcatcagctgttagtaaagtttcaacgaacaaagctggtttacagactgcagacaaatatgcagcacttgctaatttagacaatatcttcagtgccgggcaagttcccagtcagtcaagtgcatcttcagacaagtatgcagctctggcagaactagacagcgttttcagttctgcagccacctccagtaatgcgtatacttccacaagtaatgctagcagcaatgtttttggaacagtgccagtggttgcttctgcacagacacagcctgcttcatcaagtgtgcctgctccatttggagctacgccttccacaaatccatttgttgctgctgctggtccttctgtggcatcttctacaaacccatttcagaccaatgccagaggagcaacagcggcaacctttggcactgcatccatgagcatgcccacaggattcggcactcctgctccctacagtcttcccaccagctttagtggcagctttcagcagcctgcctttccagcccaagcagctttccctcaacagacagctttttctcaacagcccaatggtgcaggttttgcagcatttggacaaacaaagccagtagtaaccccttttggtcaagttgcagctgctggagtatctagtaatccttttatgactggtgcaccaacaggacaatttccaacaggaagctcatcaaccaatcctttcttatagccttatatagacaatttactggaacgaacttttatgtggtcacattacatctctccacctcttgcactgttgtcttgtttcactgatcttagctttaaacacaagagaagtctttaaaaagcctgcattgtgtattaaacaccaggtaatatgtgcaaaaccgagggctccagtaacaccttctaacctgtgaattggcagaaaagggtagcggtatcatgtatattaaaattggctaatattaagttattgcagataccacattcattatgctgcagtactgtacatatttttcttagaaattagctatttgtgcatatcagtatttgtaactttaacacattgttatgtgagaaatgttactggggaaatagatcagccacttttaaggtgctgtcatatatcttggaatgaatgacctaaaatcattttaaccattgctactggaaagtaacagagtcaaaattggaaggttttattcattcttgaatttttcctttctaaagagctcttctatttatacatgcctaaattcttttaaaatgtagagggatacctgtctgcataataaagctgatcatgttttgctacagtttgcaggtgaaaaaaaataaatattataaaatatgctattgtttttgtgttcttgctgcaatgcctttaccaaagtggccttaaatatgagtagtgaattgagaacatcttgaattcttaaaagacttcttagtgactttttataaaaaggccatgtagaaaatttattaaaactactatgactgctacattcaggaatatgccagtggtaaagcatttaaatgtagcttgtcagatttaccataatcctactaatttctttgcagcttattaattttgtgaaatttgtatatatgaagaatttgcatgtatgtgtatttacaaatttttctaagtatcttgaattctcagactgcaaaaggcctattttaactattgattttttttaaaaaaaattgtctttgaatgtattggaagtagacatgcattaactgtgacattattgcacctcagtttttttctttctttttttgggcaaactgatattatctataggatatttgtttatgtttgttttttgggggaaagaaactggaactcagtgttaccttaaagttacggaatactttgttttaaaggaaaagataataagtttagttatatctttttgttaatattcaaatgaacttgtttaagtat

SEQ ID NO: 108527 - DNA, 1783 bp, Homo sapiens
  Payload ID: 1323
  Gene Symbol: AGFG1
  Gene Name: ArfGAP with FG repeats 1
  Uniprot ID: P52594
  ENST ID: ENST00000409171
  CDS Start-End: 51-1733
gcgctgcccggctcccggccctgccggcctcctcccttggcgccgcggccatggcggccagcgcgaagcggaagcaggaggagaagcacctgaagatgctgcgggacatgaccggcctcccgcacaaccgaaagtgcttcgactgcgaccagcgcggccccacctacgttaacatgacggtcggctccttcgtgtgtacctcctgctccggcagcctgcgaggattaaatccaccacacagggtgaaatctatctccatgacaacattcacacaacaggaaattgaattcttacaaaaacatggaaatgaagtctgtaaacagatttggctaggattatttgatgatagatcttcagcaattccagacttcagggatccacaaaaagtgaaagagtttctacaagaaaagtatgaaaagaaaagatggtatgtcccgccagaacaagccaaagtcgtggcatcagttcatgcatctatttcagggtcctctgccagtagcacaagcagcacacctgaggtcaaaccactgaaatctcttttaggggattctgcaccaacactgcacttaaataagggcacacctagtcagtccccagttgtaggtcgttctcaagggcagcagcaggagaagaagcaatttgaccttttaagtgatctcggctcagacatctttgctgctccagctcctcagtcaacagctacagccaattttgctaactttgcacatttcaacagtcatgcagctcagaattctgcaaatgcagattttgcaaactttgatgcatttggacagtctagtggttcgagtaattttggaggtttccccacagcaagtcactctccttttcagccccaaactacaggtggaagtgctgcatcagtaaatgctaattttgctcattttgataacttccccaaatcctccagtgctgattttggaaccttcaatacttcccagagtcatcaaacagcatcagctgttagtaaagtttcaacgaacaaagctggtttacagactgcagacaaatatgcagcacttgctaatttagacaatatcttcagtgccgggcaaggtggtgatcagggaagtggctttgggaccacaggtaaagctcctgttggttctgtggtttcagttcccagtcagtcaagtgcatcttcagacaagtatgcagctctggcagaactagacagcgttttcagttctgcagccacctccagtaatgcgtatacttccacaagtaatgctagcagcaatgtttttggaacagtgccagtggttgcttctgcacagacacagcctgcttcatcaagtgtgcctgctccatttggagctacgccttccacaaatccatttgttgctgctgctggtccttctgtggcatcttctacaaacccatttcagaccaatgccagaggagcaacagcggcaacctttggcactgcatccatgagcatgcccacaggattcggcactcctgctccctacagtcttcccaccagctttagtggcagctttcagcagcctgcctttccagcccaagcagctttccctcaacagacagctttttctcaacagcccaatggttttgcagcatttggacaaacaaagccagtagtaaccccttttggtcaagttgcagctgctggagtatctagtaatccttttatgactggtgcaccaacaggacaatttccaacaggaagctcatcaaccaatcctttcttatagccttatatagacaatttactggaacgaacttttatgtggtcacattacat

SEQ ID NO: 108528 - DNA, 2089 bp, Homo sapiens
  Payload ID: 1323
  Gene Symbol: AGFG1
  Gene Name: ArfGAP with FG repeats 1
  Uniprot ID: P52594
  ENST ID: ENST00000409979
  CDS Start-End: 271-2025
ttttcccctcaggagaagtcgggaaggtggcggcggcggcggcggttgtcccggctgtgccggttggtgtggcccgtcagcccgcgtaccacagcgcccgggccgcgtcgagcccagtacagccaagccgctgcggccgggtccggcgcgggcggcgcgcgcagacggagggcggcggccgcggccagggcggcccgtgggaccgcgggcccccggcgcagcgctgcccggctcccggccctgccggcctcctcccttggcgccgcggccatggcggccagcgcgaagcggaagcaggaggagaagcacctgaagatgctgcgggacatgaccggcctcccgcacaaccgaaagtgcttcgactgcgaccagcgcggccccacctacgttaacatgacggtcggctccttcgtgtgtacctcctgctccggcagcctgcgaggattaaatccaccacacagggtgaaatctatctccatgacaacattcacacaacaggaaattgaattcttacaaaaacatggaaatgaagtctgtaaacagatttggctaggattatttgatgatagatcttcagcaattccagacttcagggatccacaaaaagtgaaagagtttctacaagaaaagtatgaaaagaaaagatggtatgtcccgccagaacaagccaaagtcgtggcatcagttcatgcatctatttcagggtcctctgccagtagcacaagcagcacacctgaggtcaaaccactgaaatctcttttaggggattctgcaccaacactgcacttaaataagggcacacctagtcagtccccagttgtaggtcgttctcaagggcagcagcaggagaagaagcaatttgaccttttaagtgatctcggctcagacatctttgctgctccagctcctcagtcaacagctacagccaattttgctaactttgcacatttcaacagtcatgcagctcagaattctgcaaatgcagattttgcaaactttgatgcatttggacagtctagtggttcgagtaattttggaggtttccccacagcaagtcactctccttttcagccccaaactacagcatttagaatgctttcatctagctgcagttttggtgaatttacttcagcttttcctcttcaggctacccacagtggaagtgctgcatcagtaaatgctaattttgctcattttgataacttccccaaatcctccagtgctgattttggaaccttcaatacttcccagagtcatcaaacagcatcagctgttagtaaagtttcaacgaacaaagctggtttacagactgcagacaaatatgcagcacttgctaatttagacaatatcttcagtgccgggcaaggtggtgatcagggaagtggctttgggaccacaggtaaagctcctgttggttctgtggtttcagttcccagtcagtcaagtgcatcttcagacaagtatgcagctctggcagaactagacagcgttttcagttctgcagccacctccagtaatgcgtatacttccacaagtaatgctagcagcaatgtttttggaacagtgccagtggttgcttctgcacagacacagcctgcttcatcaagtgtgcctgctccatttggagctacgccttccacaaatccatttgttgctgctgctggtccttctgtggcatcttctacaaacccatttcagaccaatgccagaggagcaacagcggcaacctttggcactgcatccatgagcatgcccacaggattcggcactcctgctccctacagtcttcccaccagctttagtggcagctttcagcagcctgcctttccagcccaagcagctttccctcaacagacagctttttctcaacagcccaatggttttgcagcatttggacaaacaaagccagtagtaaccccttttggtcaagttgcagctgctggagtatctagtaatccttttatgactggtgcaccaacaggacaatttccaacaggaagctcatcaaccaatcctttcttatagccttatatagacaatttactggaacgaacttttatgtggtcacattacatctctccacctcttg

SEQ ID NO: 108529 - DNA, 815 bp, Homo sapiens
  Payload ID: 1323
  Gene Symbol: AGFG1
  Gene Name: ArfGAP with FG repeats 1
  ENST ID: ENST00000458212
  CDS Start-End: 1-398
ctacaaacccatttcagaccaatgccagaggagcaacaggcctttctggagcaatgcattctcaagtgtttcctcacgctcattttgcggcaacctttggcactgcatccatgagcatgcccacaggattcggcactcctgctccctacagtcttcccaccagctttagtggcagctttcagcagcctgcctttccagcccaagcagctttccctcaacagacagctttttctcaacagcccaatggtgcaggttttgcagcatttggacaaacaaagccagtagtaaccccttttggtcaagttgcagctgctggagtatctagtaatccttttatgactggtgcaccaacaggacaatttccaacaggaagctcatcaaccaatcctttcttatagccttatatagacaatttactggaacgaacttttatgtggtcacattacatctctccacctcttgcactgttgtcttgtttcactgatcttagctttaaacacaagagaagtctttaaaaagcctgcattgtgtattaaacaccaggtaatatgtgcaaaaccgagggctccagtaacaccttctaacctgtgaattggcagaaaagggtagcggtatcatgtatattaaaattggctaatattaagttattgcagataccacattcattatgctgcagtactgtacatatttttcttagaaattagctatttgtgcatatcagtatttgtaactttaacacattgttatgtgagaaatgttactggggaaatagatcagccacttttaaggtgctgtcatatatcttggaatgaatg

SEQ ID NO: 108530 - DNA, 1065 bp, Homo sapiens
  Payload ID: 1323
  Gene Symbol: AGFG1
  Gene Name: ArfGAP with FG repeats 1
  ENST ID: ENST00000456594
  CDS Start-End: 353-1065
gagtcctagattgaactaaataatggatgagtgtatttgttttaagaggtggctggtattgatgatatccttaaaccatagataatccacaaacaattcttacttcatatcaagacaaaatataaagttcttaatcatttctgaaggttatatgaccaaacaagctagccctcttctgctactcccttgctcaactccttgtttgttccaggtgtattctggaaaatgtaaaaaatgtaaagctttttctgtgtgtacatctatatgtgaggtagggaggcaagaacacacctttggttaatttttccttgaaaccttgcatatcagattcataatatctttgggagtgagaatgctttgctttaagaggcgtcacaaagtctgtaaacagatttggctaggattatttgatgatagatcttcagcaattccagacttcagggatccacaaaaagtgaaagagtttctacaagaaaagtatgaaaagaaaagatggtatgtcccgccagaacaagccaaagtcgtggcatcagttcatgcatctatttcagggtcctctgccagtagcacaagcagcacacctgaggtcaaaccactgaaatctcttttaggggattctgcaccaacactgcacttaaataagggcacacctagtcagtccccagttgtaggtcgttctcaagggcagcagcaggagaagaagcaatttgaccttttaagtgatctcggctcagacatctttgctgctccagctcctcagtcaacagctacagccaattttgctaactttgcacatttcaacagtcatgcagctcagaattctgcaaatgcagattttgcaaactttgatgcatttggacagtctagtggttcgagtaattttggaggtttccccacagcaagtcactctccttttcagccccaaactacaggtggaagtgctgcatcagtaaatgctaattttgctcattttgataacttccccaaatcctccagtgctgattttggaaccttcaatacttcccagagtcatcaaacagcatcagctgttagtaaagtttcaac

SEQ ID NO: 108531 - DNA, 4796 bp, Homo sapiens
  Payload ID: 1324
  Gene Symbol: AGFG2
  Gene Name: ArfGAP with FG repeats 2
  Uniprot ID: O95081
  ENST ID: ENST00000300176
  CDS Start-End: 123-1568
ggatgccgcccgctcccgagcttctgtcaggggagccgggcgtgcggaggcggctgaggaggcgggaaggcggcagtggttgaaggggtgattgctgactagcggggagggagtgggcagcgatggtgatggcggcgaagaagggcccgggcccgggcggcggggtcagcgggggcaaggcggaggcggaggcggcctcggaggtgtggtgccgtcgggtgcgggagctgggtggctgcagccaggccgggaaccgccactgcttcgagtgcgcccagcgcggggtcacctacgtggatatcaccgtgggcagcttcgtgtgcaccacctgctccggcctcctgagagggctgaacccccctcatcgtgtcaagtcaatctccatgacaactttcactgagcctgaagtagtattcctgcaatcccgtggaaatgaggtttgccggaagatttggttgggtctgtttgatgctcggacatctttagtaccagattccagggatcctcagaaagtgaaggagtttctccaggaaaaatatgagaagaagagatggtatgtccccccagaccaagtcaaggggcccacttataccaaaggcagtgcctccacccctgtgcagggctccatcccagaagggaagccccttcggacacttctgggtgatcctgcaccgtctctctcagttgctgcctccacctcgagccagcccgtcagtcagtctcacgctcggacatcccaggcccggagcactcagccacctccccactcctctgtcaaaaaagccagtactgacctgctggctgacatcggtggagacccctttgctgcaccccagatggcaccagcttttgctgcattccctgcctttgggggccagacaccttcccaaggaggctttgccaactttgatgcctttagcagtggccccagctcttctgtgtttggaagcctccctccagctggtcaagcctcgttccaggcccagccaactcctgcagggagcagccaggggactccatttggtgccactcccctggcacccgccagtcagccaaacagcctcgcagacgtgggcagcttcctgggacccggggtgcccgctgcaggtgttcctagcagcctcttcgggatggctggccaggtccccccgctccagtctgtcacgatgggcggcggcggcggcagcagcacagggctggcctttggagccttcactaaccctttcacagctcccgccgcccagtccccgctgccttccaccaacccgttccagcccaatggcttggcgccagggcccggctttgggatgagcagtgctgggcctggcttcccccaggcagtgccacccactggggcctttgccagctccttcccagcaccgctgttccccccgcagaccccgcttgttcagcagcagaatggctcttccttcggggacttaggatcagccaagttggggcagaggccactgagccagccagctgggatctccaccaaccccttcatgactggaccctcatcaagcccattcgcctccaaacctccaaccaccaaccccttcttgtagcactgtgtttttggggggcctcttccctgccttctggggcccctctgctccctagagctctggtgaccacttgcctgtgggcatttctatgggccttggggatggtggaggtgctaatgctttgcttggggcctacaggtgaaaggtggctgccctcagattccacaaagcctctctcccctccctcgtcccacccccacccaggcaggaagcccaggaggagtgcgggcagggcctgacctggaggagtgatggttgagggggagggatttttttcaaatgatcagtcccctgtggaacagctcttccctgggcctagctcgccagcgctgtgctcctcatggacgggagcgcagtggggaaggtaggggaaagatgaggcacagtgttgatggggcagtgaccagacagtcctgagacccagaaggcccaggtggcccaagtgctcttggtggcccagcttggccagcacacactttcctcctgcagcaccccctgctgaaggggtcccccattgttttgcttccccagcgcccaggatgagcggtttaccatcgagcttacccgggcccggctcctgtcaagcactttagttagctgttggtgtcatgtttggataccagtgttttatatttatacatagagaggattttctaatatagcctattatatataaatagatctatctatatgcacatacatacatatatacacacacccagccgatctcccgctcccagactgctctcgtatgtggggaatgggatgaatccccatctgtgcctcgaccatcaaagccggagctccagggctggagggggggcagccatgtgtcctgacccccaccatccccagagcctgggttttccagggaaaggctttgtgcaattgcctggtctttttttttttttttttttctccatgtgcctccctgtccccaaatctctgcaccaaagctcattgcaggcaatgttggaaaagaactgcatttgaacgaaagagaaaacggcgcctgtggttttgcttcaggccactttgaggggttgcaggtcagtcaacatgactgatccttgacctggctctgctgggctggactgcctgggccagtgataatgctgccattggccagagacagggcagagcccgtccctgtctgaacaagagtcccgcattagcaatgagaagaagcgtggcgggagaggagccaccactgccggggactggagtttgttggatgtgaggggaatgcccactggggccagggtgggcaaaggaggttggtgccaatgtggtgctggaagtagacccctcctgggtctggaacattctctgccccaggctctttccacctggggatgttgtgacaacatccagctgtggtgtctgggctatttgtgtggtgacaagacagacctggtcagggggtgggtggcaaacacctcacctggctgggcagaggccaccttgctgtttggcccaaggccaggtgaggcccctccctttccaccattgccctggccccgtggccattcattcttggggtttgtctgagtcttccacagagagcagcaaagagatatgggagttgggtgatcagtgtatttactttgcagatttttctggaaataacctctagctgctgctatttgcaaggctgggattggcctccctgtcttttccaacaatcaggaccccatcctgtctgttcctgttcttctcccagcctctgccctccttctgtctcctgggtggtctcccgcttcgctcctggcctttgcatgttccatctcttctctttctcccctcttcgccaccctagattatctctgtgtccctctacctaattctcttaccagttctttcctttctgcttagagccggagggagggaagctggaatctgttatggtgtattagggggaggagcctttctgttatttccccccagcttccatcacccttcccttaatgccaggagcgccgaggtttggaactgaggctaaaccgaagggctttctcctgcttctgtcaccctgtgctgtctcccggcatctcctcactatctgggtccaggcccgggtcctccctgcagactccctcccctccagcccacaaggactccagcctgctggctggtgagagctggatgagcagtaagaagttaacgccaggtcagcctcgggccccagggttccctgggcacaggctgacactaggagctgctctccttggccggggacagctccagcagctcaggctccagccctccagtgagccgcctctcctggagagtagcaaagaatggagaaaggcctggcttgagaggaaatggagaaaacattgcctggtagctgcagattcaaacccaccacacacaccacggggctagagtgactcacctgggctcacaccaacttctggccaatgcagggaccatgctctgcagacagcagtcctctagcatggccccagcattcagccagtcggtcacctgtgggccatccccatgtgtgaggaagcaggagtcagccaccaagtgtctccacatcggagcttgcgggtcagacctgtgggccaggggatgggagcagggctgagggtaggggctgaatgtgtggctctgtccctgtgttgccttccacagaggagcaaggcctcaggctgaggaaggaggggcacgctggaacagcctagtctcctccccgtggattcccccaaacccataacattcttccataggggctgagaacgcagtgccccgtccctgacagggatgaaaagtgaacccctcaggtcaggagaggcagagttgaggttctgccacttcctgtccctggggagccactcaagttaccagggctaccggctgaaataaatcttttccgggtagggtcaagggcagtgtgttgccaaggcaactgatgtaggccagttgcgtgactccaggtttgtcctggtactcagtgggtccaatcacctggcattgatcacctggcattgatcagcacccaccccacccctgaggcttgcccagcccccaggccctcagatccctgctcttcctgcctttcctgcccatgtgtcacccagcacccaaggttcagtgacacagggtggtttggagctggtcactgtcatagcagctgtgatttcacaaggaagggtgctgcagggggacctggttgatggggagtgggaaggggaaggaataaagagatcttcctcaggt

SEQ ID NO: 108532 - DNA, 928 bp, Homo sapiens
  Payload ID: 1324
  Gene Symbol: AGFG2
  Gene Name: ArfGAP with FG repeats 2
  ENST ID: ENST00000429987
  CDS Start-End: 1-671
gctcttctgtgtttggaagcctccctccagctggtcaagcctcgttccaggcccagccaactcctgcagccagtcggatgctaactgaaagttacagctttgggagcagccaggggactccatttggtgccactcccctggcacccgccagtcagccaaacagcctcgcagacgtgggcagcttcctgggacccggggtgcccgctgcaggtgttcctagcagcctcttcgggatggctggccaggtccccccgctccagtctgtcacgatgggcggcggcggcggcagcagcacagggctggcctttggagccttcactaaccctttcacagctcccgccgcccagtccccgctgccttccaccaacccgttccagcccaatggcttggcgccagggcccggctttgggatgagcagtgctgggcctggcttcccccaggcagtgccacccactggggcctttgccagctccttcccagcaccgctgttccccccgcagaccccgcttgttcagcagcagaatggctcttccttcggggacttaggatcagccaagttggggcagaggccactgagccagccagctgggatctccaccaaccccttcatgactggaccctcatcaagcccattcgcctccaaacctccaaccaccaaccccttcttgtagcactgtgtttttggggggcctcttccctgccttctggggcccctctgctccctagagctctggtgaccacttgcctgtgggcatttctatgggccttggggatggtggaggtgctaatgctttgcttggggcctacaggtgaaaggtggctgccctcagattccacaaagcctctctcccctccctcgtcccacccccacccaggcaggaagcccaggaggagtgcgggcagggcctgacctggaggagtgatggtt

SEQ ID NO: 108533 - DNA, 915 bp, Homo sapiens
  Payload ID: 1324
  Gene Symbol: AGFG2
  Gene Name: ArfGAP with FG repeats 2
  ENST ID: ENST00000430857
  CDS Start-End: 137-604
gcgaagtctcctgcggatgccgcccgctcccgagcttctgtcaggggagccgggcgtgcggaggcggctgaggaggcgggaaggcggcagtggttgaaggggtgattgctgactagcggggagggagtgggcagcgatggtgatggcggcgaagaagggcccgggcccgggcggcggggtcagcgggggcaaggcggaggcggaggcggcctcggaggtgtggtgccgtcgggtgcgggagctgggtggctgcagccaggccgggaaccgccactgcttcgagtgcgcccagcgcggggtcacctacgtggatatcaccgtgggcagcttcgtgtgcaccacctgctccggcctcctgagagggctgaacccccctcatcgtgtcaagtcaatctccatgacaactttcactgagcctgaagtagtattcctgcaatcccgtggaaatgaggtttgccggaagatttggttgggtctgtttgatgctcggacatctttagtaccagattccagggatcctcagaaagtgaaggagtttctccaggaaaaatatgagaagaagagatggccagacaccttcccaaggaggctttgccaactttgatgcctttagcagtggccccagctcttctgtgtttggaagcctccctccagctggtcaagcctcgttccaggcccagccaactcctgcagggagcagccaggggactccatttggtgccactcccctggcacccgccagtcagccaaacagcctcgcagacgtgggcagcttcctgggacccggggtgcccgctgcaggtgttcctagcagcctcttcgggatggctggccaggtccccccgctccagtctgtcacgatgggcggcggcggcggcagcagcacagggctggcctttggagccttcactaacc

SEQ ID NO: 108534 - DNA, 10832 bp, Homo sapiens
  Payload ID: 1325
  Gene Symbol: AGAP1
  Gene Name: ArfGAP with GTPase domain, ankyrin repeat and PH domain 1
  Uniprot ID: Q9UPQ3
  ENST ID: ENST00000304032
  CDS Start-End: 581-3154
cgcggcttgcaaggcgcctgcgactcggtcccaggtcggcgggcggcgcacggcgggctcgcgcgggggccccggcgcgccgggcggcgcagtacgcagcgcgcggacccacgccacggccaggagcccagagcagcgcggccacactgcccaggggtcggccctcggccccggcgctcggagcgcggcggctgcctgggctttaatggctgctccgcggagcagcgcctagggctggaaggcggctgcggctcaggaagtcacccgagcaagcctccttcggggccggccgcacccgccgcggcgcgctccatgggggcgcgctccccccgggcggcccgctgacccgggacgccggggcccgctcgctcgccggccgcgcgtcccggccatgaactgagcccgcgggccagccccgcgcctgctccgcccgcgcctttcttctcgcgcctcctccgcccgccgccggcgggcccggctccccgggggctgcggcgccccgggctcggcggcccgcgggccccggggcgcggggcggcggcggcggggggcgcgcggctccgggcgcggcgcctgcaccatgaactaccagcagcagctggccaactcggctgccatccgggccgagatccagcgcttcgagtcggtccaccccaacatctactccatctacgagctgctggagcgcgtggaggagccggtgctgcagaaccagatccgggagcacgtcatcgccatcgaagatgccttcgtgaacagccaggaatggacgctgagtcgatctgtcccggagctcaaagtgggaattgtgggtaacttggccagcggcaagtctgccctggtgcaccggtacctgacgggcacatatgtccaggaggagtctccggaaggtggcaggttcaagaaagagattgtcgttgatggacagagctatctgctgctgatcagagatgaagggggccccccggaggcgcagtttgccatgtgggtggacgctgttatatttgtcttcagcttggaggatgaaataagtttccagaccgtttaccactactacagtcgaatggccaactatcggaacacgagcgagattcctctggttctggtgggaacccaggatgccataagttctgctaacccgagggtcatcgatgacgccagggcgaggaagctctccaacgacctgaaacggtgcacgtactacgagacgtgtgctacatacgggctgaatgtggagagggtcttccaggacgttgcccagaagattgttgccacaaggaagaagcagcagctgtccataggaccctgcaagtcgctacctaattctcccagccattcctccgtctgttccgcgcaggtgtctgccgtgcacatcagccagacaagtaatggaggtgggagtttaagcgactattcctcctccgttccatcgactcccagcaccagccagaaggaacttcggatcgatgttcctcccactgccaacacgcccacgcccgttcgcaagcagtctaagcgccggtccaacctgttcacctctcggaaagggagcgacccagacaaagagaagaaaggcctggagagtcgtgcggacagcattgggagcggccgagccatcccaattaaacagggcatgctgttgaagcgaagtggcaaatcgttgaataaagagtggaaaaagaaatatgtcaccctgtgtgacaatggcgtgctgacctatcatcccagtttacatgattacatgcagaatgttcatggtaaggagattgaccttctgagaaccactgtgaaagtcccagggaagaggccaccccgagccacgtcagcctgcgcacccatctccagccctaaaaccaatggcctatccaaggacatgagcagtttacacatctcacccaattcagggaatgtcactagtgcatctgggtctcagatggcaagcggcatcagcctggtctccttcaacagccgacccgacggcatgcaccagcgctcctactcagtctccagtgccgaccagtggagtgaggctacggtcattgcaaactcggccatcagcagtgacacagggctgggtgactccgtatgctccagccccagtatctccagcaccaccagccccaagctcgacccgcccccctcccctcacgccaacagaaagaagcaccgaaggaagaaaagcactagcaacttcaaagccgacggcctgtccggcactgctgaagaacaagaagaaaattttgagtttatcattgtgtccctcactggccaaacatggcactttgaagccacgacgtatgaggagcgggacgcctgggtccaagccatcgagagccagatcctggccagcctgcagtcgtgcgagagcagcaagaacaagtcccggctgacgagccagagcgaggccatggccctgcagtcgatccggaacatgcgcgggaactcccactgtgtggactgcgagacccagaatcccaactgggccagtttgaacttgggagccctcatgtgcatcgaatgctcagggatccaccggaatcttggcacccacctttcccgagtccgatctctggacctggatgactggccagtcgagctcatcaaggtgatgtcatccatcgggaacgagctagccaacagcgtctgggaagagagcagccaggggcggacgaaaccatcggtagactccacaagggaagagaaggaacggtggatccgtgccaagtacgagcagaagctcttcctggccccgctgccctgcacggagctgtccctgggccagcacctgctgcgggccaccgccgacgaggacctgcggacggccatcctgctgctggcacacggctcccgggacgaggtgaacgagacctgcggggagggagacggccgcacggcgctgcatctggcctgccgcaaggggaatgtggtcctggcgcagctcctgatctggtacggagtggacgtcacggcccgagatgcccacgggaacacagctctggcctacgcccggcaggcctccagccaggagtgcatcgacgtgctgctgcagtacggctgccccgacgagcgcttcgtgctcatggccacccctaacctgtccaggagaaacaataaccggaacaacagcagtgggagggtgcccaccatcatctgaggaacagccgtgcccgcctgctcgccgcacctgggacgcggcagcctcgccgcattctcgctcagaagtcgcagcacgtgagtcccgtcgcatcccctccctcttcctggtggccacctccctcccgcccacccactctcaccccaaacaaaatcacaaaacctggacatccctcaaggggcgaagaggcggccgggagactgcagaagtggctccttttcataaactcccctaaaccacacacaggagagagcgacgggcctcggccctttgatgatagcacatggcgcaggacccttgtcctggtggcacaagggatggggacgcgagggggaggggaggcgaggaacaaggagaaggggcaactttccttaactggcagttgagcacatagtacatttcccctctaccaaacggaacacttggattccatctcttctctgaggagctcgacggcataaatcagaagcaagcacagagtttgtcaggtttgaagcccctatgatggtgtgtgtcaaatcagttgtagctaatctgtccagggagaatactggcttcattacacttgtacagccgagttcttcccgcattactgctgtttaatagaacgtgattagtcatcgccgagaagaaagcatattagccgaggaggtagtcacgcggcacgcgccggtgattgccacgatgtgattgcaatactcttagaagcaccatattatcccagacatgttctttcaagcccttggagccctctctaaattcactgtcatcatttagtatctgtttaatttttcagtccaaagagaggaaatcagtcgctgagtattatttgactccggtctccttggtgcaaaaacaaaatgggaaaaataaataagaataactcagaaactcaaaaggaaaccacaaattcagctaataatagcatttcgagtatatttcgtaaactaaggaaatacacaaaaggctgttttttccgactgtaagagatatttgatgtccttttgccgaggtggatgtgttagtctcaggccctcctggaccacgttgcccaagtcacacaggcttctgtgttatgtatttagataagatgtgtgaaaatatatttgaataaaagaagttcataaatatgcattgatttttgtacagacaaatggcacctctcttaatttataaattgaactggatgtgaactaataatgtgcaactagttgagataagagggttacagatcattgtacatggaaaatattcccagcagtaaacacttccattaatgtgatctacggcttttgaaaaggagcatctcagaataagatggtggtacaatttgcttattaaaattgagaaagaaaaaaaaagacacactggagtatattagaaaggaaaaagaaggaatgtggtctctcatgattgaaagcatgatttagatcggatacggcttttgctaaccaaggaccaagggactctggcaagatggggtggttttccgaatgccagaccgaggtgccttacgaaggcagctgccaatggttctgtggcacagactggctcctgagaacccagacgaccttgacctggcagcccggccctccacgctagtacctcgcctgattttccatcgttgcggtatccagccgcttcagacgtccgccgccttcagtggtggtagtcaaatgtagtcaaccaaaccacagcatcccttaggttaaaagcaaacggggcagctttgcctagagctcattgacagtgtgatggggggagaagggttgtcacaatggaagatgaggacactagactcatgtagcacagaaacatgaagccacacgcaccggcagcctccggggtgttcctcgctctctcgtatgttaaaccttatattttataagagtttttcctcttatttcactttttaaaaaaaattaaagtaggtggggaaaaaaataaagctttacacagaatttatatgtgggtaagtgtttcatggaaatttctaatcttaacgaagctaagtggagctcactcgtatccaaaagtataacaggtgcagaagccacaagtctgagaaccttgacgacagttccatcgtcctgccatttgatttttcagtctgcgtttcatcactgtgtagctattgtaaatgtgaatagaaaaaaacaggtcattgcctatttttgaagaacgcgttggtgttcgagtccactagacacactcgctccacacagccttcaccgtagactctgtagtggacacagatatagcataaatgaaattgttaaattatttcattgtagttaattcccactataggaatgctttatcatagtgaagtttcttttgagaagaaacggaactccttgaggcttctctttgggatgtatatgagcgtgtacatattattctatgtgtttataatataatattttcccaaatgacttcttgtttcactttgccttccacaacctgaatgccagattggttttttcccttcctggcccccagcacaagctgccatgactccccctcagaaaacacagcccctcctctaccattctcagtgatgtccatctgctccactccgcagccactttctagggcccaagttttggtagcagaaggaaaggcagtttttgagggtctttcgaaaaaaagaagacggggcagctttgcccagagctcgttggcagtctgtttgtatttcagtgtctaaccagaagtcctttctttgcggaccgcactctcgttcccactttcaagctaattaccaccaaggctgggagaggcaaggactgggggcggagctaggaataactcgtttgagaagggggtggagttttcgttgttcatttccatgttcagttctgtgacgtgacgatgacagatcaccactgcaggatccccctcacctttcctgttcagaattaaaactctcccttgatgagaaacagccagctgagggaggcccacgagcggcctgtgtaaccccatgggtgatctggacacatctgcacccccgcgttcagcttcgcggagactgaacttggcggggagtggaggggtgtggtgcagacctggctgcagcagaaacaccccgcagggacagtactctgtgattctgacctcaggtgctgggacgggcagatggtttcccccgcccagcaccccagtcctggtccctggtccctctctctgtttcatcccaggaaatgagcagctcgagggtgagcaagtgacaagttcctgagtcactggccccaaaaccaggtgcagtgtcctgtctcccaagtgtgtgcacaatgtatatatgcactggaaaggagggagaaggcagcgggtcactcgccaatcgcagggttctcagacacaggagagagcgggatcttaatgaattgcatttcctgcagagcctctagtgcacaggccagttctcggcagtggcttttcagcacaagggccttgcattgaagctccctcttctgagatttcacccagcctgatgaggcctgcatggttccggcctcgtcatccagtgtagataccagtcttcctatttttgtgacatctgcacatttggggtcattccctatatctgcataggagctattgctaaccttgttagggagaaacatggtctaatgagaaagacagacccctaggctcagctggccctgccatccttccagaggattcctctgcaactctaggcaagcacccagcttcctgggctctttttcctcatctgtgaaacttgcagggtgcagtgaggtttcaaaccagtgtgataagtgttggcctcacacctggcccaggggatgctgggagaacaggagcacttgttaataacagaaacactgatgggaccgaagccagtgcacacaccaggaaacctgcccgtggctgacactgtcctccagcctgcattctggggaggctgtgatgggcacgtttgccaaccccccccccccagtagagcccaggaccctcctctctcagcttgccagtgccctgccctccacatggcggggaacagcatcaatgaggtccttgctccctgagagcctctctggaacctgcccacttttctcaacatgtatattctgctttgtagtctgaggttgattttctagaggcgaggaaggggctgagttctgccctcgtgctgttcgctggtgctgatcagggccaagacgacccttccctctcccccacagcctgttgaggtgccgttgacgtggacagcgcccctcccttaagatgcccccttgccgttgccatgagccgctgtgactcacgcgtgcactgggccttgcttggtgctcccctcctcctcctgtctgagatcggagcttgctggagagcaccccaggtcgccgtgcttggctgcaggcccgtccctctctccccatcctcgggttcccagcgtgttttgtgcttgaacttggtggactcatcttaccccacaagagtggcctgctcaacctgcagcctccaatgtgccgtaggcgctctaggtccccgtggcgcccaggacaccaactctccctccctgcacttaggatgttctggaaatgagaggaaatccacattcctgccccaggaggtgggaagcctggcaacgatgtagcttcccctgagatgcggtatgatcaggcctcagcaactactcaggaggcaaaggtgtttggaaagcaaaccccaaacctcccggcacggcatgtgctctgcttccgtccctcaccgcctgcacaaggtcgttgagacttttctagaactccccggggttgtatttatggccttcaagcaaacaaattgaaaagcagtcaaggaggagttcagatagaaaagtgctggagatacacatctttccttcaaaggaaatgtaatttatttccaaccgctgcctcagacgggggtttcacatgttgtgaagtcacatcttgaatgactgtcaccctcatccttccccaaaaagctaaataagggcctttggcatcaatgcgtgcattctccacctttccgcggcttgcgcttggatttctgagtggctttcttcagggagcccttgtggtcatgtgtctttaatgctgctccccatgcccccaggccaggccagcacgctcaggtgatagcgagtggggccaggagacccccctgccctgcccagtggacagatctgccccagccctgctgtggggacgggccctctatcatttaaccacatacattaggttgcttttcagcaaaatgtcagctttcctcccattatgcaggagagagaaggggcgcaggtgtatctccttagagtacaccttggagctggatcactaagaaacagtcctcagactggtccttccgacacaggcagagagtgaactggatcgctggcccctgggatgctgcgctgtctgtgattagagagaagtggccagtgtcccgtctgtgattagacagaaacccctgtggcagactcctcccctctccatgaagaaagaaatatttacttagatattactgtttcaaaacacaaactttattccccttagagaagaaatactgcccttaaatagactgttgaaatattaatggcccccccatttaatcagtgtgtctgcggctttcttcgcgtcacatgtccgcattggcaggtgattctggaaagggattctgggaaaccaacaagtcttttttaaatctttgagttgtatgagaaagtatttaagttcaccagtgtagtaaacacccaccccagagcagcggtaagcaaacctaaatctgaaaacccattcttactgtctttcaccatgagatgctggttttggtgtaaaatgacagcacttggtttggggttttgcacctgttgggtagaactgttcttgtctgaggtcctcaccctctacagatgggcctcagggcctggaggtgggcagatggggccagagtggccagcagagacttgcatgggctctgaaagccccagagctcaggcctaaggctgctaggtgagaccagcaggcagctgtggcatccgaccttgggacgcccaagctgggcagccgctccatgtgccccaaacaggatatcctcatgaatgtgaggagaggctggctcagggcttggttttcattttggcctggcacagggtacctgtagggagcactcccccaacctgaggatggtgaaaccatatgatagagactccttgtcgaagtccacatcggactgatctagaatgccccgtggggggattgcatggcctttgccttgagatgcaggtgaaagaaaggaaccaaacaaggcatgagtgtgttggggaatcttcccagtggagcaaacccccttaacacaccagctgttgggaacagctgcccctaaatccaattaaaccctcatctccctggtgctgaacagtctacactggcccaggaagctaacgtctgagccgcttggagagctttggtaaacagaagacactggaagcccactcggtcagcagctgggcatgaggatgtcaggggcctttggacttgaggaaggacagtccaggtgcatggaatcctaatgggcctcatgcagacactggaagcagcccagccccctgcccaataccacagccctggggtgtcccctgacattcctggaggtccctgggcaaatgcatttcctgcctgggttctcagggtaggagaacagagaaggctccaagggtgttgggagtgagccaggggctggtctggggagtgggtctcacgcactgctcaggttggcacgagggacctcccccatcccaacccagccccaagggtcccagcagggctctcagcatggctgttttgagggtacacaggtggctggagaggggtggggcagttgcatggtgggtggcaaagtgtgcatttagaagctgcttcgtggcgttaagaacggggggagagggaccagcactgtaacgttagaaataattccttcttgcagacttgaaaagcatcagtttccctcccacggctgggtttttgtgtctgaaatacatctaattctccagactgcagcccctctcagccccgagcacctgagcgctggggaggcccttattgagctcagcctggagaggggagggtcgcacgggtcccgggggcaggtctcctgcactggctcttcccttctgccagcttggaatttggttctcatcttgccacaggggtgcgtttcctaaagggcagccggagcagctcaaaggtgacaactgagatgcatttctaggcaggggcagggaaggccaacccaccttgcagccagttttctgtttctgtaaatagcagtgtatagagatggaagggcagcgtgggtgtatccacagatgggtttaggttttttttttggatgttttctattacctcattcagcaactttatgtttcacaatgactcaatgatgctttatttatattgtttgtactgtaattaaaaccattgacagacatttcactttgcttgttatttcatatgatcttgttttgattaaatatgccagtttgtattttcctgccttgggatttttttgtgtccgctgtacagtattctaagggaaaaagaaaaagaaagatgtgtaaagtaacagagagaggtggctatggtgtagagacctctttctaataaagaaatgaaaatatgtctacaccgct

SEQ ID NO: 108535 - DNA, 5427 bp, Homo sapiens
  Payload ID: 1325
  Gene Symbol: AGAP1
  Gene Name: ArfGAP with GTPase domain, ankyrin repeat and PH domain 1
  Uniprot ID: Q9UPQ3
  ENST ID: ENST00000336665
  CDS Start-End: 581-2995
cgcggcttgcaaggcgcctgcgactcggtcccaggtcggcgggcggcgcacggcgggctcgcgcgggggccccggcgcgccgggcggcgcagtacgcagcgcgcggacccacgccacggccaggagcccagagcagcgcggccacactgcccaggggtcggccctcggccccggcgctcggagcgcggcggctgcctgggctttaatggctgctccgcggagcagcgcctagggctggaaggcggctgcggctcaggaagtcacccgagcaagcctccttcggggccggccgcacccgccgcggcgcgctccatgggggcgcgctccccccgggcggcccgctgacccgggacgccggggcccgctcgctcgccggccgcgcgtcccggccatgaactgagcccgcgggccagccccgcgcctgctccgcccgcgcctttcttctcgcgcctcctccgcccgccgccggcgggcccggctccccgggggctgcggcgccccgggctcggcggcccgcgggccccggggcgcggggcggcggcggcggggggcgcgcggctccgggcgcggcgcctgcaccatgaactaccagcagcagctggccaactcggctgccatccgggccgagatccagcgcttcgagtcggtccaccccaacatctactccatctacgagctgctggagcgcgtggaggagccggtgctgcagaaccagatccgggagcacgtcatcgccatcgaagatgccttcgtgaacagccaggaatggacgctgagtcgatctgtcccggagctcaaagtgggaattgtgggtaacttggccagcggcaagtctgccctggtgcaccggtacctgacgggcacatatgtccaggaggagtctccggaaggtggcaggttcaagaaagagattgtcgttgatggacagagctatctgctgctgatcagagatgaagggggccccccggaggcgcagtttgccatgtgggtggacgctgttatatttgtcttcagcttggaggatgaaataagtttccagaccgtttaccactactacagtcgaatggccaactatcggaacacgagcgagattcctctggttctggtgggaacccaggatgccataagttctgctaacccgagggtcatcgatgacgccagggcgaggaagctctccaacgacctgaaacggtgcacgtactacgagacgtgtgctacatacgggctgaatgtggagagggtcttccaggacgttgcccagaagattgttgccacaaggaagaagcagcagctgtccataggaccctgcaagtcgctacctaattctcccagccattcctccgtctgttccgcgcaggtgtctgccgtgcacatcagccagacaagtaatggaggtgggagtttaagcgactattcctcctccgttccatcgactcccagcaccagccagaaggaacttcggatcgatgttcctcccactgccaacacgcccacgcccgttcgcaagcagtctaagcgccggtccaacctgttcacctctcggaaagggagcgacccagacaaagagaagaaaggcctggagagtcgtgcggacagcattgggagcggccgagccatcccaattaaacagggcatgctgttgaagcgaagtggcaaatcgttgaataaagagtggaaaaagaaatatgtcaccctgtgtgacaatggcgtgctgacctatcatcccagtttacatgattacatgcagaatgttcatggtaaggagattgaccttctgagaaccactgtgaaagtcccagggaagaggccaccccgagccacgtcagcctgcgcacccatctccagccctaaaaccaatggcctatccaaggacatgagcagtttacacatctcacccaattcagacacagggctgggtgactccgtatgctccagccccagtatctccagcaccaccagccccaagctcgacccgcccccctcccctcacgccaacagaaagaagcaccgaaggaagaaaagcactagcaacttcaaagccgacggcctgtccggcactgctgaagaacaagaagaaaattttgagtttatcattgtgtccctcactggccaaacatggcactttgaagccacgacgtatgaggagcgggacgcctgggtccaagccatcgagagccagatcctggccagcctgcagtcgtgcgagagcagcaagaacaagtcccggctgacgagccagagcgaggccatggccctgcagtcgatccggaacatgcgcgggaactcccactgtgtggactgcgagacccagaatcccaactgggccagtttgaacttgggagccctcatgtgcatcgaatgctcagggatccaccggaatcttggcacccacctttcccgagtccgatctctggacctggatgactggccagtcgagctcatcaaggtgatgtcatccatcgggaacgagctagccaacagcgtctgggaagagagcagccaggggcggacgaaaccatcggtagactccacaagggaagagaaggaacggtggatccgtgccaagtacgagcagaagctcttcctggccccgctgccctgcacggagctgtccctgggccagcacctgctgcgggccaccgccgacgaggacctgcggacggccatcctgctgctggcacacggctcccgggacgaggtgaacgagacctgcggggagggagacggccgcacggcgctgcatctggcctgccgcaaggggaatgtggtcctggcgcagctcctgatctggtacggagtggacgtcacggcccgagatgcccacgggaacacagctctggcctacgcccggcaggcctccagccaggagtgcatcgacgtgctgctgcagtacggctgccccgacgagcgcttcgtgctcatggccacccctaacctgtccaggagaaacaataaccggaacaacagcagtgggagggtgcccaccatcatctgaggaacagccgtgcccgcctgctcgccgcacctgggacgcggcagcctcgccgcattctcgctcagaagtcgcagcacgtgagtcccgtcgcatcccctccctcttcctggtggccacctccctcccgcccacccactctcaccccaaacaaaatcacaaaacctggacatccctcaaggggcgaagaggcggccgggagactgcagaagtggctccttttcataaactcccctaaaccacacacaggagagagcgacgggcctcggccctttgatgatagcacatggcgcaggacccttgtcctggtggcacaagggatggggacgcgagggggaggggaggcgaggaacaaggagaaggggcaactttccttaactggcagttgagcacatagtacatttcccctctaccaaacggaacacttggattccatctcttctctgaggagctcgacggcataaatcagaagcaagcacagagtttgtcaggtttgaagcccctatgatggtgtgtgtcaaatcagttgtagctaatctgtccagggagaatactggcttcattacacttgtacagccgagttcttcccgcattactgctgtttaatagaacgtgattagtcatcgccgagaagaaagcatattagccgaggaggtagtcacgcggcacgcgccggtgattgccacgatgtgattgcaatactcttagaagcaccatattatcccagacatgttctttcaagcccttggagccctctctaaattcactgtcatcatttagtatctgtttaatttttcagtccaaagagaggaaatcagtcgctgagtattatttgactccggtctccttggtgcaaaaacaaaatgggaaaaataaataagaataactcagaaactcaaaaggaaaccacaaattcagctaataatagcatttcgagtatatttcgtaaactaaggaaatacacaaaaggctgttttttccgactgtaagagatatttgatgtccttttgccgaggtggatgtgttagtctcaggccctcctggaccacgttgcccaagtcacacaggcttctgtgttatgtatttagataagatgtgtgaaaatatatttgaataaaagaagttcataaatatgcattgatttttgtacagacaaatggcacctctcttaatttataaattgaactggatgtgaactaataatgtgcaactagttgagataagagggttacagatcattgtacatggaaaatattcccagcagtaaacacttccattaatgtgatctacggcttttgaaaaggagcatctcagaataagatggtggtacaatttgcttattaaaattgagaaagaaaaaaaaagacacactggagtatattagaaaggaaaaagaaggaatgtggtctctcatgattgaaagcatgatttagatcggatacggcttttgctaaccaaggaccaagggactctggcaagatggggtggttttccgaatgccagaccgaggtgccttacgaaggcagctgccaatggttctgtggcacagactggctcctgagaacccagacgaccttgacctggcagcccggccctccacgctagtacctcgcctgattttccatcgttgcggtatccagccgcttcagacgtccgccgccttcagtggtggtagtcaaatgtagtcaaccaaaccacagcatcccttaggttaaaagcaaacggggcagctttgcctagagctcattgacagtgtgatggggggagaagggttgtcacaatggaagatgaggacactagactcatgtagcacagaaacatgaagccacacgcaccggcagcctccggggtgttcctcgctctctcgtatgttaaaccttatattttataagagtttttcctcttatttcactttttaaaaaaaattaaagtaggtggggaaaaaaataaagctttacacagaatttatatgtgggtaagtgtttcatggaaatttctaatcttaacgaagctaagtggagctcactcgtatccaaaagtataacaggtgcagaagccacaagtctgagaaccttgacgacagttccatcgtcctgccatttgatttttcagtctgcgtttcatcactgtgtagctattgtaaatgtgaatagaaaaaaacaggtcattgcctatttttgaagaacgcgttggtgttcgagtccactagacacactcgctccacacagccttcaccgtagactctgtagtggacacagatatagcataaatgaaattgttaaattatttcattgtagttaattcccactataggaatgctttatcatagtgaagtttcttttgagaagaaacggaactccttgaggcttctctttgggatgtatatgagcgtgtacatattattctatgtgtttataatataatattttcccaaa

SEQ ID NO: 108536 - DNA, 563 bp, Homo sapiens
  Payload ID: 1325
  Gene Symbol: AGAP1
  Gene Name: ArfGAP with GTPase domain, ankyrin repeat and PH domain 1
  ENST ID: ENST00000402604
  CDS Start-End: 213-563
atccggtttggcaggaacaggacagggtggttagcaggccacagtgtggtgggagtgaaagtgtactgtcctgtgtgatatttttgcacagcctgacagtgggggcaagtttagagcctttgagctgagaatctggagagagcagtggatgcgatgggcagttgcttgtccttgctgtgagaagacaggccacggggctgcacccagcccccatggatgccttcgtgaacagccaggaatggacgctgagtcgatctgtcccggagctcaaagtgggaattgtgggtaacttggccagcggcaagtctgccctggtgcaccggtacctgacgggcacatatgtccaggaggagtctccggaaggtggcaggttcaagaaagagattgtcgttgatggacagagctatctgctgctgatcagagatgaagggggccccccggaggcgcagtttgccatgtgggtggacgctgttatatttgtcttcagcttggaggatgaaataagtttccagaccgtttaccactactacagtcgaatggccaactatcggaacacgagcgag

SEQ ID NO: 108537 - DNA, 6138 bp, Homo sapiens
  Payload ID: 1325
  Gene Symbol: AGAP1
  Gene Name: ArfGAP with GTPase domain, ankyrin repeat and PH domain 1
  ENST ID: ENST00000409538
  CDS Start-End: 497-3706
gcgcgtttccattttaaaccgccgcccgccgcccgccacccgccacccttcggccgcagccggtgcagctgtccgcgcgtcccggagcccagggagtggcggaggctgcggaaccgccgagctgtgcagccggagcgggaggatgcgcacgggccccgcgtcgtagacaatgaagccgcgggcgccgccgcctgccctgggccctgcgcaccgcggccgcacctgccggcgagagcgctctagcgcctgaccggccgcctcgcttggccccgccggcccatggctcggcgccccgggcccggaccccggcactcgggcggcgcggcgcacgggccggcgggtgccaggggcgccgtccccgcagcctgagtgcggccctcgcggtcagcggggggcgtgggccacactcccggcccgcctgccctccccgcttggcccggcgccctcccggcccgcgggctcgctggatgcggcggggccccagcgcgcgggcgacatgtacttgttggacggcagtggcgagcccgcgtcgccacccgcggacgcgatgccgcgcgggacgccccccagaaagactgtctaccgcatctccgtgaccatggtcaggaaggagcagctggccgcgccgggctccggcggcccggacccacgcccggttcggcggccccggcccgcgcgctccccggacgcgcccgggaggcttgaggaggaggccgaggaggcggagggcgccgaggaaccggagggtccccggccgcgcgcttgggatttccgcaccttccgcacccgcagcaccgggcagctggaactggggcggctccggccgtgcgcacgcggcctggaacccgcggacctggccggcagcgccccggccgaggaggagggacgcggctcgcccgcgtccggcagccccgacgtggagggggcccgggccgcgcccctgcggcggagcctgagcttcaggcactggagcgggcctgaggcgccgcaaggccggacactgggcggcggaaggcgccacagcagctccgggagcctggcctgggcgccgtgcgacgaggccgcggccgggaccaccctggagcccgcgaccgccacgcagcccgcctcggagaagcgcaacaccctggacgtgggcgaggtgctcagcaagaacgacgcgctctcggacctggagcgttgggaacgcagtaagagcaagaaccgcacgctggacaacagcgacctgcagcggctggagcgcgcgcgggcggcggccggggccggcgcggcctcggagcaccggctgctgcgcttcttcagcggcatcttcgcgcgcagggacgggggcccgggcggcgggccctcgccacggagcggagcctcgcggccacgcggctacttcagcctgcggcgggccccggccgaagcgcactcgtccagcgccgagagcatcgacggctccccgcgcagagatgccttcgtgaacagccaggaatggacgctgagtcgatctgtcccggagctcaaagtgggaattgtgggtaacttggccagcggcaagtctgccctggtgcaccggtacctgacgggcacatatgtccaggaggagtctccggaaggtggcaggttcaagaaagagattgtcgttgatggacagagctatctgctgctgatcagagatgaagggggccccccggaggcgcagtttgccatgtgggtggacgctgttatatttgtcttcagcttggaggatgaaataagtttccagaccgtttaccactactacagtcgaatggccaactatcggaacacgagcgagattcctctggttctggtgggaacccaggatgccataagttctgctaacccgagggtcatcgatgacgccagggcgaggaagctctccaacgacctgaaacggtgcacgtactacgagacgtgtgctacatacgggctgaatgtggagagggtcttccaggacgttgcccagaagattgttgccacaaggaagaagcagcagctgtccataggaccctgcaagtcgctacctaattctcccagccattcctccgtctgttccgcgcaggtgtctgccgtgcacatcagccagacaagtaatggaggtgggagtttaagcgactattcctcctccgttccatcgactcccagcaccagccagaaggaacttcggatcgatgttcctcccactgccaacacgcccacgcccgttcgcaagcagtctaagcgccggtccaacctgttcacctctcggaaagggagcgacccagacaaagagaagaaaggcctggagagtcgtgcggacagcattgggagcggccgagccatcccaattaaacagggcatgctgttgaagcgaagtggcaaatcgttgaataaagagtggaaaaagaaatatgtcaccctgtgtgacaatggcgtgctgacctatcatcccagtttacatgattacatgcagaatgttcatggtaaggagattgaccttctgagaaccactgtgaaagtcccagggaagaggccaccccgagccacgtcagcctgcgcacccatctccagccctaaaaccaatggcctatccaaggacatgagcagtttacacatctcacccaattcagacacagggctgggtgactccgtatgctccagccccagtatctccagcaccaccagccccaagctcgacccgcccccctcccctcacgccaacagaaagaagcaccgaaggaagaaaagcactagcaacttcaaagccgacggcctgtccggcactgctgaagaacaagaagaaaattttgagtttatcattgtgtccctcactggccaaacatggcactttgaagccacgacgtatgaggagcgggacgcctgggtccaagccatcgagagccagatcctggccagcctgcagtcgtgcgagagcagcaagaacaagtcccggctgacgagccagagcgaggccatggccctgcagtcgatccggaacatgcgcgggaactcccactgtgtggactgcgagacccagaatcccaactgggccagtttgaacttgggagccctcatgtgcatcgaatgctcagggatccaccggaatcttggcacccacctttcccgagtccgatctctggacctggatgactggccagtcgagctcatcaaggtgatgtcatccatcgggaacgagctagccaacagcgtctgggaagagagcagccaggggcggacgaaaccatcggtagactccacaagggaagagaaggaacggtggatccgtgccaagtacgagcagaagctcttcctggccccgctgccctgcacggagctgtccctgggccagcacctgctgcgggccaccgccgacgaggacctgcggacggccatcctgctgctggcacacggctcccgggacgaggtgaacgagacctgcggggagggagacggccgcacggcgctgcatctggcctgccgcaaggggaatgtggtcctggcgcagctcctgatctggtacggagtggacgtcacggcccgagatgcccacgggaacacagctctggcctacgcccggcaggcctccagccaggagtgcatcgacgtgctgctgcagtacggctgccccgacgagcgcttcgtgctcatggccacccctaacctgtccaggagaaacaataaccggaacaacagcagtgggagggtgcccaccatcatctgaggaacagccgtgcccgcctgctcgccgcacctgggacgcggcagcctcgccgcattctcgctcagaagtcgcagcacgtgagtcccgtcgcatcccctccctcttcctggtggccacctccctcccgcccacccactctcaccccaaacaaaatcacaaaacctggacatccctcaaggggcgaagaggcggccgggagactgcagaagtggctccttttcataaactcccctaaaccacacacaggagagagcgacgggcctcggccctttgatgatagcacatggcgcaggacccttgtcctggtggcacaagggatggggacgcgagggggaggggaggcgaggaacaaggagaaggggcaactttccttaactggcagttgagcacatagtacatttcccctctaccaaacggaacacttggattccatctcttctctgaggagctcgacggcataaatcagaagcaagcacagagtttgtcaggtttgaagcccctatgatggtgtgtgtcaaatcagttgtagctaatctgtccagggagaatactggcttcattacacttgtacagccgagttcttcccgcattactgctgtttaatagaacgtgattagtcatcgccgagaagaaagcatattagccgaggaggtagtcacgcggcacgcgccggtgattgccacgatgtgattgcaatactcttagaagcaccatattatcccagacatgttctttcaagcccttggagccctctctaaattcactgtcatcatttagtatctgtttaatttttcagtccaaagagaggaaatcagtcgctgagtattatttgactccggtctccttggtgcaaaaacaaaatgggaaaaataaataagaataactcagaaactcaaaaggaaaccacaaattcagctaataatagcatttcgagtatatttcgtaaactaaggaaatacacaaaaggctgttttttccgactgtaagagatatttgatgtccttttgccgaggtggatgtgttagtctcaggccctcctggaccacgttgcccaagtcacacaggcttctgtgttatgtatttagataagatgtgtgaaaatatatttgaataaaagaagttcataaatatgcattgatttttgtacagacaaatggcacctctcttaatttataaattgaactggatgtgaactaataatgtgcaactagttgagataagagggttacagatcattgtacatggaaaatattcccagcagtaaacacttccattaatgtgatctacggcttttgaaaaggagcatctcagaataagatggtggtacaatttgcttattaaaattgagaaagaaaaaaaaagacacactggagtatattagaaaggaaaaagaaggaatgtggtctctcatgattgaaagcatgatttagatcggatacggcttttgctaaccaaggaccaagggactctggcaagatggggtggttttccgaatgccagaccgaggtgccttacgaaggcagctgccaatggttctgtggcacagactggctcctgagaacccagacgaccttgacctggcagcccggccctccacgctagtacctcgcctgattttccatcgttgcggtatccagccgcttcagacgtccgccgccttcagtggtggtagtcaaatgtagtcaaccaaaccacagcatcccttaggttaaaagcaaacggggcagctttgcctagagctcattgacagtgtgatggggggagaagggttgtcacaatggaagatgaggacactagactcatgtagcacagaaacatgaagccacacgcaccggcagcctccggggtgttcctcgctctctcgtatgttaaaccttatattttataagagtttttcctcttatttcactttttaaaaaaaattaaagtaggtggggaaaaaaataaagctttacacagaatttatatgtgggtaagtgtttcatggaaatttctaatcttaacgaagctaagtggagctcactcgtatccaaaagtataacaggtgcagaagccacaagtctgagaaccttgacgacagttccatcgtcctgccatttgatttttcagtctgcgtttcatcactgtgtagctattgtaaatgtgaatagaaaaaaacaggtcattgcctatttttgaagaacgcgttggtgttcgagtccactagacacactcgctccacacagccttcaccgtagactctgtagtggacacagatatagcataaatgaaattgttaaattatttcattgtagttaattcccactataggaatgctttatcatagtgaagtttcttttgagaagaaacggaactccttgaggcttctctttgggatgtatatgagcgtgtacatattattctatgtgtttataatataatattttcccaaa

SEQ ID NO: 108538 - DNA, 2165 bp, Homo sapiens
  Payload ID: 1325
  Gene Symbol: AGAP1
  Gene Name: ArfGAP with GTPase domain, ankyrin repeat and PH domain 1
  Uniprot ID: Q9UPQ3
  ENST ID: ENST00000409457
  CDS Start-End: 599-1816
ggcgctcggagcgggctccgcggcttgcaaggcgcctgcgactcggtcccaggtcggcgggcggcgcacggcgggctcgcgcgggggccccggcgcgccgggcggcgcagtacgcagcgcgcggacccacgccacggccaggagcccagagcagcgcggccacactgcccaggggtcggccctcggccccggcgctcggagcgcggcggctgcctgggctttaatggctgctccgcggagcagcgcctagggctggaaggcggctgcggctcaggaagtcacccgagcaagcctccttcggggccggccgcacccgccgcggcgcgctccatgggggcgcgctccccccgggcggcccgctgacccgggacgccggggcccgctcgctcgccggccgcgcgtcccggccatgaactgagcccgcgggccagccccgcgcctgctccgcccgcgcctttcttctcgcgcctcctccgcccgccgccggcgggcccggctccccgggggctgcggcgccccgggctcggcggcccgcgggccccggggcgcggggcggcggcggcggggggcgcgcggctccgggcgcggcgcctgcaccatgaactaccagcagcagctggccaactcggctgccatccgggccgagatccagcgcttcgagtcggtccaccccaacatctactccatctacgagctgctggagcgcgtggaggagccggtgctgcagaaccagatccgggagcacgtcatcgccatcgaagatgccttcgtgaacagccaggaatggacgctgagtcgatctgtcccggagctcaaagtgggaattgtgggtaacttggccagcggcaagtctgccctggtgcaccggtacctgacgggcacatatgtccaggaggagtctccggaaggtggcaggttcaagaaagagattgtcgttgatggacagagctatctgctgctgatcagagatgaagggggccccccggaggcgcagtttgccatgtgggtggacgctgttatatttgtcttcagcttggaggatgaaataagtttccagaccgtttaccactactacagtcgaatggccaactatcggaacacgagcgagattcctctggttctggtgggaacccaggatgccataagttctgctaacccgagggtcatcgatgacgccagggcgaggaagctctccaacgacctgaaacggtgcacgtactacgagacgtgtgctacatacgggctgaatgtggagagggtcttccaggacgttgcccagaagattgttgccacaaggaagaagcagcagctgtccataggaccctgcaagtcgctacctaattctcccagccattcctccgtctgttccgcgcaggtgtctgccgtgcacatcagccagacaagtaatggaggtgggagtttaagcgactattcctcctccgttccatcgactcccagcaccagccagaaggaacttcggatcgatgttcctcccactgccaacacgcccacgcccgttcgcaagcagtctaagcgccggtccaacctgttcacctctcggaaagggagcgacccagacaaagagaagaaaggcctggagagtcgtgcggacagcattgggagcggccgagccatcccaattaaacagggcctgcccttctttgtccttgcactgacagccagcacttatctcaggcctgctggagcccgtgcccgtcagtcctccccctggccagggccgaggggtggtcagaccagcccgcattgtgctgaaggcccacaatcagcccagctgtccggggccatgatgaattagcggtgggagttaacatagaggtgaactccagatcggccgatagcttgcaggccgctgctgtttgtcctgacttcagcgcatctctgatagacctttgacaccttccaacaaagaggttacaggagggagagctggagaaatggagcgctcctccagaaagttcggcaactcacaaaagaccccttaatttctatagcgggcaattcagtccacaaaggaaggaaatcaatgagcgtttacgctctttctttgaggaacctttttttaaagaaaaaaacatttactggcgctttgcatgttttgggtacaagcagtggtagaaacataaaacattaaaatccaagattga

SEQ ID NO: 108539 - DNA, 826 bp, Homo sapiens
  Payload ID: 1325
  Gene Symbol: AGAP1
  Gene Name: ArfGAP with GTPase domain, ankyrin repeat and PH domain 1
  ENST ID: ENST00000418654
  CDS Start-End: 1-826
ctccagccctaaaaccaatggcctatccaaggacatgagcagtttacacatctcacccaattcagacacagggctgggtgactccgtatgctccagccccagtatctccagcaccaccagccccaagctcgacccgcccccctcccctcacgccaacagaaagaagcaccgaaggaagaaaagcactagcaacttcaaagccgacggcctgtccggcactgctgaagccaaacgcaaagcatggaaactaaaccgtgttggtagcctgcgaaatatatacagcagcagcaccaacactgaagaacaagaagaaaattttgagtttatcattgtgtccctcactggccaaacatggcactttgaagccacgacgtatgaggagcgggacgcctgggtccaagccatcgagagccagatcctggccagcctgcagtcgtgcgagagcagcaagaacaagtcccggctgacgagccagagcgaggccatggccctgcagtcgatccggaacatgcgcgggaactcccactgtgtggactgcgagacccagaatcccaactgggccagtttgaacttgggagccctcatgtgcatcgaatgctcagggatccaccggaatcttggcacccacctttcccgagtccgatctctggacctggatgactggccagtcgagctcatcaaggtgatgtcatccatcgggaacgagctagccaacagcgtctgggaagagagcagccaggggcggacgaaaccatcggtagactccacaagggaagagaaggaacggtggatccgtgccaagtacgagcagaagctcttcctggcc

SEQ ID NO: 108540 - DNA, 757 bp, Homo sapiens
  Payload ID: 1325
  Gene Symbol: AGAP1
  Gene Name: ArfGAP with GTPase domain, ankyrin repeat and PH domain 1
  ENST ID: ENST00000448025
  CDS Start-End: 1-757
gaaatatgtcaccctgtgtgacaatggcgtgctgacctatcatcccagtttacatgattacatgcagaatgttcatggtaaggagattgaccttctgagaaccactgtgaaagtcccagggaagaggccaccccgagccacgtcagcctgcgcacccatctccagccctaaaaccaatggcctatccaaggacatgagcagtttacacatctcacccaattcagggaatgtcactagtgcatctgggtctcagatggcaagcggcatcagcctggtctccttcaacagccgacccgacggcatgcaccagcgctcctactcagtctccagtgccgaccagtggagtgaggctacggtcattgcaaactcggccatcagcagtgacacagggctgggtgactccgtatgctccagccccagtatctccagcaccaccagccccaagctcgacccgcccccctcccctcacgccaacagaaagaagcaccgaaggaagaaaagcactagcaacttcaaagccgacggcctgtccggcactgctgaagccaaacgcaaagcatggaaactaaaccgtgttggtagcctgcgaaatatatacagcagcagcaccaacactgaagaacaagaagaaaattttgagtttatcattgtgtccctcactggccaaacatggcactttgaagccacgacgtatgaggagcgggacgcctgggtccaagccatcgagagccagatcctggccagcctgcagtcgtgc

SEQ ID NO: 108541 - DNA, 10090 bp, Homo sapiens
  Payload ID: 1325
  Gene Symbol: AGAP1
  Gene Name: ArfGAP with GTPase domain, ankyrin repeat and PH domain 1
  ENST ID: ENST00000428334
  CDS Start-End: 1-2412
gatgccttcgtgaacagccaggaatggacgctgagtcgatctgtcccggagctcaaagtgggaattgtgggtaacttggccagcggcaagtctgccctggtgcaccggtacctgacgggcacatatgtccaggaggagtctccggaaggtggcaggttcaagaaagagattgtcgttgatggacagagctatctgctgctgatcagagatgaagggggccccccggaggcgcagtttgccatgtgggtggacgctgttatatttgtcttcagcttggaggatgaaataagtttccagaccgtttaccactactacagtcgaatggccaactatcggaacacgagcgagattcctctggttctggtgggaacccaggatgccataagttctgctaacccgagggtcatcgatgacgccagggcgaggaagctctccaacgacctgaaacggtgcacgtactacgagacgtgtgctacatacgggctgaatgtggagagggtcttccaggacgttgcccagaagattgttgccacaaggaagaagcagcagctgtccataggaccctgcaagtcgctacctaattctcccagccattcctccgtctgttccgcgcaggtgtctgccgtgcacatcagccagacaagtaatggaggtgggagtttaagcgactattcctcctccgttccatcgactcccagcaccagccagaaggaacttcggatcgatgttcctcccactgccaacacgcccacgcccgttcgcaagcagtctaagcgccggtccaacctgttcacctctcggaaagggagcgacccagacaaagagaagaaaggcctggagagtcgtgcggacagcattgggagcggccgagccatcccaattaaacagggcatgctgttgaagcgaagtggcaaatcgttgaataaagagtggaaaaagaaatatgtcaccctgtgtgacaatggcgtgctgacctatcatcccagtttacatgattacatgcagaatgttcatggtaaggagattgaccttctgagaaccactgtgaaagtcccagggaagaggccaccccgagccacgtcagcctgcgcacccatctccagccctaaaaccaatggcctatccaaggacatgagcagtttacacatctcacccaattcagggaatgtcactagtgcatctgggtctcagatggcaagcggcatcagcctggtctccttcaacagccgacccgacggcatgcaccagcgctcctactcagtctccagtgccgaccagtggagtgaggctacggtcattgcaaactcggccatcagcagtgacacagggctgggtgactccgtatgctccagccccagtatctccagcaccaccagccccaagctcgacccgcccccctcccctcacgccaacagaaagaagcaccgaaggaagaaaagcactagcaacttcaaagccgacggcctgtccggcactgctgaagaacaagaagaaaattttgagtttatcattgtgtccctcactggccaaacatggcactttgaagccacgacgtatgaggagcgggacgcctgggtccaagccatcgagagccagatcctggccagcctgcagtcgtgcgagagcagcaagaacaagtcccggctgacgagccagagcgaggccatggccctgcagtcgatccggaacatgcgcgggaactcccactgtgtggactgcgagacccagaatcccaactgggccagtttgaacttgggagccctcatgtgcatcgaatgctcagggatccaccggaatcttggcacccacctttcccgagtccgatctctggacctggatgactggccagtcgagctcatcaaggtgatgtcatccatcgggaacgagctagccaacagcgtctgggaagagagcagccaggggcggacgaaaccatcggtagactccacaagggaagagaaggaacggtggatccgtgccaagtacgagcagaagctcttcctggccccgctgccctgcacggagctgtccctgggccagcacctgctgcgggccaccgccgacgaggacctgcggacggccatcctgctgctggcacacggctcccgggacgaggtgaacgagacctgcggggagggagacggccgcacggcgctgcatctggcctgccgcaaggggaatgtggtcctggcgcagctcctgatctggtacggagtggacgtcacggcccgagatgcccacgggaacacagctctggcctacgcccggcaggcctccagccaggagtgcatcgacgtgctgctgcagtacggctgccccgacgagcgcttcgtgctcatggccacccctaacctgtccaggagaaacaataaccggaacaacagcagtgggagggtgcccaccatcatctgaggaacagccgtgcccgcctgctcgccgcacctgggacgcggcagcctcgccgcattctcgctcagaagtcgcagcacgtgagtcccgtcgcatcccctccctcttcctggtggccacctccctcccgcccacccactctcaccccaaacaaaatcacaaaacctggacatccctcaaggggcgaagaggcggccgggagactgcagaagtggctccttttcataaactcccctaaaccacacacaggagagagcgacgggcctcggccctttgatgatagcacatggcgcaggacccttgtcctggtggcacaagggatggggacgcgagggggaggggaggcgaggaacaaggagaaggggcaactttccttaactggcagttgagcacatagtacatttcccctctaccaaacggaacacttggattccatctcttctctgaggagctcgacggcataaatcagaagcaagcacagagtttgtcaggtttgaagcccctatgatggtgtgtgtcaaatcagttgtagctaatctgtccagggagaatactggcttcattacacttgtacagccgagttcttcccgcattactgctgtttaatagaacgtgattagtcatcgccgagaagaaagcatattagccgaggaggtagtcacgcggcacgcgccggtgattgccacgatgtgattgcaatactcttagaagcaccatattatcccagacatgttctttcaagcccttggagccctctctaaattcactgtcatcatttagtatctgtttaatttttcagtccaaagagaggaaatcagtcgctgagtattatttgactccggtctccttggtgcaaaaacaaaatgggaaaaataaataagaataactcagaaactcaaaaggaaaccacaaattcagctaataatagcatttcgagtatatttcgtaaactaaggaaatacacaaaaggctgttttttccgactgtaagagatatttgatgtccttttgccgaggtggatgtgttagtctcaggccctcctggaccacgttgcccaagtcacacaggcttctgtgttatgtatttagataagatgtgtgaaaatatatttgaataaaagaagttcataaatatgcattgatttttgtacagacaaatggcacctctcttaatttataaattgaactggatgtgaactaataatgtgcaactagttgagataagagggttacagatcattgtacatggaaaatattcccagcagtaaacacttccattaatgtgatctacggcttttgaaaaggagcatctcagaataagatggtggtacaatttgcttattaaaattgagaaagaaaaaaaaagacacactggagtatattagaaaggaaaaagaaggaatgtggtctctcatgattgaaagcatgatttagatcggatacggcttttgctaaccaaggaccaagggactctggcaagatggggtggttttccgaatgccagaccgaggtgccttacgaaggcagctgccaatggttctgtggcacagactggctcctgagaacccagacgaccttgacctggcagcccggccctccacgctagtacctcgcctgattttccatcgttgcggtatccagccgcttcagacgtccgccgccttcagtggtggtagtcaaatgtagtcaaccaaaccacagcatcccttaggttaaaagcaaacggggcagctttgcctagagctcattgacagtgtgatggggggagaagggttgtcacaatggaagatgaggacactagactcatgtagcacagaaacatgaagccacacgcaccggcagcctccggggtgttcctcgctctctcgtatgttaaaccttatattttataagagtttttcctcttatttcactttttaaaaaaaattaaagtaggtggggaaaaaaataaagctttacacagaatttatatgtgggtaagtgtttcatggaaatttctaatcttaacgaagctaagtggagctcactcgtatccaaaagtataacaggtgcagaagccacaagtctgagaaccttgacgacagttccatcgtcctgccatttgatttttcagtctgcgtttcatcactgtgtagctattgtaaatgtgaatagaaaaaaacaggtcattgcctatttttgaagaacgcgttggtgttcgagtccactagacacactcgctccacacagccttcaccgtagactctgtagtggacacagatatagcataaatgaaattgttaaattatttcattgtagttaattcccactataggaatgctttatcatagtgaagtttcttttgagaagaaacggaactccttgaggcttctctttgggatgtatatgagcgtgtacatattattctatgtgtttataatataatattttcccaaatgacttcttgtttcactttgccttccacaacctgaatgccagattggttttttcccttcctggcccccagcacaagctgccatgactccccctcagaaaacacagcccctcctctaccattctcagtgatgtccatctgctccactccgcagccactttctagggcccaagttttggtagcagaaggaaaggcagtttttgagggtctttcgaaaaaaagaagacggggcagctttgcccagagctcgttggcagtctgtttgtatttcagtgtctaaccagaagtcctttctttgcggaccgcactctcgttcccactttcaagctaattaccaccaaggctgggagaggcaaggactgggggcggagctaggaataactcgtttgagaagggggtggagttttcgttgttcatttccatgttcagttctgtgacgtgacgatgacagatcaccactgcaggatccccctcacctttcctgttcagaattaaaactctcccttgatgagaaacagccagctgagggaggcccacgagcggcctgtgtaaccccatgggtgatctggacacatctgcacccccgcgttcagcttcgcggagactgaacttggcggggagtggaggggtgtggtgcagacctggctgcagcagaaacaccccgcagggacagtactctgtgattctgacctcaggtgctgggacgggcagatggtttcccccgcccagcaccccagtcctggtccctggtccctctctctgtttcatcccaggaaatgagcagctcgagggtgagcaagtgacaagttcctgagtcactggccccaaaaccaggtgcagtgtcctgtctcccaagtgtgtgcacaatgtatatatgcactggaaaggagggagaaggcagcgggtcactcgccaatcgcagggttctcagacacaggagagagcgggatcttaatgaattgcatttcctgcagagcctctagtgcacaggccagttctcggcagtggcttttcagcacaagggccttgcattgaagctccctcttctgagatttcacccagcctgatgaggcctgcatggttccggcctcgtcatccagtgtagataccagtcttcctatttttgtgacatctgcacatttggggtcattccctatatctgcataggagctattgctaaccttgttagggagaaacatggtctaatgagaaagacagacccctaggctcagctggccctgccatccttccagaggattcctctgcaactctaggcaagcacccagcttcctgggctctttttcctcatctgtgaaacttgcagggtgcagtgaggtttcaaaccagtgtgataagtgttggcctcacacctggcccaggggatgctgggagaacaggagcacttgttaataacagaaacactgatgggaccgaagccagtgcacacaccaggaaacctgcccgtggctgacactgtcctccagcctgcattctggggaggctgtgatgggcacgtttgccaaccccccccccccagtagagcccaggaccctcctctctcagcttgccagtgccctgccctccacatggcggggaacagcatcaatgaggtccttgctccctgagagcctctctggaacctgcccacttttctcaacatgtatattctgctttgtagtctgaggttgattttctagaggcgaggaaggggctgagttctgccctcgtgctgttcgctggtgctgatcagggccaagacgacccttccctctcccccacagcctgttgaggtgccgttgacgtggacagcgcccctcccttaagatgcccccttgccgttgccatgagccgctgtgactcacgcgtgcactgggccttgcttggtgctcccctcctcctcctgtctgagatcggagcttgctggagagcaccccaggtcgccgtgcttggctgcaggcccgtccctctctccccatcctcgggttcccagcgtgttttgtgcttgaacttggtggactcatcttaccccacaagagtggcctgctcaacctgcagcctccaatgtgccgtaggcgctctaggtccccgtggcgcccaggacaccaactctccctccctgcacttaggatgttctggaaatgagaggaaatccacattcctgccccaggaggtgggaagcctggcaacgatgtagcttcccctgagatgcggtatgatcaggcctcagcaactactcaggaggcaaaggtgtttggaaagcaaaccccaaacctcccggcacggcatgtgctctgcttccgtccctcaccgcctgcacaaggtcgttgagacttttctagaactccccggggttgtatttatggccttcaagcaaacaaattgaaaagcagtcaaggaggagttcagatagaaaagtgctggagatacacatctttccttcaaaggaaatgtaatttatttccaaccgctgcctcagacgggggtttcacatgttgtgaagtcacatcttgaatgactgtcaccctcatccttccccaaaaagctaaataagggcctttggcatcaatgcgtgcattctccacctttccgcggcttgcgcttggatttctgagtggctttcttcagggagcccttgtggtcatgtgtctttaatgctgctccccatgcccccaggccaggccagcacgctcaggtgatagcgagtggggccaggagacccccctgccctgcccagtggacagatctgccccagccctgctgtggggacgggccctctatcatttaaccacatacattaggttgcttttcagcaaaatgtcagctttcctcccattatgcaggagagagaaggggcgcaggtgtatctccttagagtacaccttggagctggatcactaagaaacagtcctcagactggtccttccgacacaggcagagagtgaactggatcgctggcccctgggatgctgcgctgtctgtgattagagagaagtggccagtgtcccgtctgtgattagacagaaacccctgtggcagactcctcccctctccatgaagaaagaaatatttacttagatattactgtttcaaaacacaaactttattccccttagagaagaaatactgcccttaaatagactgttgaaatattaatggcccccccatttaatcagtgtgtctgcggctttcttcgcgtcacatgtccgcattggcaggtgattctggaaagggattctgggaaaccaacaagtcttttttaaatctttgagttgtatgagaaagtatttaagttcaccagtgtagtaaacacccaccccagagcagcggtaagcaaacctaaatctgaaaacccattcttactgtctttcaccatgagatgctggttttggtgtaaaatgacagcacttggtttggggttttgcacctgttgggtagaactgttcttgtctgaggtcctcaccctctacagatgggcctcagggcctggaggtgggcagatggggccagagtggccagcagagacttgcatgggctctgaaagccccagagctcaggcctaaggctgctaggtgagaccagcaggcagctgtggcatccgaccttgggacgcccaagctgggcagccgctccatgtgccccaaacaggatatcctcatgaatgtgaggagaggctggctcagggcttggttttcattttggcctggcacagggtacctgtagggagcactcccccaacctgaggatggtgaaaccatatgatagagactccttgtcgaagtccacatcggactgatctagaatgccccgtggggggattgcatggcctttgccttgagatgcaggtgaaagaaaggaaccaaacaaggcatgagtgtgttggggaatcttcccagtggagcaaacccccttaacacaccagctgttgggaacagctgcccctaaatccaattaaaccctcatctccctggtgctgaacagtctacactggcccaggaagctaacgtctgagccgcttggagagctttggtaaacagaagacactggaagcccactcggtcagcagctgggcatgaggatgtcaggggcctttggacttgaggaaggacagtccaggtgcatggaatcctaatgggcctcatgcagacactggaagcagcccagccccctgcccaataccacagccctggggtgtcccctgacattcctggaggtccctgggcaaatgcatttcctgcctgggttctcagggtaggagaacagagaaggctccaagggtgttgggagtgagccaggggctggtctggggagtgggtctcacgcactgctcaggttggcacgagggacctcccccatcccaacccagccccaagggtcccagcagggctctcagcatggctgttttgagggtacacaggtggctggagaggggtggggcagttgcatggtgggtggcaaagtgtgcatttagaagctgcttcgtggcgttaagaacggggggagagggaccagcactgtaacgttagaaataattccttcttgcagacttgaaaagcatcagtttccctcccacggctgggtttttgtgtctgaaatacatctaattctccagactgcagcccctctcagccccgagcacctgagcgctggggaggcccttattgagctcagcctggagaggggagggtcgcacgggtcccgggggcaggtctcctgcactggctcttcccttctgccagcttggaatttggttctcatcttgccacaggggtgcgtttcctaaagggcagccggagcagctcaaaggtgacaactgagatgcatttctaggcaggggcagggaaggccaacccaccttgcagccagttttctgtttctgtaaatagcagtgtatagagatggaagggcagcgtgggtgtatccacagatgggtttaggttttttttttggatgttttctattacctcattcagcaactttatgtttcacaatgactcaatgatgctttatttatattgtttgtactgtaattaaaaccattgacagacatttcactttgcttgttatttcatatgatcttgttttgattaaatatgccagtttgtattttcctgccttgggatttttttgtgtccgctgtacagtattctaagggaaaaagaaaaagaaagatgtgtaaagtaacagagagaggtggctatggtgtagagacctctttctaataaagaaatgaaaatatgtctacaccgct

SEQ ID NO: 108542 - DNA, 1057 bp, Homo sapiens
  Payload ID: 1325
  Gene Symbol: AGAP1
  Gene Name: ArfGAP with GTPase domain, ankyrin repeat and PH domain 1
  ENST ID: ENST00000619456
  CDS Start-End: 2-1057
agatgccttcgtgaacagccaggaatggacgctgagtcgatctgtcccggagctcaaagtgggaattgtgggtaacttggccagcggcaagtctgccctggtgcaccggtacctgacgggcacatatgtccaggaggagtctccggaaggtggcaggttcaagaaagagattgtcgttgatggacagagctatctgctgctgatcagagatgaagggggccccccggaggcgcagtttgccatgtgggtggacgctgttatatttgtcttcagcttggaggatgaaataagtttccagaccgtttaccactactacagtcgaatggccaactatcggaacacgagcgagattcctctggttctggtgggaacccaggatgccataagttctgctaacccgagggtcatcgatgacgccagggcgaggaagctctccaacgacctgaaacggtgcacgtactacgagacgtgtgctacatacgggctgaatgtggagagggtcttccaggacgttgcccagaagattgttgccacaaggaagaagcagcagctgtccataggaccctgcaagtcgctacctaattctcccagccattcctccgtctgttccgcgcaggtgtctgccgtgcacatcagccagacaagtaatggaggtgggagtttaagcgactattcctcctccgttccatcgactcccagcaccagccagaaggaacttcggatcgatgttcctcccactgccaacacgcccacgcccgttcgcaagcagtctaagcgccggtccaacctgttcacctctcggaaagggagcgacccagacaaagagaagaaaggcctggagagtcgtgcggacagcattgggagcggccgagccatcccaattaaacagggcctgcccttctttgtccttgcactgacagccagcacttatctcaggcctgctggagcccgtgcccgtcagtcctccccctggccagggccgaggggtggtcagaccagcccgcattgtgctgaaggcccacaatcagcccagctgtccggggccatgatgaattag

SEQ ID NO: 108543 - DNA, 9932 bp, Homo sapiens
  Payload ID: 1325
  Gene Symbol: AGAP1
  Gene Name: ArfGAP with GTPase domain, ankyrin repeat and PH domain 1
  ENST ID: ENST00000614409
  CDS Start-End: 2-2254
agatgccttcgtgaacagccaggaatggacgctgagtcgatctgtcccggagctcaaagtgggaattgtgggtaacttggccagcggcaagtctgccctggtgcaccggtacctgacgggcacatatgtccaggaggagtctccggaaggtggcaggttcaagaaagagattgtcgttgatggacagagctatctgctgctgatcagagatgaagggggccccccggaggcgcagtttgccatgtgggtggacgctgttatatttgtcttcagcttggaggatgaaataagtttccagaccgtttaccactactacagtcgaatggccaactatcggaacacgagcgagattcctctggttctggtgggaacccaggatgccataagttctgctaacccgagggtcatcgatgacgccagggcgaggaagctctccaacgacctgaaacggtgcacgtactacgagacgtgtgctacatacgggctgaatgtggagagggtcttccaggacgttgcccagaagattgttgccacaaggaagaagcagcagctgtccataggaccctgcaagtcgctacctaattctcccagccattcctccgtctgttccgcgcaggtgtctgccgtgcacatcagccagacaagtaatggaggtgggagtttaagcgactattcctcctccgttccatcgactcccagcaccagccagaaggaacttcggatcgatgttcctcccactgccaacacgcccacgcccgttcgcaagcagtctaagcgccggtccaacctgttcacctctcggaaagggagcgacccagacaaagagaagaaaggcctggagagtcgtgcggacagcattgggagcggccgagccatcccaattaaacagggcatgctgttgaagcgaagtggcaaatcgttgaataaagagtggaaaaagaaatatgtcaccctgtgtgacaatggcgtgctgacctatcatcccagtttacatgattacatgcagaatgttcatggtaaggagattgaccttctgagaaccactgtgaaagtcccagggaagaggccaccccgagccacgtcagcctgcgcacccatctccagccctaaaaccaatggcctatccaaggacatgagcagtttacacatctcacccaattcagacacagggctgggtgactccgtatgctccagccccagtatctccagcaccaccagccccaagctcgacccgcccccctcccctcacgccaacagaaagaagcaccgaaggaagaaaagcactagcaacttcaaagccgacggcctgtccggcactgctgaagaacaagaagaaaattttgagtttatcattgtgtccctcactggccaaacatggcactttgaagccacgacgtatgaggagcgggacgcctgggtccaagccatcgagagccagatcctggccagcctgcagtcgtgcgagagcagcaagaacaagtcccggctgacgagccagagcgaggccatggccctgcagtcgatccggaacatgcgcgggaactcccactgtgtggactgcgagacccagaatcccaactgggccagtttgaacttgggagccctcatgtgcatcgaatgctcagggatccaccggaatcttggcacccacctttcccgagtccgatctctggacctggatgactggccagtcgagctcatcaaggtgatgtcatccatcgggaacgagctagccaacagcgtctgggaagagagcagccaggggcggacgaaaccatcggtagactccacaagggaagagaaggaacggtggatccgtgccaagtacgagcagaagctcttcctggccccgctgccctgcacggagctgtccctgggccagcacctgctgcgggccaccgccgacgaggacctgcggacggccatcctgctgctggcacacggctcccgggacgaggtgaacgagacctgcggggagggagacggccgcacggcgctgcatctggcctgccgcaaggggaatgtggtcctggcgcagctcctgatctggtacggagtggacgtcacggcccgagatgcccacgggaacacagctctggcctacgcccggcaggcctccagccaggagtgcatcgacgtgctgctgcagtacggctgccccgacgagcgcttcgtgctcatggccacccctaacctgtccaggagaaacaataaccggaacaacagcagtgggagggtgcccaccatcatctgaggaacagccgtgcccgcctgctcgccgcacctgggacgcggcagcctcgccgcattctcgctcagaagtcgcagcacgtgagtcccgtcgcatcccctccctcttcctggtggccacctccctcccgcccacccactctcaccccaaacaaaatcacaaaacctggacatccctcaaggggcgaagaggcggccgggagactgcagaagtggctccttttcataaactcccctaaaccacacacaggagagagcgacgggcctcggccctttgatgatagcacatggcgcaggacccttgtcctggtggcacaagggatggggacgcgagggggaggggaggcgaggaacaaggagaaggggcaactttccttaactggcagttgagcacatagtacatttcccctctaccaaacggaacacttggattccatctcttctctgaggagctcgacggcataaatcagaagcaagcacagagtttgtcaggtttgaagcccctatgatggtgtgtgtcaaatcagttgtagctaatctgtccagggagaatactggcttcattacacttgtacagccgagttcttcccgcattactgctgtttaatagaacgtgattagtcatcgccgagaagaaagcatattagccgaggaggtagtcacgcggcacgcgccggtgattgccacgatgtgattgcaatactcttagaagcaccatattatcccagacatgttctttcaagcccttggagccctctctaaattcactgtcatcatttagtatctgtttaatttttcagtccaaagagaggaaatcagtcgctgagtattatttgactccggtctccttggtgcaaaaacaaaatgggaaaaataaataagaataactcagaaactcaaaaggaaaccacaaattcagctaataatagcatttcgagtatatttcgtaaactaaggaaatacacaaaaggctgttttttccgactgtaagagatatttgatgtccttttgccgaggtggatgtgttagtctcaggccctcctggaccacgttgcccaagtcacacaggcttctgtgttatgtatttagataagatgtgtgaaaatatatttgaataaaagaagttcataaatatgcattgatttttgtacagacaaatggcacctctcttaatttataaattgaactggatgtgaactaataatgtgcaactagttgagataagagggttacagatcattgtacatggaaaatattcccagcagtaaacacttccattaatgtgatctacggcttttgaaaaggagcatctcagaataagatggtggtacaatttgcttattaaaattgagaaagaaaaaaaaagacacactggagtatattagaaaggaaaaagaaggaatgtggtctctcatgattgaaagcatgatttagatcggatacggcttttgctaaccaaggaccaagggactctggcaagatggggtggttttccgaatgccagaccgaggtgccttacgaaggcagctgccaatggttctgtggcacagactggctcctgagaacccagacgaccttgacctggcagcccggccctccacgctagtacctcgcctgattttccatcgttgcggtatccagccgcttcagacgtccgccgccttcagtggtggtagtcaaatgtagtcaaccaaaccacagcatcccttaggttaaaagcaaacggggcagctttgcctagagctcattgacagtgtgatggggggagaagggttgtcacaatggaagatgaggacactagactcatgtagcacagaaacatgaagccacacgcaccggcagcctccggggtgttcctcgctctctcgtatgttaaaccttatattttataagagtttttcctcttatttcactttttaaaaaaaattaaagtaggtggggaaaaaaataaagctttacacagaatttatatgtgggtaagtgtttcatggaaatttctaatcttaacgaagctaagtggagctcactcgtatccaaaagtataacaggtgcagaagccacaagtctgagaaccttgacgacagttccatcgtcctgccatttgatttttcagtctgcgtttcatcactgtgtagctattgtaaatgtgaatagaaaaaaacaggtcattgcctatttttgaagaacgcgttggtgttcgagtccactagacacactcgctccacacagccttcaccgtagactctgtagtggacacagatatagcataaatgaaattgttaaattatttcattgtagttaattcccactataggaatgctttatcatagtgaagtttcttttgagaagaaacggaactccttgaggcttctctttgggatgtatatgagcgtgtacatattattctatgtgtttataatataatattttcccaaatgacttcttgtttcactttgccttccacaacctgaatgccagattggttttttcccttcctggcccccagcacaagctgccatgactccccctcagaaaacacagcccctcctctaccattctcagtgatgtccatctgctccactccgcagccactttctagggcccaagttttggtagcagaaggaaaggcagtttttgagggtctttcgaaaaaaagaagacggggcagctttgcccagagctcgttggcagtctgtttgtatttcagtgtctaaccagaagtcctttctttgcggaccgcactctcgttcccactttcaagctaattaccaccaaggctgggagaggcaaggactgggggcggagctaggaataactcgtttgagaagggggtggagttttcgttgttcatttccatgttcagttctgtgacgtgacgatgacagatcaccactgcaggatccccctcacctttcctgttcagaattaaaactctcccttgatgagaaacagccagctgagggaggcccacgagcggcctgtgtaaccccatgggtgatctggacacatctgcacccccgcgttcagcttcgcggagactgaacttggcggggagtggaggggtgtggtgcagacctggctgcagcagaaacaccccgcagggacagtactctgtgattctgacctcaggtgctgggacgggcagatggtttcccccgcccagcaccccagtcctggtccctggtccctctctctgtttcatcccaggaaatgagcagctcgagggtgagcaagtgacaagttcctgagtcactggccccaaaaccaggtgcagtgtcctgtctcccaagtgtgtgcacaatgtatatatgcactggaaaggagggagaaggcagcgggtcactcgccaatcgcagggttctcagacacaggagagagcgggatcttaatgaattgcatttcctgcagagcctctagtgcacaggccagttctcggcagtggcttttcagcacaagggccttgcattgaagctccctcttctgagatttcacccagcctgatgaggcctgcatggttccggcctcgtcatccagtgtagataccagtcttcctatttttgtgacatctgcacatttggggtcattccctatatctgcataggagctattgctaaccttgttagggagaaacatggtctaatgagaaagacagacccctaggctcagctggccctgccatccttccagaggattcctctgcaactctaggcaagcacccagcttcctgggctctttttcctcatctgtgaaacttgcagggtgcagtgaggtttcaaaccagtgtgataagtgttggcctcacacctggcccaggggatgctgggagaacaggagcacttgttaataacagaaacactgatgggaccgaagccagtgcacacaccaggaaacctgcccgtggctgacactgtcctccagcctgcattctggggaggctgtgatgggcacgtttgccaaccccccccccccagtagagcccaggaccctcctctctcagcttgccagtgccctgccctccacatggcggggaacagcatcaatgaggtccttgctccctgagagcctctctggaacctgcccacttttctcaacatgtatattctgctttgtagtctgaggttgattttctagaggcgaggaaggggctgagttctgccctcgtgctgttcgctggtgctgatcagggccaagacgacccttccctctcccccacagcctgttgaggtgccgttgacgtggacagcgcccctcccttaagatgcccccttgccgttgccatgagccgctgtgactcacgcgtgcactgggccttgcttggtgctcccctcctcctcctgtctgagatcggagcttgctggagagcaccccaggtcgccgtgcttggctgcaggcccgtccctctctccccatcctcgggttcccagcgtgttttgtgcttgaacttggtggactcatcttaccccacaagagtggcctgctcaacctgcagcctccaatgtgccgtaggcgctctaggtccccgtggcgcccaggacaccaactctccctccctgcacttaggatgttctggaaatgagaggaaatccacattcctgccccaggaggtgggaagcctggcaacgatgtagcttcccctgagatgcggtatgatcaggcctcagcaactactcaggaggcaaaggtgtttggaaagcaaaccccaaacctcccggcacggcatgtgctctgcttccgtccctcaccgcctgcacaaggtcgttgagacttttctagaactccccggggttgtatttatggccttcaagcaaacaaattgaaaagcagtcaaggaggagttcagatagaaaagtgctggagatacacatctttccttcaaaggaaatgtaatttatttccaaccgctgcctcagacgggggtttcacatgttgtgaagtcacatcttgaatgactgtcaccctcatccttccccaaaaagctaaataagggcctttggcatcaatgcgtgcattctccacctttccgcggcttgcgcttggatttctgagtggctttcttcagggagcccttgtggtcatgtgtctttaatgctgctccccatgcccccaggccaggccagcacgctcaggtgatagcgagtggggccaggagacccccctgccctgcccagtggacagatctgccccagccctgctgtggggacgggccctctatcatttaaccacatacattaggttgcttttcagcaaaatgtcagctttcctcccattatgcaggagagagaaggggcgcaggtgtatctccttagagtacaccttggagctggatcactaagaaacagtcctcagactggtccttccgacacaggcagagagtgaactggatcgctggcccctgggatgctgcgctgtctgtgattagagagaagtggccagtgtcccgtctgtgattagacagaaacccctgtggcagactcctcccctctccatgaagaaagaaatatttacttagatattactgtttcaaaacacaaactttattccccttagagaagaaatactgcccttaaatagactgttgaaatattaatggcccccccatttaatcagtgtgtctgcggctttcttcgcgtcacatgtccgcattggcaggtgattctggaaagggattctgggaaaccaacaagtcttttttaaatctttgagttgtatgagaaagtatttaagttcaccagtgtagtaaacacccaccccagagcagcggtaagcaaacctaaatctgaaaacccattcttactgtctttcaccatgagatgctggttttggtgtaaaatgacagcacttggtttggggttttgcacctgttgggtagaactgttcttgtctgaggtcctcaccctctacagatgggcctcagggcctggaggtgggcagatggggccagagtggccagcagagacttgcatgggctctgaaagccccagagctcaggcctaaggctgctaggtgagaccagcaggcagctgtggcatccgaccttgggacgcccaagctgggcagccgctccatgtgccccaaacaggatatcctcatgaatgtgaggagaggctggctcagggcttggttttcattttggcctggcacagggtacctgtagggagcactcccccaacctgaggatggtgaaaccatatgatagagactccttgtcgaagtccacatcggactgatctagaatgccccgtggggggattgcatggcctttgccttgagatgcaggtgaaagaaaggaaccaaacaaggcatgagtgtgttggggaatcttcccagtggagcaaacccccttaacacaccagctgttgggaacagctgcccctaaatccaattaaaccctcatctccctggtgctgaacagtctacactggcccaggaagctaacgtctgagccgcttggagagctttggtaaacagaagacactggaagcccactcggtcagcagctgggcatgaggatgtcaggggcctttggacttgaggaaggacagtccaggtgcatggaatcctaatgggcctcatgcagacactggaagcagcccagccccctgcccaataccacagccctggggtgtcccctgacattcctggaggtccctgggcaaatgcatttcctgcctgggttctcagggtaggagaacagagaaggctccaagggtgttgggagtgagccaggggctggtctggggagtgggtctcacgcactgctcaggttggcacgagggacctcccccatcccaacccagccccaagggtcccagcagggctctcagcatggctgttttgagggtacacaggtggctggagaggggtggggcagttgcatggtgggtggcaaagtgtgcatttagaagctgcttcgtggcgttaagaacggggggagagggaccagcactgtaacgttagaaataattccttcttgcagacttgaaaagcatcagtttccctcccacggctgggtttttgtgtctgaaatacatctaattctccagactgcagcccctctcagccccgagcacctgagcgctggggaggcccttattgagctcagcctggagaggggagggtcgcacgggtcccgggggcaggtctcctgcactggctcttcccttctgccagcttggaatttggttctcatcttgccacaggggtgcgtttcctaaagggcagccggagcagctcaaaggtgacaactgagatgcatttctaggcaggggcagggaaggccaacccaccttgcagccagttttctgtttctgtaaatagcagtgtatagagatggaagggcagcgtgggtgtatccacagatgggtttaggttttttttttggatgttttctattacctcattcagcaactttatgtttcacaatgactcaatgatgctttatttatattgtttgtactgtaattaaaaccattgacagacatttcactttgcttgttatttcatatgatcttgttttgattaaatatgccagtttgtattttcctgccttgggatttttttgtgtccgctgtacagtattctaagggaaaaagaaaaagaaagatgtgtaaagtaacagagagaggtggctatggtgtagagacctctttctaataaagaaatgaaaatatgtctacaccgct

SEQ ID NO: 108544 - DNA, 2478 bp, Homo sapiens
  Payload ID: 1325
  Gene Symbol: AGAP1
  Gene Name: ArfGAP with GTPase domain, ankyrin repeat and PH domain 1
  ENST ID: ENST00000635100
  CDS Start-End: 1-327
cagctggccaactcggctgccatccgggccgagatccagcgcttcgagtcggtccaccccaacatctactccatctacgagctgctggagcgcgtggaggagccggtgctgcagaaccagatccgggagcacgtcatcgccatcgaagatgccttcgtgaacagccaggaatggacgctgagtcgatctgtcccggagctcaaagtgggaattgtgggtaacttggccagcggcaagtctgccctggtgcaccggtacctgacgggcacatatgtccaggaggaatatggatgcaggtggcaggttcaagaaagagattgtcgttgatggacagagctatctgctgctgatcagagatgaagggggccccccggaggcgcagtttgccatgtgggtggacgctgttatatttgtcttcagcttggaggatgaaataagtttccagaccgtttaccactactacagtcgaatggccaactatcggaacacgagcgagattcctctggttctggtgggaacccaggatgccataagttctgctaacccgagggtcatcgatgacgccagggcgaggaagctctccaacgacctgaaacggtgcacgtactacgagacgtgtgctacatacgggctgaatgtggagagggtcttccaggacgttgcccagaagattgttgccacaaggaagaagcagcagctgtccataggaccctgcaagtcgctacctaattctcccagccattcctccgtctgttccgcgcaggtgtctgccgtgcacatcagccagacaagtaatggaggtgggagtttaagcgactattcctcctccgttccatcgactcccagcaccagccagaaggaacttcggatcgatgttcctcccactgccaacacgcccacgcccgttcgcaagcagtctaagcgccggtccaacctgttcacctctcggaaagggagcgacccagacaaagagaagaaaggcctggagagtcgtgcggacagcattgggagcggccgagccatcccaattaaacagggcatgctgttgaagcgaagtggcaaatcgttgaataaagagtggaaaaagaaatatgtcaccctgtgtgacaatggcgtgctgacctatcatcccagtttacatgattacatgcagaatgttcatggtaaggagattgaccttctgagaaccactgtgaaagtcccagggaagaggccaccccgagccacgtcagcctgcgcacccatctccagccctaaaaccaatggcctatccaaggacatgagcagtttacacatctcacccaattcagacacagggctgggtgactccgtatgctccagccccagtatctccagcaccaccagccccaagctcgacccgcccccctcccctcacgccaacagaaagaagcaccgaaggaagaaaagcactagcaacttcaaagccgacggcctgtccggcactgctgaagaacaagaagaaaattttgagtttatcattgtgtccctcactggccaaacatggcactttgaagccacgacgtatgaggagcgggacgcctgggtccaagccatcgagagccagatcctggccagcctgcagtcgtgcgagagcagcaagaacaagtcccggctgacgagccagagcgaggccatggccctgcagtcgatccggaacatgcgcgggaactcccactgtgtggactgcgagacccagaatcccaactgggccagtttgaacttgggagccctcatgtgcatcgaatgctcagggatccaccggaatcttggcacccacctttcccgagtccgatctctggacctggatgactggccagtcgagctcatcaaggtgatgtcatccatcgggaacgagctagccaacagcgtctgggaagagagcagccaggggcggacgaaaccatcggtagactccacaagggaagagaaggaacggtggatccgtgccaagtacgagcagaagctcttcctggccccgctgccctgcacggagctgtccctgggccagcacctgctgcgggccaccgccgacgaggacctgcggacggccatcctgctgctggcacacggctcccgggacgaggtgaacgagacctgcggggagggagacggccgcacggcgctgcatctggcctgccgcaaggggaatgtggtcctggcgcagctcctgatctggtacggagtggacgtcacggcccgagatgcccacgggaacacagctctggcctacgcccggcaggcctccagccaggagtgcatcgacgtgctgctgcagtacggctgccccgacgagcgcttcgtgctcatggccacccctaacctgtccaggagaaacaataaccggaacaacagcagtgggagggtgcccaccatcatctgaggaacagccgtgcccgcctgctcgccgcacctgggacgcggcagcctcgccgcattctcgctcagaagtcgcagcac

SEQ ID NO: 108545 - DNA, 5388 bp, Homo sapiens
  Payload ID: 1326
  Gene Symbol: AGAP2
  Gene Name: ArfGAP with GTPase domain, ankyrin repeat and PH domain 2
  Uniprot ID: Q99490
  ENST ID: ENST00000257897
  CDS Start-End: 87-2597
ggggccttctgaggtttgggggctgtagggccatgggcctcagggccagaggtggttgttagcctggcaagacaggtctgggcaacatgcatgcccagaggcagttcgttgtagctgcagtgagagcagaagtcagacgacatgaggtggccaagcaggctctaaaccgcctcaggaagctggcagagagggtggacgaccccgaactccaggacagcatccaggcctcattggacagcattcgagaggctgtgatcaatagccaggaatggactttgagccgctccattcctgaactgcgcctgggtgtgctgggcgatgccaggagtgggaagtcatcgctcatccaccgattcctgactggctcataccaggtgctggagaagacagagagtgagcagtacaagaaagaaatgttggtggatggacagacacatctggtgctaatccgagaggaagctggggcacctgatgccaagttctcaggctgggcagatgctgtgatcttcgtcttcagcctggaggatgagaacagtttccaggctgtgagccgtctccatgggcagctgagttcccttcgcggggagggacgaggaggcctggccttggcactggtggggacacaagacaggatcagtgcttcctcccctcgggtggtgggagatgctcgtgccagagctctgtgcgcggacatgaaacgctgcagctactatgagacttgtgcaacctatgggctcaatgtggatcgggtcttccaggaggtggcccagaaggtggtgaccttgcgcaagcagcaacagcttctggctgcctgcaagtccctgcccagctccccaagccactcagctgcatccactccggtagctggccaggctagtaacgggggccacactagcgactactcttcttccctcccgtcctcaccgaatgttggtcaccgggagctccgagccgaggcagctgcagtggctggattgagcaccccagggtccctgcaccgggcagccaagcgcaggaccagcctttttgcgaatcgtcggggtagtgactccgagaaacgaagcttggatagtcggggagagacaacagggagtgggcgagccatccccatcaaacagagcttcctactaaaacgaagtggcaattccttgaacaaagaatggaagaagaaatatgtaaccctgtccagtaatggctttctactctaccaccccagtattaacgattacatccacagtacccacggcaaggagatggacttgctgcgaacaacagtcaaagtcccgggcaagcggcccccgagggccatctctgcctttggcccctcagccagcattaacgggctcgtcaaggacatgagcactgtccagatgggtgaaggcctggaagccactactcccatgccaagccctagccccagccccagttccctgcagccaccaccagatcagacatccaaacacctgctgaagccagaccggaatttggcccgagccctcagcacggactgtaccccatctggagacctgagccccctgagtcgggaaccccctccttctcccatggtgaagaagcagaggaggaaaaaattgacaacaccatccaagactgaaggctcggctgggcaggctgaagaggaaaactttgagttcctgatcgtgtccagcacgggtcagacgtggcactttgaggcagccagttttgaggagcgggatgcctgggtccaggccatcgagagtcagatcctagccagtctgcaatgctgtgagagcagcaaggtcaagctgcgcacagacagccaaagcgaggccgtggccatccaggcgatccggaacgccaaggggaattcaatctgcgtggactgcggggcccccaaccccacgtgggccagcttgaacctgggcgccctcatctgcatcgagtgttctggcatccaccgcaacctgggcacacacctgtcccgcgttcgctcgctggacttggacgactggccacgggagctgaccctggtgctgacggctattggcaacgacacggccaaccgcgtgtgggaaagcgacacgcgaggccgtgccaagccctcgcgggactcttcgcgggaggagcgcgagtcgtggattcgcgccaagtacgagcagctactgttcctggcgccgctgagcacctcggaggagccgctgggccgccagctgtgggccgccgtgcaggcccaggacgtggctaccgttctcctgcttttggcccatgcgcgacacgggccgctcgacaccagcgtagaggacccacagctgcgctccccactccacctggcggccgagctcgcccacgtcgtcatcacgcaactgctgctgtggtacggcgcggacgtggcggcccgtgacgcccagggccgcacggcgctgttctacgcccgccaggctggaagccagctgtgcgccgacatccttctccagcacggctgcccgggtgagggcggcagcgcggccaccacgcccagcgcggccaccacgcccagcatcaccgccacgcccagcccccgccgccggagcagcgccgctagcgtgggccgcgccgacgccccggttgcgctggtatagttgcccagcgggagagacacccccatccccacgcgggccgggcacgaccacaccgggcggaccgctggacagacgcacccactcacctctccgatccgcaccccgccccacgggagcacttcctacccccacgagggcacagcccccacgccttccagaagacacaaactcacctccctctccccaacgaggcatggagaccccagctcaacacgccccctctccattgtttccacactcggattgctctgggtctacccgctcggggttcgcggaaggggaggtccccagcggtacgggctcctaggcgcttggacatgcccgcttgtgccccctaggggcggaaagaagacccggtcctgcccgagctcaacaatcccagggcgggagcccatacccaggctggctcctggggcgacgccacgccagagggagggtttagtacatgggagggctagccccgggacttggggccaatacggaaaccctaccccttccatgctcatctcactgcccagtgaagggggcaagggcagcgaggggcaggacccctgctgctcatgggggtgggggttcccaaccctttccgtgaaagggaccgtgagtagtggaaaccaggacgtcccctacacctacccatgggtggaagctaaagagtccggggggaaccaagagcctgggtccctcccactactatcttgggagggagaagggatggagcaggagcgggctaagagggctgcgggggccttgtaatttattgctttgttccccaacatggggatgggggcgggcaggggcgtggggagggcgttttggggtaggggaagcccagggtgggcagggggtgggttggggtgggggtgctctcgggttgtgtctgtgaccgtgactgcgtacctgtgactgtgcagcgcccgtggtgatctggggtagggggcacccctacagtgggacccctcccccattattctttctgtccagcccctccctcccactggagcagctccagagccattcctcacccccgtgacctctcccagccagggctgagaggattcgaggtggctgggagggtttccaggccccctgccccttccccacaaactgggtgatagggcggacttacctggcccagccctgcctccctcagccaacccagcccttgggctgtctgtgtcagtggtttccggtctttttttttttttttttttctggctaaaatagtttgcaaaggaccaggtaattggggaggggagagaggtgggggcaagggggaaatgcccccccatctccttggaggcagtggtgtgaatcttcttcaacagcaattaaagaggaagtgattttgtctagggggtgagctgctggtctgttcttggaggcaggtcagggcatggccttggtcaagatggggtactggggttggacagggacaggcagaggtgcctcccactggggctggtggcaggacagtacccatgggcatggaggtggttccatcatgtacaacagttctgggttcatgtagtggaggacgtgggcaggttggagtcagtggggaccctgggaacagagaaggcactgactcttaagatgatgccagtcctgggagagttgggatatggtacttagaggagaggacaggcccatggagaggggtgggaagatgggacagctttgtttaagagcaggaactttggagacagatctgattttgaaacctgcccctccactgcacagctaggggaccttggtggcatctgtttatctgtattctgaacagtatctgttcagagggcacctgaaaggcgctccagctctgaggagggctgccccgagccagcctgctcaccgtgagcactaggtaccagagtagaacatagagtaggggttcctcccctggcctcgtcagggggtgttccagagggaaggggtgggagacctcctgggaaagatttcccagctagctgcagaggtccctggtgtccacaaactcagtgtcagctgatgcaggcatttatccacctccgtgccatcaaagggaccaccaaggccacagcggcctgaagccggtgctgcctccatgagctgcagtgccactaggctcagcacatagccaatcctaccatttctcgagggcagctgaaagtgtttactcaggtagaggggctggacagggtagggttgggtcagcagccagtgcaggttgggcacagccatatgttgttatctaccttgaggagttagttggtagcaccagcatctttgggtagaattgcttctgacccttggtgcccaccagccccaagaggttcagctgcaagtgtgccactgaactgaggacacagcaccagacctgaatccagttcacatggaggctgcggctctacagggtcctaggctgtgaccacccagcacagcggcgtgacccaggaaaggtggattcaacagtgcaggtgcagtgacaagtacagaggcaggtgtgtggtctgggcaaagcgacaagaggggggaggtagcaaagaagattggactagaggacctggccgttcccccttcacctccaagaccctggactctcttatttcagctccactccttcctcgtggccaaagtttgctcccttcttcagaagtttgggagtgtgagagaatatgggaaggaaataaggaccctggagagaatgaaattgccttcaaagagcaagtgggaagttcctttcatttccagccagtgaaaaatggtcaaggtgtcagcaaacctcacaacaaatcccaacaccaagtaa

SEQ ID NO: 108546 - DNA, 4464 bp, Homo sapiens
  Payload ID: 1326
  Gene Symbol: AGAP2
  Gene Name: ArfGAP with GTPase domain, ankyrin repeat and PH domain 2
  ENST ID: ENST00000328568
  CDS Start-End: 1-3109
cacctcctcccggcgccccctgctcagcagcccgagctggggcggcccggagcccgaaggccgggcgggcggcggcatccctggctcatcctctccgcaccctggcaccggcagccggaggctcaaggtggcgcctcctccgccggctcccaagccttgcaagaccgtgaccacgagtggagccaaagccggcgggggcaagggcgcgggtagccgcctgtcatggcccgaaagcgagggcaagcccagggtcaaggggtcaaagagcagcgccgggactggagcttcggtctctgccgccgccaccgccgccgccgccgggggagggggctctacagcttcgacctctggtggggtcggggctggggctggagcccgagggaagttgtcccctcggaaaggcaagagtaagaccttggacaacagtgacttgcatccgggaccgcctgccggctctcctcctccgctaaccctcccaccaactccgagtccagccactgctgtcaccgctgcttccgcgcagccccccgggcctgcacctccaatcactctggagcctccagctccggggctgaaacggggccgggaggggggccgagcatccactcgtgaccgcaagatgctcaagtttatcagcggcatcttcaccaagagcacaggagggcctcctggctccgggccccttcccggaccccccagcctgtcttctggcagcgggtccagggagctgctgggcgccgagctccgcgcttcccctaaggctgtgatcaatagccaggaatggactttgagccgctccattcctgaactgcgcctgggtgtgctgggcgatgccaggagtgggaagtcatcgctcatccaccgattcctgactggctcataccaggtgctggagaagacagagagtgagcagtacaagaaagaaatgttggtggatggacagacacatctggtgctaatccgagaggaagctggggcacctgatgccaagttctcaggctgggcagatgctgtgatcttcgtcttcagcctggaggatgagaacagtttccaggctgtgagccgtctccatgggcagctgagttcccttcgcggggagggacgaggaggcctggccttggcactggtggggacacaagacaggatcagtgcttcctcccctcgggtggtgggagatgctcgtgccagagctctgtgcgcggacatgaaacgctgcagctactatgagacttgtgcaacctatgggctcaatgtggatcgggtcttccaggaggtggcccagaaggtggtgaccttgcgcaagcagcaacagcttctggctgcctgcaagtccctgcccagctccccaagccactcagctgcatccactccggtagctggccaggctagtaacgggggccacactagcgactactcttcttccctcccgtcctcaccgaatgttggtcaccgggagctccgagccgaggcagctgcagtggctggattgagcaccccagggtccctgcaccgggcagccaagcgcaggaccagcctttttgcgaatcgtcggggtagtgactccgagaaacgaagcttggatagtcggggagagacaacagggagtgggcgagccatccccatcaaacagagcttcctactaaaacgaagtggcaattccttgaacaaagaatggaagaagaaatatgtaaccctgtccagtaatggctttctactctaccaccccagtattaacgattacatccacagtacccacggcaaggagatggacttgctgcgaacaacagtcaaagtcccgggcaagcggcccccgagggccatctctgcctttggcccctcagccagcattaacgggctcgtcaaggacatgagcactgtccagatgggtgaaggcctggaagccactactcccatgccaagccctagccccagccccagttccctgcagccaccaccagatcagacatccaaacacctgctgaagccagaccggaatttggcccgagccctcagcacggactgtaccccatctggagacctgagccccctgagtcgggaaccccctccttctcccatggtgaagaagcagaggaggaaaaaattgacaacaccatccaagactgaaggctcggctgggcaggctgaagaggaaaactttgagttcctgatcgtgtccagcacgggtcagacgtggcactttgaggcagccagttttgaggagcgggatgcctgggtccaggccatcgagagtcagatcctagccagtctgcaatgctgtgagagcagcaaggtcaagctgcgcacagacagccaaagcgaggccgtggccatccaggcgatccggaacgccaaggggaattcaatctgcgtggactgcggggcccccaaccccacgtgggccagcttgaacctgggcgccctcatctgcatcgagtgttctggcatccaccgcaacctgggcacacacctgtcccgcgttcgctcgctggacttggacgactggccacgggagctgaccctggtgctgacggctattggcaacgacacggccaaccgcgtgtgggaaagcgacacgcgaggccgtgccaagccctcgcgggactcttcgcgggaggagcgcgagtcgtggattcgcgccaagtacgagcagctactgttcctggcgccgctgagcacctcggaggagccgctgggccgccagctgtgggccgccgtgcaggcccaggacgtggctaccgttctcctgcttttggcccatgcgcgacacgggccgctcgacaccagcgtagaggacccacagctgcgctccccactccacctggcggccgagctcgcccacgtcgtcatcacgcaactgctgctgtggtacggcgcggacgtggcggcccgtgacgcccagggccgcacggcgctgttctacgcccgccaggctggaagccagctgtgcgccgacatccttctccagcacggctgcccgggtgagggcggcagcgcggccaccacgcccagcgcggccaccacgcccagcatcaccgccacgcccagcccccgccgccggagcagcgccgctagcgtgggccgcgccgacgccccggttgcgctggtatagttgcccagcgggagagacacccccatccccacgcgggccgggcacgaccacaccgggcggaccgctggacagacgcacccactcacctctccgatccgcaccccgccccacgggagcacttcctacccccacgagggcacagcccccacgccttccagaagacacaaactcacctccctctccccaacgaggcatggagaccccagctcaacacgccccctctccattgtttccacactcggattgctctgggtctacccgctcggggttcgcggaaggggaggtccccagcggtacgggctcctaggcgcttggacatgcccgcttgtgccccctaggggcggaaagaagacccggtcctgcccgagctcaacaatcccagggcgggagcccatacccaggctggctcctggggcgacgccacgccagagggagggtttagtacatgggagggctagccccgggacttggggccaatacggaaaccctaccccttccatgctcatctcactgcccagtgaagggggcaagggcagcgaggggcaggacccctgctgctcatgggggtgggggttcccaaccctttccgtgaaagggaccgtgagtagtggaaaccaggacgtcccctacacctacccatgggtggaagctaaagagtccggggggaaccaagagcctgggtccctcccactactatcttgggagggagaagggatggagcaggagcgggctaagagggctgcgggggccttgtaatttattgctttgttccccaacatggggatgggggcgggcaggggcgtggggagggcgttttggggtaggggaagcccagggtgggcagggggtgggttggggtgggggtgctctcgggttgtgtctgtgaccgtgactgcgtacctgtgactgtgcagcgcccgtggtgatctggggtagggggcacccctacagtgggacccctcccccattattctttctgtccagcccctccctcccactggagcagctccagagccattcctcacccccgtgacctctcccagccagggctgagaggattcgaggtggctgggagggtttccaggccccctgccccttccccacaaactgggtgatagggcggacttacctggcccagccctgcctccctcagccaacccagcccttgggctgtctgtgtcagtggtttccggtctttttttttttttttttttctggctaaaatagtttgcaaaggaccaggtaattggggaggggagagaggtgggggcaagggggaaatgcccccccatctccttggaggcagtggtgtgaatcttcttcaacagcaattaaagaggaagtgattttgtcta

SEQ ID NO: 108547 - DNA, 608 bp, Homo sapiens
  Payload ID: 1326
  Gene Symbol: AGAP2
  Gene Name: ArfGAP with GTPase domain, ankyrin repeat and PH domain 2
  ENST ID: ENST00000549129
  CDS Start-End: 1-510
cgcaggaccagcctttttgcgaatcgtcggggtagtgactccgagaaacgaagcttggatagtcggggagagacaacagggagtgggcgagccatccccatcaaacagagcttcctactaaaacgaagtggcaattccttgaacaaagaatggaagaagaaatatgtaaccctgtccagtaatggctttctactctaccaccccagtattaacgattacatccacagtacccacggcaaggagatggacttgctgcgaacaacagtcaaagtcccgggcaagcggcccccgagggccatctctgcctttggcccctcagccagcattaacgggctcgtcaaggacatgagcactgtccagatgggtgaaggcctggaagccactactcccatgccaagccctagccccagccccagttccctgcagccaccaccagatcagacatccaaacacctgctgaagccagaccggaatttggcccgagccctcagcacgggtcagtggggatgaccttccatctgctgtcttccacacccaaataggatgagtgtgggaaatgaatatggggtgaaggcttggaggctggaataaatgcatgagtgaacaca

SEQ ID NO: 108548 - DNA, 3579 bp, Homo sapiens
  Payload ID: 1326
  Gene Symbol: AGAP2
  Gene Name: ArfGAP with GTPase domain, ankyrin repeat and PH domain 2
  ENST ID: ENST00000547588
  CDS Start-End: 1-3579
atgagccggggcgcgggcgcgcttcagcgccggacaacgacctacctcatctcgctgaccctggttaagctcgagtcggtgcctccgccgccgccttctccgtctgcggccgcggccggcgccgccggtgccagaggctccgagactggggatcctggcagcccccgaggcgcggaggagccgggcaagaagcggcacgaacgtctcttccaccggcaggatgcgctgtggatcagcacgagcagcgcgggcaccgggggcgcggagcccccagccctgtccccggctccggccagtccggcccgcccagtctcccccgctcccggccgccgcctctccctctgggccgtccctccgggacccccgctctccgggggactgagccccgaccccaagcctgggggcgcccccacctcctcccggcgccccctgctcagcagcccgagctggggcggcccggagcccgaaggccgggcgggcggcggcatccctggctcatcctctccgcaccctggcaccggcagccggaggctcaaggtggcgcctcctccgccggctcccaagccttgcaagaccgtgaccacgagtggagccaaagccggcgggggcaagggcgcgggtagccgcctgtcatggcccgaaagcgagggcaagcccagggtcaaggggtcaaagagcagcgccgggactggagcttcggtctctgccgccgccaccgccgccgccgccgggggagggggctctacagcttcgacctctggtggggtcggggctggggctggagcccgagggaagttgtcccctcggaaaggcaagagtaagaccttggacaacagtgacttgcatccgggaccgcctgccggctctcctcctccgctaaccctcccaccaactccgagtccagccactgctgtcaccgctgcttccgcgcagccccccgggcctgcacctccaatcactctggagcctccagctccggggctgaaacggggccgggaggggggccgagcatccactcgtgaccgcaagatgctcaagtttatcagcggcatcttcaccaagagcacaggagggcctcctggctccgggccccttcccggaccccccagcctgtcttctggcagcgggtccagggagctgctgggcgccgagctccgcgcttcccctaaggctgtgatcaatagccaggaatggactttgagccgctccattcctgaactgcgcctgggtgtgctgggcgatgccaggagtgggaagtcatcgctcatccaccgattcctgactggctcataccaggtgctggagaagacagagagtgagcagtacaagaaagaaatgttggtggatggacagacacatctggtgctaatccgagaggaagctggggcacctgatgccaagttctcaggctgggcagatgctgtgatcttcgtcttcagcctggaggatgagaacagtttccaggctgtgagccgtctccatgggcagctgagttcccttcgcggggagggacgaggaggcctggccttggcactggtggggacacaagacaggatcagtgcttcctcccctcgggtggtgggagatgctcgtgccagagctctgtgcgcggacatgaaacgctgcagctactatgagacttgtgcaacctatgggctcaatgtggatcgggtcttccaggaggtggcccagaaggtggtgaccttgcgcaagcagcaacagcttctggctgcctgcaagtccctgcccagctccccaagccactcagctgcatccactccggtagctggccaggctagtaacgggggccacactagcgactactcttcttccctcccgtcctcaccgaatgttggtcaccgggagctccgagccgaggcagctgcagtggctggattgagcaccccagggtccctgcaccgggcagccaagcgcaggaccagcctttttgcgaatcgtcggggtagtgactccgagaaacgaagcttggatagtcggggagagacaacagggagtgggcgagccatccccatcaaacagagcttcctactaaaacgaagtggcaattccttgaacaaagaatggaagaagaaatatgtaaccctgtccagtaatggctttctactctaccaccccagtattaacgattacatccacagtacccacggcaaggagatggacttgctgcgaacaacagtcaaagtcccgggcaagcggcccccgagggccatctctgcctttggcccctcagccagcattaacgggctcgtcaaggacatgagcactgtccagatgggtgaaggcctggaagccactactcccatgccaagccctagccccagccccagttccctgcagccaccaccagatcagacatccaaacacctgctgaagccagaccggaatttggcccgagccctcagcacggactgtaccccatctggagacctgagccccctgagtcgggaaccccctccttctcccatggtgaagaagcagaggaggaaaaaattgacaacaccatccaagactgaaggctcggctgggcaggctgaagccaagcgcaaaatgtggaaactaaaatcctttggtagtttaagaaatatttataaagcagaggaaaactttgagttcctgatcgtgtccagcacgggtcagacgtggcactttgaggcagccagttttgaggagcgggatgcctgggtccaggccatcgagagtcagatcctagccagtctgcaatgctgtgagagcagcaaggtcaagctgcgcacagacagccaaagcgaggccgtggccatccaggcgatccggaacgccaaggggaattcaatctgcgtggactgcggggcccccaaccccacgtgggccagcttgaacctgggcgccctcatctgcatcgagtgttctggcatccaccgcaacctgggcacacacctgtcccgcgttcgctcgctggacttggacgactggccacgggagctgaccctggtgctgacggctattggcaacgacacggccaaccgcgtgtgggaaagcgacacgcgaggccgtgccaagccctcgcgggactcttcgcgggaggagcgcgagtcgtggattcgcgccaagtacgagcagctactgttcctggcgccgctgagcacctcggaggagccgctgggccgccagctgtgggccgccgtgcaggcccaggacgtggctaccgttctcctgcttttggcccatgcgcgacacgggccgctcgacaccagcgtagaggacccacagctgcgctccccactccacctggcggccgagctcgcccacgtcgtcatcacgcaactgctgctgtggtacggcgcggacgtggcggcccgtgacgcccagggccgcacggcgctgttctacgcccgccaggctggaagccagctgtgcgccgacatccttctccagcacggctgcccgggtgagggcggcagcgcggccaccacgcccagcgcggccaccacgcccagcatcaccgccacgcccagcccccgccgccggagcagcgccgctagcgtgggccgcgccgacgccccggttgcgctggtatag

SEQ ID NO: 108549 - DNA, 2675 bp, Homo sapiens
  Payload ID: 1327
  Gene Symbol: AGAP3
  Gene Name: ArfGAP with GTPase domain, ankyrin repeat and PH domain 3
  ENST ID: ENST00000335367
  CDS Start-End: 94-1824
gccggaggtccgtgcgccccggccgcggccccggcccgggcccagccccgtgcccctcgccatgggcctggcccgcgcccgccggccctgagcatggagcggggctggccgcagggggacagctgtcccggggagcggcccgccgcttgccgccgcgcccacagcgtctgcgactcgctggacctgcacggcgcctcggccggccgcgctgccgccgccctgcaggccgccctctgcgccgccagtgagcagccggcgcggccgcggagcgtgtgctcgggcggcccggagccgccgcccaccggcgcccgcggccttttgctcggcctcctgcgcccgcgcctcggccgccggggcctggcgccctcgggaccgcccgtctcgcctgcgcccagccccgcgtccagccccgcgccgacccggcgcagccgcacccgcggggagccgactccgcggccccggccggccagcatgactttcctggaggtgaaccgcctggagctggcggccgccgaggcgccgggcgcgggtctggggcgcgcgggcagcgcgggcttcctgcgcggcgcggcgttgtggagcagccagcgctggccagtgctgcgcggcgggcgcgggccggaggggccccggcgcggcctggcggcgctcaggaagagcttcagcttccgcctgcgccgcggccaggaggtgcggcgctccgagtcagggctgctggcccggccgccgcgcgcgcgcacccgtagcgacggcgacgccggctccctaggcgccttccccagccgccgcgacctgctgggctccgacgccccgcgcgcagcgccggagcccggccgcccccgcaccgccgccggcctctggaggctgctcacgagccgcttccgccggagggagcccgcgcccgccgcgccgctgtggggccgtcgggcggctgcggccccggagctcctgcgcgcgcccagcgactcgtttgtgaacagccaggagtggacgctgagccgctccgtaccggagcttaaagtgggcatagtggggaacctgtctagcgggaagtcagccctggtgcaccgctatctgacggggacctatgtccaggaggagtcccctgaaggggggcggtttaagaaggagattgtggtggatggccagagttacctgctgctgatccgagatgaaggaggcccccctgagctccagtttgctgcctgggtggatgcagtggtgtttgtgttcagcctggaggatgaaatcagtttccagacggtgtacaactacttcctgcgtctctgcagcttccgcaacgccagcgaggtgcccatggtgcttgtgggcacgcaggatgccatcagcgctgcgaatccccgggttatcgacgacagcagagcccgcaagctctccacagatctgaagcggtgcacctactatgagacgtgcgcgacctacgggctcaatgtggagcgtgtcttccaggacgtggcccagaaggtagtggccttgcgaaagaagcagcaactggccatcgggccctgcaagtcactgcccaactcgcccagccactcggccgtgtccgccgcctccatcccggccgtgcacatcaaccaggccacgaatggcggcggcagcgccttcagcgactactcgtcctcagtcccctccacccccagcatcagccagcgggagctgcgcatcgagaccatcgctgcctcctccacccccacacccatccgaaagcagtccaagcggcgctccaacatcttcacgatatgtgccactgtttccaacttttcatcaacaaaaaggcctttccaactccttccaaattagaagaccagttggtgacacacagcacctctggacatgccccctgtgcggggccggaggcgggccgggccctgggactgctctcagatgagaagcggccgccgagctccccactccagagacccacgggaacctttgtaactaaccccacccccagggaaggctaggagcgccggagcccgcgctgggggctgccggggaccaggcccggccggacgctgcaggctcgctgcatggagaagaaggcagctcggccccacgcccggcgctggccagcgcgacgaggcccagaggggcgggggagtccaagcccgcccggcccggctgctcctggggggcgctttcctgcccctcccctcctctgctccttcctgcatggacctctgccgttcctgctcctgctccggaagccgccgccgccgccgcgcttgccttgccccctctttttggcctccccctatttcctaggatccgcattcgggtggactctgccccaggagcttgacagggtgcagggcctcttctggcctctctcctctctctgtccatccactgtgccccttgggccacgccgacgcgctcggtgccacgtgccgtgtggtgtctgtgccgcagacgggccatctgcccgctcacttgtggactttgcgctcccggttgtcgcgccctgtgctcccgaccagcagccccaccgtccacctcctcgcccccgcttctcttacgcccccgccccgggcgtgctcctcgcgccctcggcctctctgtccttgctcttttgtaaggggcgggcccggctcagtgacctgtgctgctctgtatggtgccgtgtgtaagaataaacccgttggaatact

SEQ ID NO: 108550 - DNA, 3225 bp, Homo sapiens
  Payload ID: 1327
  Gene Symbol: AGAP3
  Gene Name: ArfGAP with GTPase domain, ankyrin repeat and PH domain 3
  Uniprot ID: Q96P47
  ENST ID: ENST00000397238
  CDS Start-End: 1-2736
atgaacttccaggcgggcggggggcagagcccgcagcagcagcagagcctggcggctccggggggcggcggcgctgccgcgcagcagctcgtctgcggcgggcagttcggcggcgcggggcccggggccgggggcggcggcggcccctcgcagcagctggccggcgggcccccccagcagttcgcgctctccaactccgcggccatccgggccgagatccagcgcttcgagtccgtgcatcccaatatctacgccatctacgacctgatcgagcgcatcgaggatttggcgctgcagaaccagatccgggagcacgtcatctccatcgaggactcgtttgtgaacagccaggagtggacgctgagccgctccgtaccggagcttaaagtgggcatagtggggaacctgtctagcgggaagtcagccctggtgcaccgctatctgacggggacctatgtccaggaggagtcccctgaaggggggcggtttaagaaggagattgtggtggatggccagagttacctgctgctgatccgagatgaaggaggcccccctgagctccagtttgctgcctgggtggatgcagtggtgtttgtgttcagcctggaggatgaaatcagtttccagacggtgtacaactacttcctgcgtctctgcagcttccgcaacgccagcgaggtgcccatggtgcttgtgggcacgcaggatgccatcagcgctgcgaatccccgggttatcgacgacagcagagcccgcaagctctccacagatctgaagcggtgcacctactatgagacgtgcgcgacctacgggctcaatgtggagcgtgtcttccaggacgtggcccagaaggtagtggccttgcgaaagaagcagcaactggccatcgggccctgcaagtcactgcccaactcgcccagccactcggccgtgtccgccgcctccatcccggccgtgcacatcaaccaggccacgaatggcggcggcagcgccttcagcgactactcgtcctcagtcccctccacccccagcatcagccagcgggagctgcgcatcgagaccatcgctgcctcctccacccccacacccatccgaaagcagtccaagcggcgctccaacatcttcacgtctcggaagggtgctgacctggaccgggagaagaaggctgccgagtgcaaggtggacagcatcgggagcggccgcgccatccccatcaagcaggggatcctgctaaagcggagcggcaagtccctgaacaaggagtggaagaagaagtatgtgacgctctgtgacaacgggctgctcacctatcaccccagcctgcatgattacatgcagaacatccacggcaaggagattgacctgctgcggacaacggtgaaagtgccagggaagcgcctgccccgagccacacctgccacagccccgggcaccagcccccgtgccaacgggctgtccgtggagcggagtaacacacagctgggtgggggcacaggtgccccccactcggccagcagcgcatccctgcactctgagcgccccctcagcagctcggcctgggctggcccgcgccctgaggggctgcaccagcgctcctgctccgtttccagcgccgaccagtggagtgaggccaccacttccctgcccccaggcatgcagcaccctgccagtggcccagctgaggtactcagttccagccccaagctggatcctcccccatctccccactccaaccggaagaagcaccggaggaaaaagagcaccgggaccccccgaccagacggccccagcagtgctactgaagaggcagaggagtcgtttgaatttgtggtggtgtccctcactgggcagacgtggcacttcgaggcttcaacggcggaggagcgggagctgtgggttcagagtgtgcaggcccagatccttgccagcctgcaaggctgccgcagtgccaaggacaagactcgactggggaaccagaacgcagctctggctgtgcaggccgtccgcaccgtccgcggcaacagcttttgtatcgactgcgatgcacccaatccagactgggccagcctgaacctgggtgccctgatgtgcattgagtgctcaggcatccaccgacacctgggggctcacctgtcccgggtgcgctcccttgacctcgatgactggccgcctgagctgctggctgtcatgactgccatgggcaatgccctcgccaacagcgtctgggagggggccttgggtggctactccaagccagggcctgatgcctgcagagaggagaaggaacgctggatacgggccaagtatgaacagaagctcttcctggccccactgccaagctcagatgtgccactggggcagcagctgctccgggccgtggtggaagatgacctgcggctgttggtgatgctcctggcacatggctccaaagaggaggtgaatgagacctatggggacggggacgggcggacggctctacatctctccagtgccatggccaacgttgtcttcacgcagctgctcatctggtacggggtggacgtgaggagccgggacgcccggggcctgactccactggcatatgctcgccgggccggcagccaggagtgtgcagacatcttgatccagcatggctgccctggggagggctgtggcttagcgcctacccccaacagagagcctgccaatggcaccaacccctctgctgagctgcaccgtagtcctagcctcctataaggcccaggaagagggcagaggggccagaaggactccatggcccaaagaccctcctccctgcaggcactgtgggaacagacacagagatggagaagcagggacatgctgagaggacgaagccaaggaaattagggaggagagtcaaagggatcaaggagagttggggatttgagctgcagcagagagggatgagggatttagccctctgccctaaggtgccattgaaaagggacaggacccttcggaggtgcctgtgaggagaggggagcaggacctctccctcctccagatccctgcctcctagtgccagcccctcacacgccttcatcctgaaacaggaagaggacggcaccaagttgggggtgctggatgaaagagacgaggggtgatctgtgagtcccatgtaaactttgtacattggaatatttatgtttgtgtacatatttgatgtgtgtgtgtatgatgagccaataaaccagactgtgtgcg

SEQ ID NO: 108551 - DNA, 582 bp, Homo sapiens
  Payload ID: 1327
  Gene Symbol: AGAP3
  Gene Name: ArfGAP with GTPase domain, ankyrin repeat and PH domain 3
  ENST ID: ENST00000469901
  CDS Start-End: 1-582
tcgagggtgagcggagccgggggctgcgggagccggggcgcagtggcctctccggcgccggccgagggctccacaggccgtgcctggccatgctctccctgtcgggggtccttgcgcgcttgaggaccaggccacgagactcgtttgtgaacagccaggagtggacgctgagccgctccgtaccggagcttaaagtgggcatagtggggaacctgtctagcgggaagtcagccctggtgcaccgctatctgacggggacctatgtccaggaggagtcccctgaaggggggcggtttaagaaggagattgtggtggatggccagagttacctgctgctgatccgagatgaaggaggcccccctgagctccagtttgctgcctgggtggatgcagtggtgtttgtgttcagcctggaggatgaaatcagtttccagacggtgtacaactacttcctgcgtctctgcagcttccgcaacgccagcgaggtgcccatggtgcttgtgggcacgcaggatgccatcagcgctgcgaatccccgggttatcgacgacagcagagcccgcaagctctccacagatctga

SEQ ID NO: 108552 - DNA, 1707 bp, Homo sapiens
  Payload ID: 1327
  Gene Symbol: AGAP3
  Gene Name: ArfGAP with GTPase domain, ankyrin repeat and PH domain 3
  ENST ID: ENST00000461065
  CDS Start-End: 1-1214
aggagattgacctgctgcggacaacggtgaaagtgccagggaagcgcctgccccgagccacacctgccacagccccgggcaccagcccccgtgccaacgggctgtccgtggagcggagtaacacacagctgggtgggggcacagccagtggcccagctgaggtactcagttccagccccaagctggatcctcccccatctccccactccaaccggaagaagcaccggaggaaaaagagcaccgggaccccccgaccagacggccccagcagtgctactgaagaggcagaggagtcgtttgaatttgtggtggtgtccctcactgggcagacgtggcacttcgaggcttcaacggcggaggagcgggagctgtgggttcagagtgtgcaggcccagatccttgccagcctgcaaggctgccgcagtgccaaggacaagactcgactggggaaccagaacgcagctctggctgtgcaggccgtccgcaccgtccgcggcaacagcttttgtatcgactgcgatgcacccaatccagactgggccagcctgaacctgggtgccctgatgtgcattgagtgctcaggcatccaccgacacctgggggctcacctgtcccgggtgcgctcccttgacctcgatgactggccgcctgagctgctggctgtcatgactgccatgggcaatgccctcgccaacagcgtctgggagggggccttgggtggctactccaagccagggcctgatgcctgcagagaggagaaggaacgctggatacgggccaagtatgaacagaagctcttcctggccccactgccaagctcagatgtgccactggggcagcagctgctccgggccgtggtggaagatgacctgcggctgttggtgatgctcctggcacatggctccaaagaggaggtgaatgagacctatggggacggggacgggcggacggctctacatctctccagtgccatggccaacgttgtcttcacgcagctgctcatctggtacggggtggacgtgaggagccgggacgcccggggcctgactccactggcatatgctcgccgggccggcagccaggagtgtgcagacatcttgatccagcatggctgccctggggagggctgtggcttagcgcctacccccaacagagagcctgccaatggcaccaacccctctgctgagctgcaccgtagtcctagcctcctataaggcccaggaagagggcagaggggccagaaggactccatggcccaaagaccctcctccctgcaggcactgtgggaacagacacagagatggagaagcagggacatgctgagaggacgaagccaaggaaattagggaggagagtcaaagggatcaaggagagttggggatttgagctgcagcagagagggatgagggatttagccctctgccctaaggtgccattgaaaagggacaggacccttcggaggtgcctgtgaggagaggggagcaggacctctccctcctccagatccctgcctcctagtgccagcccctcacacgccttcatcctgaaacaggaagaggacggcaccaagttgggggtgctggatgaaagagacgaggggtgatctgtgagtcccatgtaaactttgtacattggaatatttatgtttgtgtacatatttgatgtgtgtgtgtatgatgagccaataaaccagactgtgtgcgtggc

SEQ ID NO: 108553 - DNA, 2730 bp, Homo sapiens
  Payload ID: 1327
  Gene Symbol: AGAP3
  Gene Name: ArfGAP with GTPase domain, ankyrin repeat and PH domain 3
  Uniprot ID: Q96P47
  ENST ID: ENST00000463381
  CDS Start-End: 497-2239
cttttaggagagcactgctgcagccggcagtggagagcctgggcagggagacagggagaaaactccggcagcagggtggtctctagggctgacctcggagcctggggacaggggagcctatgccgcactgaaggcgggacgctactcgtttgtgaacagccaggagtggacgctgagccgctccgtaccggagcttaaagtgggcatagtggggaacctgtctagcgggaagtcagccctggtgcaccgctatctgacggggacctatgtccaggaggagtcccctgaaggggggcggtttaagaaggagattgtggtggatggccagagttacctgctgctgatccgagatgaaggaggcccccctgagctccagtttgctgcctgggtggatgcagtggtgtttgtgttcagcctggaggatgaaatcagtttccagacggtgtacaactacttcctgcgtctctgcagcttccgcaacgccagcgaggtgcccatggtgcttgtgggcacgcaggatgccatcagcgctgcgaatccccgggttatcgacgacagcagagcccgcaagctctccacagatctgaagcggtgcacctactatgagacgtgcgcgacctacgggctcaatgtggagcgtgtcttccaggacgtggcccagaaggtagtggccttgcgaaagaagcagcaactggccatcgggccctgcaagtcactgcccaactcgcccagccactcggccgtgtccgccgcctccatcccggccgtgcacatcaaccaggccacgaatggcggcggcagcgccttcagcgactactcgtcctcagtcccctccacccccagcatcagccagcgggagctgcgcatcgagaccatcgctgcctcctccacccccacacccatccgaaagcagtccaagcggcgctccaacatcttcacgtctcggaagggtgctgacctggaccgggagaagaaggctgccgagtgcaaggtggacagcatcgggagcggccgcgccatccccatcaagcaggggatcctgctaaagcggagcggcaagtccctgaacaaggagtggaagaagaagtatgtgacgctctgtgacaacgggctgctcacctatcaccccagcctgcatgattacatgcagaacatccacggcaaggagattgacctgctgcggacaacggtgaaagtgccagggaagcgcctgccccgagccacacctgccacagccccgggcaccagcccccgtgccaacgggctgtccgtggagcggagtaacacacagctgggtgggggcacagaggcagaggagtcgtttgaatttgtggtggtgtccctcactgggcagacgtggcacttcgaggcttcaacggcggaggagcgggagctgtgggttcagagtgtgcaggcccagatccttgccagcctgcaaggctgccgcagtgccaaggacaagactcgactggggaaccagaacgcagctctggctgtgcaggccgtccgcaccgtccgcggcaacagcttttgtatcgactgcgatgcacccaatccagactgggccagcctgaacctgggtgccctgatgtgcattgagtgctcaggcatccaccgacacctgggggctcacctgtcccgggtgcgctcccttgacctcgatgactggccgcctgagctgctggctgtcatgactgccatgggcaatgccctcgccaacagcgtctgggagggggccttgggtggctactccaagccagggcctgatgcctgcagagaggagaaggaacgctggatacgggccaagtatgaacagaagctcttcctggccccactgccaagctcagatgtgccactggggcagcagctgctccgggccgtggtggaagatgacctgcggctgttggtgatgctcctggcacatggctccaaagaggaggtgaatgagacctatggggacggggacgggcggacggctctacatctctccagtgccatggccaacgttgtcttcacgcagctgctcatctggtacggggtggacgtgaggagccgggacgcccggggcctgactccactggcatatgctcgccgggccggcagccaggagtgtgcagacatcttgatccagcatggctgccctggggagggctgtggcttagcgcctacccccaacagagagcctgccaatggcaccaacccctctgctgagctgcaccgtagtcctagcctcctataaggcccaggaagagggcagaggggccagaaggactccatggcccaaagaccctcctccctgcaggcactgtgggaacagacacagagatggagaagcagggacatgctgagaggacgaagccaaggaaattagggaggagagtcaaagggatcaaggagagttggggatttgagctgcagcagagagggatgagggatttagccctctgccctaaggtgccattgaaaagggacaggacccttcggaggtgcctgtgaggagaggggagcaggacctctccctcctccagatccctgcctcctagtgccagcccctcacacgccttcatcctgaaacaggaagaggacggcaccaagttgggggtgctggatgaaagagacgaggggtgatctgtgagtcccatgtaaactttgtacattggaatatttatgtttgtgtacatatttgatgtgtgtgtgtatgatgagccaataaaccagactgtgtgcgtg

SEQ ID NO: 108554 - DNA, 1881 bp, Homo sapiens
  Payload ID: 1327
  Gene Symbol: AGAP3
  Gene Name: ArfGAP with GTPase domain, ankyrin repeat and PH domain 3
  ENST ID: ENST00000479901
  CDS Start-End: 1-1032
atgaacttccaggcgggcggggggcagagcccgcagcagcagcagagcctggcggctccggggggcggcggcgctgccgcgcagcagctcgtctgcggcgggcagttcggcggcgcggggcccggggccgggggcggcggcggcccctcgcagcagctggccggcgggcccccccagcagttcgcgctctccaactccgcggccatccgggccgagatccagcgcttcgagtccgtgcatcccaatatctacgccatctacgacctgatcgagcgcatcgaggatttggcgctgcagaaccagatccgggagcacgtcatctccatcgaggactcgtttgtgaacagccaggagtggacgctgagccgctccgtaccggagcttaaagtgggcatagtggggaacctgtctagcgggaagtcagccctggtgcaccgctatctgacggggacctatgtccaggaggagtcccctgaaggggggcggtttaagaaggagattgtggtggatggccagagttacctgctgctgatccgagatgaaggaggcccccctgagctccagtttgctgcctgggtggatgcagtggtgtttgtgttcagcctggaggatgaaatcagtttccagacggtgtacaactacttcctgcgtctctgcagcttccgcaacgccagcgaggtgcccatggtgcttgtgggcacgcaggatgccatcagcgctgcgaatccccgggttatcgacgacagcagagcccgcaagctctccacagatctgaagcggtgcacctactatgagacgtgcgcgacctacgggctcaatgtggagcgtgtcttccaggacgtggcccagaaggtagtggccttgcgaaagaagcagcaactggccatcgggccctgcaagtcactgcccaactcgcccagccactcggccgtgtccgccgcctccatcccggccgtgcacatcaaccagatatgtgccactgtttccaacttttcatcaacaaaaaggcctttccaactccttccaaattagaagaccagttggtgacacacagcacctctggacatgccccctgtgcggggccggaggcgggccgggccctgggactgctctcagatgagaagcggccgccgagctccccactccagagacccacgggaacctttgtaactaaccccacccccagggaaggctaggagcgccggagcccgcgctgggggctgccggggaccaggcccggccggacgctgcaggctcgctgcatggagaagaaggcagctcggccccacgcccggcgctggccagcgcgacgaggcccagaggggcgggggagtccaagcccgcccggcccggctgctcctggggggcgctttcctgcccctcccctcctctgctccttcctgcatggacctctgccgttcctgctcctgctccggaagccgccgccgccgccgcgcttgccttgccccctctttttggcctccccctatttcctaggatccgcattcgggtggactctgccccaggagcttgacagggtgcagggcctcttctggcctctctcctctctctgtccatccactgtgccccttgggccacgccgacgcgctcggtgccacgtgccgtgtggtgtctgtgccgcagacgggccatctgcccgctcacttgtggactttgcgctcccggttgtcgcgccctgtgctcccgaccagcagccccaccgtccacctcctcgcccccgcttctcttacgcccccgccccgggcgtgctcctcgcgccctcggcctctctgtccttgctcttttgtaaggggcgggcccggctcagtgacctgtgctgctctgtatggtgccgtgtgtaagaataaacccgttggaata

SEQ ID NO: 108555 - DNA, 540 bp, Homo sapiens
  Payload ID: 1327
  Gene Symbol: AGAP3
  Gene Name: ArfGAP with GTPase domain, ankyrin repeat and PH domain 3
  ENST ID: ENST00000468796
  CDS Start-End: 1-534
gatgccatcagcgctgcgaatccccgggttatcgacgacagcagagcccgcaagctctccacagatctgaagcggtgcacctactatgagacgtgcgcgacctacgggctcaatgtggagcgtgtcttccaggacgtggcccagaaggtagtggccttgcgaaagaagcagcaactggccatcgggccctgcaagtcactgcccaactcgcccagccactcggccgtgtccgccgcctccatcccggccgtgcacatcaaccaggccacgaatggcggcggcagcgccttcagcgactactcgtcctcagtcccctccacccccagcatcagccagcgggagctgcgcatcgagaccatcgctgcctcctccacccccacacccatccgaaagcagtccaagcggcgctccaacatcttcacgctaatgaaccggcggccggaaggctgtttgcccaaggcgacacagaggatatgtgccactgtttccaacttttcatcaacaaaaaggcctttccaactccttccaaattagaagacc

SEQ ID NO: 108556 - DNA, 2039 bp, Homo sapiens
  Payload ID: 1327
  Gene Symbol: AGAP3
  Gene Name: ArfGAP with GTPase domain, ankyrin repeat and PH domain 3
  Uniprot ID: Q96P47
  ENST ID: ENST00000473312
  CDS Start-End: 1-1191
atgaacttccaggcgggcggggggcagagcccgcagcagcagcagagcctggcggctccggggggcggcggcgctgccgcgcagcagctcgtctgcggcgggcagttcggcggcgcggggcccggggccgggggcggcggcggcccctcgcagcagctggccggcgggcccccccagcagttcgcgctctccaactccgcggccatccgggccgagatccagcgcttcgagtccgtgcatcccaatatctacgccatctacgacctgatcgagcgcatcgaggatttggcgctgcagaaccagatccgggagcacgtcatctccatcgaggactcgtttgtgaacagccaggagtggacgctgagccgctccgtaccggagcttaaagtgggcatagtggggaacctgtctagcgggaagtcagccctggtgcaccgctatctgacggggacctatgtccaggaggagtcccctgaaggggggcggtttaagaaggagattgtggtggatggccagagttacctgctgctgatccgagatgaaggaggcccccctgagctccagtttgctgcctgggtggatgcagtggtgtttgtgttcagcctggaggatgaaatcagtttccagacggtgtacaactacttcctgcgtctctgcagcttccgcaacgccagcgaggtgcccatggtgcttgtgggcacgcaggatgccatcagcgctgcgaatccccgggttatcgacgacagcagagcccgcaagctctccacagatctgaagcggtgcacctactatgagacgtgcgcgacctacgggctcaatgtggagcgtgtcttccaggacgtggcccagaaggtagtggccttgcgaaagaagcagcaactggccatcgggccctgcaagtcactgcccaactcgcccagccactcggccgtgtccgccgcctccatcccggccgtgcacatcaaccaggccacgaatggcggcggcagcgccttcagcgactactcgtcctcagtcccctccacccccagcatcagccagcgggagctgcgcatcgagaccatcgctgcctcctccacccccacacccatccgaaagcagtccaagcggcgctccaacatcttcacgatatgtgccactgtttccaacttttcatcaacaaaaaggcctttccaactccttccaaattagaagaccagttggtgacacacagcacctctggacatgccccctgtgcggggccggaggcgggccgggccctgggactgctctcagatgagaagcggccgccgagctccccactccagagacccacgggaacctttgtaactaaccccacccccagggaaggctaggagcgccggagcccgcgctgggggctgccggggaccaggcccggccggacgctgcaggctcgctgcatggagaagaaggcagctcggccccacgcccggcgctggccagcgcgacgaggcccagaggggcgggggagtccaagcccgcccggcccggctgctcctggggggcgctttcctgcccctcccctcctctgctccttcctgcatggacctctgccgttcctgctcctgctccggaagccgccgccgccgccgcgcttgccttgccccctctttttggcctccccctatttcctaggatccgcattcgggtggactctgccccaggagcttgacagggtgcagggcctcttctggcctctctcctctctctgtccatccactgtgccccttgggccacgccgacgcgctcggtgccacgtgccgtgtggtgtctgtgccgcagacgggccatctgcccgctcacttgtggactttgcgctcccggttgtcgcgccctgtgctcccgaccagcagccccaccgtccacctcctcgcccccgcttctcttacgcccccgccccgggcgtgctcctcgcgccctcggcctctctgtccttgctcttttgtaaggggcgggcccggctcagtgacctgtgctgctctgtatggtgccgtgtgtaagaataaacccgttggaat

SEQ ID NO: 108557 - DNA, 826 bp, Homo sapiens
  Payload ID: 1327
  Gene Symbol: AGAP3
  Gene Name: ArfGAP with GTPase domain, ankyrin repeat and PH domain 3
  ENST ID: ENST00000467724
  CDS Start-End: 1-512
ccatggtgcttgtgggcacgcaggatgccatcagcgctgcgaatccccgggttatcgacgacagcagagcccgcaagctctccacagatctgaagcggtgcacctactatgagacgtgcgcgacctacgggctcaatgtggagcgtgtcttccaggacgtggcccagaaggtagtggccttgcgaaagaagcagcaactggccatcgggccctgcaagtcactgcccaactcgcccagccactcggccgtgtccgccgcctccatcccggccgtgcacatcaaccaggccacgaatggcggcggcagcgccttcagcgactactcgtcctcagtcccctccacccccagcatcagccagcgggagctgcgcatcgagaccatcgctgcctcctccacccccacacccatccgaaagcagtccaagcggcgctccaacatcttcacgctaatgaaccggcggccggaaggctgtttgcccaaggcgacacagagggttagctggcccagctagagtcagagcccaggcctccccgtcgccttccggctctttttccgttaccccactgccgaggggaaaattcatgctttccacccaccgctgtgattggtttaacaaaggcttagccatcttttcctgggcttcaccacgctgcctcgttcctccctctcagatatgtgccactgtttccaacttttcatcaacaaaaaggcctttccaactccttccaaattagaagaccagttggtgacacacagcacctctggacatgccccctgtgcggggccggaggcgggccgggccctgggactgctctcagatgagaa

SEQ ID NO: 108558 - DNA, 3121 bp, Homo sapiens
  Payload ID: 1327
  Gene Symbol: AGAP3
  Gene Name: ArfGAP with GTPase domain, ankyrin repeat and PH domain 3
  Uniprot ID: Q96P47
  ENST ID: ENST00000622464
  CDS Start-End: 1-2628
atgaacttccaggcgggcggggggcagagcccgcagcagcagcagcagctggccggcgggcccccccagcagttcgcgctctccaactccgcggccatccgggccgagatccagcgcttcgagtccgtgcatcccaatatctacgccatctacgacctgatcgagcgcatcgaggatttggcgctgcagaaccagatccgggagcacgtcatctccatcgaggactcgtttgtgaacagccaggagtggacgctgagccgctccgtaccggagcttaaagtgggcatagtggggaacctgtctagcgggaagtcagccctggtgcaccgctatctgacggggacctatgtccaggaggagtcccctgaaggggggcggtttaagaaggagattgtggtggatggccagagttacctgctgctgatccgagatgaaggaggcccccctgagctccagtttgctgcctgggtggatgcagtggtgtttgtgttcagcctggaggatgaaatcagtttccagacggtgtacaactacttcctgcgtctctgcagcttccgcaacgccagcgaggtgcccatggtgcttgtgggcacgcaggatgccatcagcgctgcgaatccccgggttatcgacgacagcagagcccgcaagctctccacagatctgaagcggtgcacctactatgagacgtgcgcgacctacgggctcaatgtggagcgtgtcttccaggacgtggcccagaaggtagtggccttgcgaaagaagcagcaactggccatcgggccctgcaagtcactgcccaactcgcccagccactcggccgtgtccgccgcctccatcccggccgtgcacatcaaccaggccacgaatggcggcggcagcgccttcagcgactactcgtcctcagtcccctccacccccagcatcagccagcgggagctgcgcatcgagaccatcgctgcctcctccacccccacacccatccgaaagcagtccaagcggcgctccaacatcttcacgtctcggaagggtgctgacctggaccgggagaagaaggctgccgagtgcaaggtggacagcatcgggagcggccgcgccatccccatcaagcaggggatcctgctaaagcggagcggcaagtccctgaacaaggagtggaagaagaagtatgtgacgctctgtgacaacgggctgctcacctatcaccccagcctgcatgattacatgcagaacatccacggcaaggagattgacctgctgcggacaacggtgaaagtgccagggaagcgcctgccccgagccacacctgccacagccccgggcaccagcccccgtgccaacgggctgtccgtggagcggagtaacacacagctgggtgggggcacaggtgccccccactcggccagcagcgcatccctgcactctgagcgccccctcagcagctcggcctgggctggcccgcgccctgaggggctgcaccagcgctcctgctccgtttccagcgccgaccagtggagtgaggccaccacttccctgcccccaggcatgcagcaccctgccagtggcccagctgaggtactcagttccagccccaagctggatcctcccccatctccccactccaaccggaagaagcaccggaggaaaaagagcaccgggaccccccgaccagacggccccagcagtgctactgaagaggcagaggagtcgtttgaatttgtggtggtgtccctcactgggcagacgtggcacttcgaggcttcaacggcggaggagcgggagctgtgggttcagagtgtgcaggcccagatccttgccagcctgcaaggctgccgcagtgccaaggacaagactcgactggggaaccagaacgcagctctggctgtgcaggccgtccgcaccgtccgcggcaacagcttttgtatcgactgcgatgcacccaatccagactgggccagcctgaacctgggtgccctgatgtgcattgagtgctcaggcatccaccgacacctgggggctcacctgtcccgggtgcgctcccttgacctcgatgactggccgcctgagctgctggctgtcatgactgccatgggcaatgccctcgccaacagcgtctgggagggggccttgggtggctactccaagccagggcctgatgcctgcagagaggagaaggaacgctggatacgggccaagtatgaacagaagctcttcctggccccactgccaagctcagatgtgccactggggcagcagctgctccgggccgtggtggaagatgacctgcggctgttggtgatgctcctggcacatggctccaaagaggaggtgaatgagacctatggggacggggacgggcggacggctctacatctctccagtgccatggccaacgttgtcttcacgcagctgctcatctggtacggggtggacgtgaggagccgggacgcccggggcctgactccactggcatatgctcgccgggccggcagccaggagtgtgcagacatcttgatccagcatggctgccctggggagggctgtggcttagcgcctacccccaacagagagcctgccaatggcaccaacccctctgctgagctgcaccgtagtcctagcctcctataaggcccaggaagagggcagaggggccagaaggactccatggcccaaagaccctcctccctgcaggcactgtgggaacagacacagagatggagaagcagggacatgctgagaggacgaagccaaggaaattagggaggagagtcaaagggatcaaggagagttggggatttgagctgcagcagagagggatgagggatttagccctctgccctaaggtgccattgaaaagggacaggacccttcggaggtgcctgtgaggagaggggagcaggacctctccctcctccagatccctgcctcctagtgccagcccctcacacgccttcatcctgaaacaggaagaggacggcaccaagttgggggtgctggatgaaagagacgaggggtgatctgtgagtcccatgtaaactttgtacattggaatatttatgtttgtgtacatatttgatgtgtgtgtgtatgatgagccaataaaccagactgtgtgcgtggc

SEQ ID NO: 108559 - DNA, 2715 bp, Homo sapiens
  Payload ID: 1328
  Gene Symbol: AGAP4
  Gene Name: ArfGAP with GTPase domain, ankyrin repeat and PH domain 4
  ENST ID: ENST00000311652
  CDS Start-End: 411-2402
gggcattgtgtgccacatgcctgggctcccacctggggccagtgggcttcagtctgtaggtgactacagaaggaggaggagctccgtctgttctctcttcaggcagttgttgtgtctctcagcacttgttgggttcacaacctattaaataagccggctggtcttcaccctcccagacaagtcaactcaggggaggcagcagggtgcgggccttggcccgcagccctagccggggccggggccagggccagggccagggctggtgcccggggccgcgctgtgaggtgggcaggcgaggagcgggaagaccatctctgcaagtgcagcatagcctcggcctaggacagcgggagtgcgtggccaaagctgtgagcagaggcacaggtggtggcagacagtagaggcgccccatggggaacatactgacctgtcgtgtgcaccctagcgtcagcctcgagtttgaccagcagcaggggtcggtgtgtccctctgaatctgagatctatgaggcaggagctggggacaggatggcaggagcgcccatggctgctgctgtacagcctgctgaggtgactgttgaagttggtgaggacctccacatgcaccacgttcgtgaccgggagatgcctgaagctttggagtttaacctttctgccaatccagaggcaagcacaatattccagaggaactctcaaacagatgttgtagaaataagaagaagcaactgtacaaaccatgtatctactgtgcgtttcagtcaacaatacagcttgtgttcgacaatattccttgatgacagcacagccatccagcattatcttacaatgacaataatatctgtgaccttggagatacctcatcatatcacacaaagagatgcagatagatctttgagcatacctgatgaacagttacactcatttgcggtttccaccgtgcacattatgaagaaaagaaatggaggtgggagtttaaataactattcctcctccattccatcgactcccagcaccagccaggaggaccctcagttcagtgttcctcccactgccaacacacccacccccgtttgcaagcggtccatgcgctggtccaacctgtttacatctgagaaagggagtgacccagacaaagagaggaaagccccggagaatcatgctgacaccatcgggagcggcagagccatccccattaaacagggcatgctcttaaagcgaagtgggaaatggctgaagacatggaaaaagaaatacgtcaccctgtgttccaatggcgtgctcacctattattcaagcttaggtgattatatgaagaatattcataaaaaagagattgaccttcagacatctaccatcaaagtcccaggaaagtggccatccctagccacatcggcctgcacacccatctccacctctaaaagcaatggcctatccaaggacatggacaccgggctgggtgactccatatgcttcagccccagtatctccagcaccaccagccccaagctcaacccgcccccctctcctcatgccaataaaaagaaacacctaaagaagaaaagcaccaacaactttatgattgtgtctgccactggccaaacgtggcactttgaagccacgacgtatgaggagcgggatgcctgggtccaagccatccagagccagatcctggccagcctgcagtcatgcgagagcagtaaaagcaagtcccagctgaccagccagagcaaggccatggccctgcagtcgatccaaaacatgcgtgggaacgcccactgtgtggactgtgagacccagaatcctaagtgggccagtttgaacttgggagtcctcatgtgtattgaatgctcaggaatccaccgcagtcttggcacccgcctttcccgtgtgcgatctctggagctggatgactggccagttgagctcaggaaggttatgtcatctattggcaatgacctagccaacagcatctgggaagggagcagccaggggcagacaaaaccctcagaaaagtccacgagggaagagaaggaacggtggatccgttccaaatatgaggagaagctctttctggccccactaccctgcactgagctgtccctgggccagcagctgctgcgggccaccgctgatgaggacctgcagacagccatcctgctgctggcacatggctcccgtgaggaggtgaacgagacctgtggggagggagacggctgcacggcgctccatctggcctgccgcaaggggaatgtggtcctggcgcagctcctgatctggtacggggtggacgtcatggcccgagatgcccacgggaacacagcgctgacctacgcccggcaggcctccagccaggagtgcatcaacgtgcttctgcagtacggctgccccgacaagtgtgtgtagtatctgttttatttgactgcagtctccttggtgcaaaaacaaaatgggaaaaataaggataactcagaatttcaaaaggaaatcacaaattcagctaataatagcattttcagtacttttcgtaaactaagtaaatacacaaaatgttgatttttctgaccataagacgtattttatgtccttttgccaaggtggatttgttagtctcaggccctcctggccacattgcccaagtcacacaggcttctgtattatgtatttagataaaatgtgtgaaaatatatttgaaataaagttcataaatatgcattga

SEQ ID NO: 108560 - DNA, 2439 bp, Homo sapiens
  Payload ID: 1328
  Gene Symbol: AGAP4
  Gene Name: ArfGAP with GTPase domain, ankyrin repeat and PH domain 4
  Uniprot ID: Q96P64
  ENST ID: ENST00000448048
  CDS Start-End: 127-2118
gtgggcaggcgaggagcgggaagaccatctctgcaagtgcagcatagcctcggcctaggacagcgggagtgcgtggccaaagctgtgagcagaggcacaggtggtggcagacagtagaggcgccccatggggaacatactgacctgtcgtgtgcaccctagcgtcagcctcgagtttgaccagcagcaggggtcggtgtgtccctctgaatctgagatctatgaggcaggagctggggacaggatggcaggagcgcccatggctgctgctgtacagcctgctgaggtgactgttgaagttggtgaggacctccacatgcaccacgttcgtgaccgggagatgcctgaagctttggagtttaacccttctgccaatccagaggcaagcacaatattccagaggaactctcaaacagatgttgtagaaataagaagaagcaactgtacaaaccatgtatctactgtgcgtttcagtcaacaatacagcttgtgttcgacaatattccttgatgacagcacagccatccagcattatcttacaatgacaataatatctgtgaccttggagatacctcatcatatcacacaaagagatgcagatagatctttgagcatacctgatgaacagttacactcatttgcggtttccaccgtgcacattatgaagaaaagaaatggaggtgggagtttaaataactattcctcctccattccatcgactcccagcaccagccaggaggaccctcagttcagtgttcctcccactgccaacacacccacccccgtttgcaagcggtccatgcgctggtccaacctgtttacatctgagaaagggagtgacccagacaaagagaggaaagccccggagaatcatgctgacaccatcgggagcggcagagccatccccattaaacagggcatgctcttaaagcgaagtgggaaatggctgaagacatggaaaaagaaatacgtcaccctgtgttccaatggcgtgctcacctattattcaagcttaggtgattatatgaagaatattcataaaaaagagattgaccttcagacatctaccatcaaagtcccaggaaagtggccatccctagccacatcggcctgcacacccatctccacctctaaaagcaatggcctatccaaggacatggacaccgggctgggtgactccatatgcttcagccccagtatctccagcaccaccagccccaagctcaacccgcccccctctcctcatgccaataaaaagaaacacctaaagaagaaaagcaccaacaactttatgattgtgtctgccactggccaaacgtggcactttgaagccacgacgtatgaggagcgggatgcctgggtccaagccatccagagccagatcctggccagcctgcagtcatgcgagagcagtaaaagcaagtcccagctgaccagccagagcaaggccatggccctgcagtcgatccaaaacatgcgtgggaacgcccactgtgtggactgtgagacccagaatcctaagtgggccagtttgaacttgggagtcctcatgtgtattgaatgctcaggaatccaccgcagtcttggcacccgcctttcccgtgtgcgatctctggagctggatgactggccagttgagctcaggaaggttatgtcatctattggcaatgacctagccaacagcatctgggaagggagcagccaggggcagacaaaaccctcagaaaagtccacgagggaagagaaggaacggtggatccgttccaaatatgaggagaagctctttctggccccactaccctgcactgagctgtccctgggccagcagctgctgcgggccaccgctgatgaggacctgcagacagccatcctgctgctggcacatggctcccgtgaggaggtgaacgagacctgtggggagggagacggctgcacggcgctccatctggcctgccgcaaggggaatgtggtcctggcgcagctcctgatctggtacggggtggacgtcatggcccgagatgcccacgggaacacagcgctgacctacgcccggcaggcctccagccaggagtgcatcaacgtgcttctgcagtacggctgccccgacaagtgtgtgtagtatctgttttatttgactgcagtctccttggtgcaaaaacaaaatgggaaaaataaggataactcagaatttcaaaaggaaatcacaaattcagctaataatagcattttcagtacttttcgtaaactaagtaaatacacaaaatgttgatttttctgaccataagacgtattttatgtccttttgccaaggtggatttgttagtctcaggccctcctggccacattgcccaagtcacacaggcttctgtattatgtatttagataaaatgtgtgaaaatatatttgaaataaagttcataaatatgcattgatttttgta

SEQ ID NO: 108561 - DNA, 413 bp, Homo sapiens
  Payload ID: 1328
  Gene Symbol: AGAP4
  Gene Name: ArfGAP with GTPase domain, ankyrin repeat and PH domain 4
  ENST ID: ENST00000492347
  CDS Start-End: 1-413
gcaggagcgcccatggctgctgctgtacagcctgctgaggtgactgttgaagttggtgaggacctccacatgcaccacgttcgtgaccgggagatgcctgaagctttggagtttaacctttctgccaatccagaggcaagcacaatattccagaggaactctcaaacagatgctttggagtttaacccttctgccaatccagaggcaagcacaatattccagaggaactctcaaacagatgttgtagaaataagaagaagcaactgtacaaaccatgtatctactgtgcgtttcagtcaacaatacagcttgtgttcgacaatattccttgatgacagcacagccatccagcattatcttacaatgacaataatatctgtgaccttggagatacctcatcatatcacacaaag

SEQ ID NO: 108562 - DNA, 2387 bp, Homo sapiens
  Payload ID: 1328
  Gene Symbol: AGAP4
  Gene Name: ArfGAP with GTPase domain, ankyrin repeat and PH domain 4
  ENST ID: ENST00000618171
  CDS Start-End: 113-2089
agcgggaagaccatctctgcaagtgcagcatagcctcggcctaggacagcgggagtgcgtggccaaagctgtgagcagaggcacaggtggtggcagacagtagaggcgccccatggggaacatactgacctgtcgtgtgcaccctagcgtcagcctcgagtttgaccagcagcaggggtcggtgtgtccctctgaatctgagatctatgaggcaggagctggggacaggatggcaggagcgcccatggctgctgctgtacagcctgctgaggtgactgttgaagttggtgaggacctccacatgcaccacgttcgtgaccgggagatgcctgaagctttggagtttaacctttctgccaatccagaggcaagcacaatattccagaggaactctcaaacagatgctttggagtttaacccttctgccaatccagaggcaagcacaatattccagaggaactctcaaacagatgttgtagaaataagaagaagcaactgtacaaaccatgtatctactgtgcgtttcagtcaacaatacagcttgtgttcgacaatattccttgatgacagcacagccatccagcattatcttacaatgacaataatatctgtgaccttggagatacctcatcatatcacacaaagagatgcagatagatctttgagcatacctgatgaacagttacactcatttgcggtttccaccgtgcacattatgaagaaaagaaatggaggtgggagtttaaataactattcctcctccattccatcgactcccagcaccagccaggaggaccctcagttcagtgttcctcccactgccaacacacccacccccgtttgcaagcggtccatgcgctggtccaacctgtttacatctgagaaagggagtgacccagacaaagagaggaaagccccggagaatcatgctgacaccatcgggagcggcagagccatccccattaaacagggcatgctcttaaagcgaagtgggaaatggctgaagacatggaaaaagaaatacgtcaccctgtgttccaatggcgtgctcacctattattcaagcttaggtgattatatgaagaatattcataaaaaagagattgaccttcagacatctaccatcaaagtcccaggaaagtggccatccctagccacatcggcctgcacacccatctccacctctaaaagcaatggcctatccaaggacatggacaccgggctgggtgactccatatgcttcagccccagtatctccagcaccaccagccccaagctcaacccgcccccctctcctcatgccaataaaaagaaacacctaaagaagaaaagcaccaacaactttatgattgtgtctgccactggccaaacgtggcactttgaagccacgacgtatgaggagcgggatgcctgggtccaagccatccagagccagatcctggccagcctgcagtcatgcgagagcagtaaaagcaagtcccagctgaccagccagagcaaggccatggccctgcagtcgatccaaaacatgcgtgggaacgcccactgtgtggactgtgagacccagaatcctaagtgggccagtttgaacttgggagtcctcatgtgtattgaatgctcaggaatccaccgcagtcttggcacccgcctttcccgtgtgcgatctctggagctggatgactggccagttgagctcaggaaggttatgtcatctattggcaatgacctagccaacagcatctgggaagggagcagccaggggcagacaaaaccctcagaaaagtccacgagggaagagaaggaacggtggatccgttccaaatatgaggagaagctctttctggccccactaccctgcactgagctgtccctgggccagcagctgctgcgggccaccgctgatgaggacctgcagacagccatcctgctgctggcacatggctcccgtgaggaggtgaacgagacctgtggggagggagacggctgcacggcgctccatctggcctgccgcaaggggaatgtggtcctggcgcagctcctgacggggtggacgtcatggcccgagatgcccacgggaacacagcgctgacctacgcccggcaggcctccagccaggagtgcatcaacgtgcttctgcagtacggctgccccgacaagtgtgtgtagtatctgttttatttgactgcagtctccttggtgcaaaaacaaaatgggaaaaataaggataactcagaatttcaaaaggaaatcacaaattcagctaataatagcattttcagtacttttcgtaaactaagtaaatacacaaaatgttgatttttctgaccataagacgtattttatgtccttttgccaaggtggatttgttagtctcaggccctcctggc

SEQ ID NO: 108563 - DNA, 2784 bp, Homo sapiens
  Payload ID: 1328
  Gene Symbol: AGAP4
  Gene Name: ArfGAP with GTPase domain, ankyrin repeat and PH domain 4
  ENST ID: ENST00000616763
  CDS Start-End: 411-2471
gggcattgtgtgccacatgcctgggctcccacctggggccagtgggcttcagtctgtaggtgactacagaaggaggaggagctccgtctgttctctcttcaggcagttgttgtgtctctcagcacttgttgggttcacaacctattaaataagccggctggtcttcaccctcccagacaagtcaactcaggggaggcagcagggtgcgggccttggcccgcagccctagccggggccggggccagggccagggccagggctggtgcccggggccgcgctgtgaggtgggcaggcgaggagcgggaagaccatctctgcaagtgcagcatagcctcggcctaggacagcgggagtgcgtggccaaagctgtgagcagaggcacaggtggtggcagacagtagaggcgccccatggggaacatactgacctgtcgtgtgcaccctagcgtcagcctcgagtttgaccagcagcaggggtcggtgtgtccctctgaatctgagatctatgaggcaggagctggggacaggatggcaggagcgcccatggctgctgctgtacagcctgctgaggtgactgttgaagttggtgaggacctccacatgcaccacgttcgtgaccgggagatgcctgaagctttggagtttaacctttctgccaatccagaggcaagcacaatattccagaggaactctcaaacagaagctttggagtttaacccttctgccaatccagaggcaagcacaatattccagaggaactctcaaacagatgttgtagaaataagaagaagcaactgtacaaaccatgtatctactgtgcgtttcagtcaacaatacagcttgtgttcgacaatattccttgatgacagcacagccatccagcattatcttacaatgacaataatatctgtgaccttggagatacctcatcatatcacacaaagagatgcagatagatctttgagcatacctgatgaacagttacactcatttgcggtttccaccgtgcacattatgaagaaaagaaatggaggtgggagtttaaataactattcctcctccattccatcgactcccagcaccagccaggaggaccctcagttcagtgttcctcccactgccaacacacccacccccgtttgcaagcggtccatgcgctggtccaacctgtttacatctgagaaagggagtgacccagacaaagagaggaaagccccggagaatcatgctgacaccatcgggagcggcagagccatccccattaaacagggcatgctcttaaagcgaagtgggaaatggctgaagacatggaaaaagaaatacgtcaccctgtgttccaatggcgtgctcacctattattcaagcttaggtgattatatgaagaatattcataaaaaagagattgaccttcagacatctaccatcaaagtcccaggaaagtggccatccctagccacatcggcctgcacacccatctccacctctaaaagcaatggcctatccaaggacatggacaccgggctgggtgactccatatgcttcagccccagtatctccagcaccaccagccccaagctcaacccgcccccctctcctcatgccaataaaaagaaacacctaaagaagaaaagcaccaacaactttatgattgtgtctgccactggccaaacgtggcactttgaagccacgacgtatgaggagcgggatgcctgggtccaagccatccagagccagatcctggccagcctgcagtcatgcgagagcagtaaaagcaagtcccagctgaccagccagagcaaggccatggccctgcagtcgatccaaaacatgcgtgggaacgcccactgtgtggactgtgagacccagaatcctaagtgggccagtttgaacttgggagtcctcatgtgtattgaatgctcaggaatccaccgcagtcttggcacccgcctttcccgtgtgcgatctctggagctggatgactggccagttgagctcaggaaggttatgtcatctattggcaatgacctagccaacagcatctgggaagggagcagccaggggcagacaaaaccctcagaaaagtccacgagggaagagaaggaacggtggatccgttccaaatatgaggagaagctctttctggccccactaccctgcactgagctgtccctgggccagcagctgctgcgggccaccgctgatgaggacctgcagacagccatcctgctgctggcacatggctcccgtgaggaggtgaacgagacctgtggggagggagacggctgcacggcgctccatctggcctgccgcaaggggaatgtggtcctggcgcagctcctgatctggtacggggtggacgtcatggcccgagatgcccacgggaacacagcgctgacctacgcccggcaggcctccagccaggagtgcatcaacgtgcttctgcagtacggctgccccgacaagtgtgtgtagtatctgttttatttgactgcagtctccttggtgcaaaaacaaaatgggaaaaataaggataactcagaatttcaaaaggaaatcacaaattcagctaataatagcattttcagtacttttcgtaaactaagtaaatacacaaaatgttgatttttctgaccataagacgtattttatgtccttttgccaaggtggatttgttagtctcaggccctcctggccacattgcccaagtcacacaggcttctgtattatgtatttagataaaatgtgtgaaaatatatttgaaataaagttcataaatatgcattga

SEQ ID NO: 108564 - DNA, 2394 bp, Homo sapiens
  Payload ID: 1329
  Gene Symbol: AGAP5
  Gene Name: ArfGAP with GTPase domain, ankyrin repeat and PH domain 5
  Uniprot ID: A6NIR3
  ENST ID: ENST00000374094
  CDS Start-End: 113-2173
agcgggaagaccatctctgcaagtgcagcatagcctcggcctaggacagtgggagtgtgtggccaaagctgtgagcagaggcacaggtggtggcagacagtagaggcgccccatggggaacatactgacctgttgtgtgcaccctagcgtcagcctcgagtttgaccagcaacaggggtcggtgtgtccctctgaatctgagatctatgaggcaggagctggggacaggatggcaggagcgcccatggctgctgctgtgcagcctgctgaggtgaccgttgaagttggtgaggacctccacatgcaccacattcgtgaccaggagatgcctgaagctttggagtttagcctttctgccaatccagaggcaagcacaatattccagaggaactctcaaacagatgctttggagtttaacccttctgccaatccagaggcaagcacaatattccagaggaactctcaaacagatgttgtagaaataagaagaagcaactgtacaaaccatgtatctactgagcgtttcagtcaacaatacagctcgtgttcgacaatattccttgatgacagcacagccagccagcattatcttacaatgacaataatatctgtgaccttggagatacctcatcatatcacacaaagagatgcagatagatctttgagcatacctgatgaacagttacactcatttgcggtttccaccgtgcacattacgaagaacagaaatggaggtgggagtttaaataactattcctcctccattccatcgactcccagcaccagccaggaggaccctcagttcagtgttcctcccactgccaacacacccacccccgtttgcaagcggtccatgcgctggtccaacctgtttacatctgagaaagggagtcacccagacaaagagaggaaagccccggagaatcatgctgacaccatcgggagcggcagagccatccccattaaacagggcatgctcttaaagcgaagtgggaaatggctgaagacatggaaaaagaaatacgtcaccctgtgttccaatggcgtgctcacctattattcaagcttaggtgattatatgaagaatattcataaaaaagagattgaccttcggacatctaccatcaaagtcccaggaaagtggccatccctagccacatcggcctgtgcacccatctccagctctaaaagcaatggcctatccaaggacatggacaccgggctgggtgactccatatgcttcagccccagtatctccagcaccaccagccccaagctcaacccgcccccctctcctcatgccaataaaaagaaacacctaaagaagaaaagcaccaacaactttatgattgtgtctgccactggccaaacatggcactttgaagccacgacgtatgaggagcgggatgcctgggtccaagccatccagagccagatcctggccagcctgcagtcatgcgagagcagtaaaagcaagtcccagctgaccagccagagcgaggccatggccctgcagtcgatccaaaacatgcgtgggaacgcccactgtgtggactatgagacccagaatcctaagtgggccagtttgaacttgggagtcctcatgtgtattgaatgctcaggaatccaccgcagtcttggcacccgcctttcccgtgtgcgatctctggagctggatgactggccagttgagctcaggaaggttatgtcatctattggcaatgacctagccaacagcatctgggaagggagcagccaggggcagacaaaaccctcagtaaagtccacgagggaagagaaggaacggtggatccgttccaaatatgaggagaagctctttctggccccactaccctgcactgagctgtccctgggccagcacctgctgcgggccaccgctgatgaggacctgcagacagccatcctgctgctggcacatggctcccgtgaggaggtgaacgagacctgtggggagggagacggctgcacggcgctccatctggcctgccgcaaggggaatgtggtcctggcacagctcctgatctggtacggggtggacgtcatggcccgagatgcccacgggaacacagcgctgacctacgcccggcaggcctccagccaggagtgcatcaacgtgcttctgcagtacggctgccccgacgagtgcgtgtagtatctgttttatttgactgcagtctccttggtgcaaaaacaaaatgggaaaaataaggataactcagaatttcaaaaggaaatcacaaattcagctagtaatagcattttcagtacttttcataaactaagtaaatacacaaaatgttgatttttctgaccataagacatattttatgtccttttgccaaggtggatgtgttagtctcaggccctcctggc

SEQ ID NO: 108565 - DNA, 2430 bp, Homo sapiens
  Payload ID: 1329
  Gene Symbol: AGAP5
  Gene Name: ArfGAP with GTPase domain, ankyrin repeat and PH domain 5
  ENST ID: ENST00000443782
  CDS Start-End: 127-2118
gtgggcaggcgaggagcgggaagaccatctctgcaagtgcagcatagcctcggcctaggacagtgggagtgtgtggccaaagctgtgagcagaggcacaggtggtggcagacagtagaggcgccccatggggaacatactgacctgttgtgtgcaccctagcgtcagcctcgagtttgaccagcaacaggggtcggtgtgtccctctgaatctgagatctatgaggcaggagctggggacaggatggcaggagcgcccatggctgctgctgtgcagcctgctgaggtgaccgttgaagttggtgaggacctccacatgcaccacattcgtgaccaggagatgcctgaagctttggagtttaacccttctgccaatccagaggcaagcacaatattccagaggaactctcaaacagatgttgtagaaataagaagaagcaactgtacaaaccatgtatctactgagcgtttcagtcaacaatacagctcgtgttcgacaatattccttgatgacagcacagccagccagcattatcttacaatgacaataatatctgtgaccttggagatacctcatcatatcacacaaagagatgcagatagatctttgagcatacctgatgaacagttacactcatttgcggtttccaccgtgcacattacgaagaacagaaatggaggtgggagtttaaataactattcctcctccattccatcgactcccagcaccagccaggaggaccctcagttcagtgttcctcccactgccaacacacccacccccgtttgcaagcggtccatgcgctggtccaacctgtttacatctgagaaagggagtcacccagacaaagagaggaaagccccggagaatcatgctgacaccatcgggagcggcagagccatccccattaaacagggcatgctcttaaagcgaagtgggaaatggctgaagacatggaaaaagaaatacgtcaccctgtgttccaatggcgtgctcacctattattcaagcttaggtgattatatgaagaatattcataaaaaagagattgaccttcggacatctaccatcaaagtcccaggaaagtggccatccctagccacatcggcctgtgcacccatctccagctctaaaagcaatggcctatccaaggacatggacaccgggctgggtgactccatatgcttcagccccagtatctccagcaccaccagccccaagctcaacccgcccccctctcctcatgccaataaaaagaaacacctaaagaagaaaagcaccaacaactttatgattgtgtctgccactggccaaacatggcactttgaagccacgacgtatgaggagcgggatgcctgggtccaagccatccagagccagatcctggccagcctgcagtcatgcgagagcagtaaaagcaagtcccagctgaccagccagagcgaggccatggccctgcagtcgatccaaaacatgcgtgggaacgcccactgtgtggactatgagacccagaatcctaagtgggccagtttgaacttgggagtcctcatgtgtattgaatgctcaggaatccaccgcagtcttggcacccgcctttcccgtgtgcgatctctggagctggatgactggccagttgagctcaggaaggttatgtcatctattggcaatgacctagccaacagcatctgggaagggagcagccaggggcagacaaaaccctcagtaaagtccacgagggaagagaaggaacggtggatccgttccaaatatgaggagaagctctttctggccccactaccctgcactgagctgtccctgggccagcacctgctgcgggccaccgctgatgaggacctgcagacagccatcctgctgctggcacatggctcccgtgaggaggtgaacgagacctgtggggagggagacggctgcacggcgctccatctggcctgccgcaaggggaatgtggtcctggcacagctcctgatctggtacggggtggacgtcatggcccgagatgcccacgggaacacagcgctgacctacgcccggcaggcctccagccaggagtgcatcaacgtgcttctgcagtacggctgccccgacgagtgcgtgtagtatctgttttatttgactgcagtctccttggtgcaaaaacaaaatgggaaaaataaggataactcagaatttcaaaaggaaatcacaaattcagctagtaatagcattttcagtacttttcataaactaagtaaatacacaaaatgttgatttttctgaccataagacatattttatgtccttttgccaaggtggatgtgttagtctcaggccctcctggccacattgcccaagtcacacaggcttctgtattatgtatttagataaaatgtgtgaaaatatatttgaaaaaaaagttcataaatatgcatt

SEQ ID NO: 108566 - DNA, 497 bp, Homo sapiens
  Payload ID: 1329
  Gene Symbol: AGAP5
  Gene Name: ArfGAP with GTPase domain, ankyrin repeat and PH domain 5
  ENST ID: ENST00000607663
  CDS Start-End: 1-83
aatacagctcgtgttcgacaatattccttgatgacagcacagccagccagcattatcttacaatgacaataatatcgcactgagaagccttttaggaaaatcaggatggatgtgaggcatctttctgtgaagaaaagcatcccagaagattctgattttcaccccagctcaatcattccaaactttgctgctgattgaaatcacctgggaaacgtttaccaagaaccttgatgcccaaagccatacccaatactaattaaattaaaatgtctcatgtggaagatgaggcagatattaaagcttctcaggcgattttaatgtgcagcaaagtttgagagccactgcttaatttgagtttaggacgagaaactgctcctatttggtgggaccttgggcaagtcagttttaagtgtgaccttggagatacctcatcatatcacacaaagagatgcagatagatctttgagcatacctgatgaacagttacactcatttgc

SEQ ID NO: 108567 - DNA, 2387 bp, Homo sapiens
  Payload ID: 1329
  Gene Symbol: AGAP5
  Gene Name: ArfGAP with GTPase domain, ankyrin repeat and PH domain 5
  ENST ID: ENST00000621690
  CDS Start-End: 113-2089
agcgggaagaccatctctgcaagtgcagcatagcctcggcctaggacagtgggagtgtgtggccaaagctgtgagcagaggcacaggtggtggcagacagtagaggcgccccatggggaacatactgacctgttgtgtgcaccctagcgtcagcctcgagtttgaccagcaacaggggtcggtgtgtccctctgaatctgagatctatgaggcaggagctggggacaggatggcaggagcgcccatggctgctgctgtgcagcctgctgaggtgaccgttgaagttggtgaggacctccacatgcaccacattcgtgaccaggagatgcctgaagctttggagtttagcctttctgccaatccagaggcaagcacaatattccagaggaactctcaaacagatgctttggagtttaacccttctgccaatccagaggcaagcacaatattccagaggaactctcaaacagatgttgtagaaataagaagaagcaactgtacaaaccatgtatctactgagcgtttcagtcaacaatacagctcgtgttcgacaatattccttgatgacagcacagccagccagcattatcttacaatgacaataatatctgtgaccttggagatacctcatcatatcacacaaagagatgcagatagatctttgagcatacctgatgaacagttacactcatttgcggtttccaccgtgcacattacgaagaacagaaatggaggtgggagtttaaataactattcctcctccattccatcgactcccagcaccagccaggaggaccctcagttcagtgttcctcccactgccaacacacccacccccgtttgcaagcggtccatgcgctggtccaacctgtttacatctgagaaagggagtcacccagacaaagagaggaaagccccggagaatcatgctgacaccatcgggagcggcagagccatccccattaaacagggcatgctcttaaagcgaagtgggaaatggctgaagacatggaaaaagaaatacgtcaccctgtgttccaatggcgtgctcacctattattcaagcttaggtgattatatgaagaatattcataaaaaagagattgaccttcggacatctaccatcaaagtcccaggaaagtggccatccctagccacatcggcctgtgcacccatctccagctctaaaagcaatggcctatccaaggacatggacaccgggctgggtgactccatatgcttcagccccagtatctccagcaccaccagccccaagctcaacccgcccccctctcctcatgccaataaaaagaaacacctaaagaagaaaagcaccaacaactttatgattgtgtctgccactggccaaacatggcactttgaagccacgacgtatgaggagcgggatgcctgggtccaagccatccagagccagatcctggccagcctgcagtcatgcgagagcagtaaaagcaagtcccagctgaccagccagagcgaggccatggccctgcagtcgatccaaaacatgcgtgggaacgcccactgtgtggactatgagacccagaatcctaagtgggccagtttgaacttgggagtcctcatgtgtattgaatgctcaggaatccaccgcagtcttggcacccgcctttcccgtgtgcgatctctggagctggatgactggccagttgagctcaggaaggttatgtcatctattggcaatgacctagccaacagcatctgggaagggagcagccaggggcagacaaaaccctcagtaaagtccacgagggaagagaaggaacggtggatccgttccaaatatgaggagaagctctttctggccccactaccctgcactgagctgtccctgggccagcacctgctgcgggccaccgctgatgaggacctgcagacagccatcctgctgctggcacatggctcccgtgaggaggtgaacgagacctgtggggagggagacggctgcacggcgctccatctggcctgccgcaaggggaatgtggtcctggcacagctcctgacggggtggacgtcatggcccgagatgcccacgggaacacagcgctgacctacgcccggcaggcctccagccaggagtgcatcaacgtgcttctgcagtacggctgccccgacgagtgcgtgtagtatctgttttatttgactgcagtctccttggtgcaaaaacaaaatgggaaaaataaggataactcagaatttcaaaaggaaatcacaaattcagctagtaatagcattttcagtacttttcataaactaagtaaatacacaaaatgttgatttttctgaccataagacatattttatgtccttttgccaaggtggatgtgttagtctcaggccctcctggc

SEQ ID NO: 108568 - DNA, 2779 bp, Homo sapiens
  Payload ID: 1329
  Gene Symbol: AGAP5
  Gene Name: ArfGAP with GTPase domain, ankyrin repeat and PH domain 5
  ENST ID: ENST00000581191
  CDS Start-End: 405-2465
gggcattctgtgccacatgcctgggctcccacctggggccagtgggcttcagtctgtaggtgactacagaaggaggaggagctccgtctgttctctcttcaggcagttgttgtgtctctcagcgcttgttgggttcacaacctattaaataagccagctggtcttcaccctcccagacaagtcaactcaggggaggcagcagggtgtgggccttgacccgcagccctagccggggccggggccggggccagggatggtgcccggggccgcgctgtgaggtgggcaggcgaggagcgggaagaccatctctgcaagtgcagcatagcctcggcctaggacagtgggagtgtgtggccaaagctgtgagcagaggcacaggtggtggcagacagtagaggcgccccatggggaacatactgacctgttgtgtgcaccctagcgtcagcctcgagtttgaccagcaacaggggtcggtgtgtccctctgaatctgagatctatgaggcaggagctggggacaggatggcaggagcgcccatggctgctgctgtgcagcctgctgaggtgaccgttgaagttggtgaggacctccacatgcaccacattcgtgaccaggagatgcctgaagctttggagtttagcctttctgccaatccagaggcaagcacaatattccagaggaactctcaaacagaagctttggagtttaacccttctgccaatccagaggcaagcacaatattccagaggaactctcaaacagatgttgtagaaataagaagaagcaactgtacaaaccatgtatctactgagcgtttcagtcaacaatacagctcgtgttcgacaatattccttgatgacagcacagccagccagcattatcttacaatgacaataatatctgtgaccttggagatacctcatcatatcacacaaagagatgcagatagatctttgagcatacctgatgaacagttacactcatttgcggtttccaccgtgcacattacgaagaacagaaatggaggtgggagtttaaataactattcctcctccattccatcgactcccagcaccagccaggaggaccctcagttcagtgttcctcccactgccaacacacccacccccgtttgcaagcggtccatgcgctggtccaacctgtttacatctgagaaagggagtcacccagacaaagagaggaaagccccggagaatcatgctgacaccatcgggagcggcagagccatccccattaaacagggcatgctcttaaagcgaagtgggaaatggctgaagacatggaaaaagaaatacgtcaccctgtgttccaatggcgtgctcacctattattcaagcttaggtgattatatgaagaatattcataaaaaagagattgaccttcggacatctaccatcaaagtcccaggaaagtggccatccctagccacatcggcctgtgcacccatctccagctctaaaagcaatggcctatccaaggacatggacaccgggctgggtgactccatatgcttcagccccagtatctccagcaccaccagccccaagctcaacccgcccccctctcctcatgccaataaaaagaaacacctaaagaagaaaagcaccaacaactttatgattgtgtctgccactggccaaacatggcactttgaagccacgacgtatgaggagcgggatgcctgggtccaagccatccagagccagatcctggccagcctgcagtcatgcgagagcagtaaaagcaagtcccagctgaccagccagagcgaggccatggccctgcagtcgatccaaaacatgcgtgggaacgcccactgtgtggactatgagacccagaatcctaagtgggccagtttgaacttgggagtcctcatgtgtattgaatgctcaggaatccaccgcagtcttggcacccgcctttcccgtgtgcgatctctggagctggatgactggccagttgagctcaggaaggttatgtcatctattggcaatgacctagccaacagcatctgggaagggagcagccaggggcagacaaaaccctcagtaaagtccacgagggaagagaaggaacggtggatccgttccaaatatgaggagaagctctttctggccccactaccctgcactgagctgtccctgggccagcacctgctgcgggccaccgctgatgaggacctgcagacagccatcctgctgctggcacatggctcccgtgaggaggtgaacgagacctgtggggagggagacggctgcacggcgctccatctggcctgccgcaaggggaatgtggtcctggcacagctcctgatctggtacggggtggacgtcatggcccgagatgcccacgggaacacagcgctgacctacgcccggcaggcctccagccaggagtgcatcaacgtgcttctgcagtacggctgccccgacgagtgcgtgtagtatctgttttatttgactgcagtctccttggtgcaaaaacaaaatgggaaaaataaggataactcagaatttcaaaaggaaatcacaaattcagctagtaatagcattttcagtacttttcataaactaagtaaatacacaaaatgttgatttttctgaccataagacatattttatgtccttttgccaaggtggatgtgttagtctcaggccctcctggccacattgcccaagtcacacaggcttctgtattatgtatttagataaaatgtgtgaaaatatatttgaaaaaaaagttcataaatatgcattga

SEQ ID NO: 108569 - DNA, 2703 bp, Homo sapiens
  Payload ID: 1330
  Gene Symbol: AGAP6
  Gene Name: ArfGAP with GTPase domain, ankyrin repeat and PH domain 6
  Uniprot ID: Q5VW22
  ENST ID: ENST00000374056
  CDS Start-End: 399-2390
gggcattgtgtgccacatgcctgggctcccacctggggccagtgggcttcagtctgtaggtgactacagaaggaggaggaactccgtctgttctctcttcaggcagttgttgtgtctctcagcgcttgttggtttcacaacctattaaataagccggctggtcttcaccctcccagacaagtcaactcaggggaggcagcagggtgcgggccttggcccgcagccctagccggggccggggccagggctggtgcccggggcctcgctgtgaggtgggcaggcgaggagcgggaagaccatctctgcaagtgcagcatagcctcggcctaggacagcgggagtgcgtggccaaagctgtgagcagaggcacaggtggtggcagacagtagaggcgccccatggggaacatactgacctgtcgtgtgcaccctagcgtcagcctcgagtttgaccagcagcaggggtcggtgtgtccctctgaatctgagacctatgaggcaggagctagggacaggatggcaggagcgcccatggctgctgctgtacagcctgctgaggtgactgttgaagttggtgaggacctccacatgcaccacgttcgtgaccgggagatgcctgaagctttggagtttaacccttctgccaatccagaggcaagcacaatattccagaggaactctcaaacagatgttgtagaaataagaagaagcaactgtacaaaccatgtatctgctgtgcgtttcagtcaacaatacagcttgtgttcgacaatattccttgatgacagcacagccatccagcattatcttacaatgacaataatatctgtgaccttggagatacctcatcatatcacacaaagagatgcagatagaactttgagcatacctgatgaacagttacactcatttgcggtttccaccgtgcacattatgaagaaaagaaatggaggtgggagtttaaataactattcctcctccattccatcgactcccagcaccagccaggaggaccctcagttcagtgttcctcccactgccaacacacccacgcccgtttgcaagcggtccatgcgctggtccaacctgtttacatctgagaaagggagtgacccagacaaagagaggaaagccccggagaatcatgctgacaccatcgggagcggtagagccatccccattaaacagggcatgctcttaaagcgaagtgggaaatggctgaagacatggaaaaagaaatacgtcaccctgtgttccaatggcatgctcacctattattcaagcttaggtgattatatgaagaatattcataaaaaagagattgaccttcagacatctaccatcaaagtcccaggaaagtggccatccctagccacatcggcctgcacacccatctccagctctaaaagcaatggcctatccaaggacatggacaccgggctgggtgactccatatgcttcagccccagtatctccagcaccaccagccccaagctcaacccgcccccctctcctcatgctaataaaaagaaacacctaaagaagaaaagcaccaacaactttatgattgtgtctgccactggccaaacgtggcactttgaagccacgacgtatgaggagcgggatgcctgggtccaagccatccagagccagatcctggccagcctgcagtcatgcgagagcagtaaaagcaagtcccagctgaccagccagagcgaggccatggccctgcagtcgatccaaaacatgcgtgggaacgcccactgtgtggactgtgagacccagaatcctaagtgggccagtttgaacttgggagtcctcatgtgtattgaatgctcaggtatccaccgcagtcttggcccccacctttcccgtgtgcgatctctggagctggatgactggccagttgagctcaggaaggttatgtcatctattgtcaatgacctagccaacagcatctgggaagggagcagccaggggcagacaaaaccctcagaaaagtccacgagggaagagaaggaacggtggatccgttccaaatatgaggagaagctctttctggccccactaccctgcactgagctgtccctgggccagcagctgctgcgggccaccgctgatgaggacctgcagacagccatcctgctgctggcacatggctcctgtgaggaggtgaacgagacctgtggggagggagacggctgcacggcgctccatctggcctgccgcaaggggaatgtggtcctggcgcagctcctgatctggtacggggtggacgtcatggcccgagatgcccacgggaacacagcgctgacctacgcccggcaggcctccagccaggagtgcatcaacgtgcttctgcagtacggctgccccgacgagtgtgtgtagtatctgttttatttgactgcagtctccttggtgcaaaaacaaaatgggaaaaataaggataactcagaatttcaaaaggaaatcacaaattcagctaatattagcattttcagtacttttcgtaaactaagtaaatacacaaaatgttgatttttctgaccataagacgtattttatgtccttctgccaaggtggatttgttagtctcaggccctcctggccacattgcccaagtcacacaggcttctgtattatgtatttagataaaatgtgtgaaaacatatttgaaataaagttcataaatatgcattga

SEQ ID NO: 108570 - DNA, 2372 bp, Homo sapiens
  Payload ID: 1330
  Gene Symbol: AGAP6
  Gene Name: ArfGAP with GTPase domain, ankyrin repeat and PH domain 6
  Uniprot ID: Q5VW22
  ENST ID: ENST00000412531
  CDS Start-End: 73-2133
ctaggacagcgggagtgcgtggccaaagctgtgagcagaggcacaggtggtggcagacagtagaggcgccccatggggaacatactgacctgtcgtgtgcaccctagcgtcagcctcgagtttgaccagcagcaggggtcggtgtgtccctctgaatctgagacctatgaggcaggagctagggacaggatggcaggagcgcccatggctgctgctgtacagcctgctgaggtgactgttgaagttggtgaggacctccacatgcaccacgttcgtgaccgggagatgcctgaagctttggagtttaacctttctgccaatccagagtcaagcacaatattccagaggaactctcaaacagaagctttggagtttaacccttctgccaatccagaggcaagcacaatattccagaggaactctcaaacagatgttgtagaaataagaagaagcaactgtacaaaccatgtatctgctgtgcgtttcagtcaacaatacagcttgtgttcgacaatattccttgatgacagcacagccatccagcattatcttacaatgacaataatatctgtgaccttggagatacctcatcatatcacacaaagagatgcagatagaactttgagcatacctgatgaacagttacactcatttgcggtttccaccgtgcacattatgaagaaaagaaatggaggtgggagtttaaataactattcctcctccattccatcgactcccagcaccagccaggaggaccctcagttcagtgttcctcccactgccaacacacccacgcccgtttgcaagcggtccatgcgctggtccaacctgtttacatctgagaaagggagtgacccagacaaagagaggaaagccccggagaatcatgctgacaccatcgggagcggtagagccatccccattaaacagggcatgctcttaaagcgaagtgggaaatggctgaagacatggaaaaagaaatacgtcaccctgtgttccaatggcatgctcacctattattcaagcttaggtgattatatgaagaatattcataaaaaagagattgaccttcagacatctaccatcaaagtcccaggaaagtggccatccctagccacatcggcctgcacacccatctccagctctaaaagcaatggcctatccaaggacatggacaccgggctgggtgactccatatgcttcagccccagtatctccagcaccaccagccccaagctcaacccgcccccctctcctcatgctaataaaaagaaacacctaaagaagaaaagcaccaacaactttatgattgtgtctgccactggccaaacgtggcactttgaagccacgacgtatgaggagcgggatgcctgggtccaagccatccagagccagatcctggccagcctgcagtcatgcgagagcagtaaaagcaagtcccagctgaccagccagagcgaggccatggccctgcagtcgatccaaaacatgcgtgggaacgcccactgtgtggactgtgagacccagaatcctaagtgggccagtttgaacttgggagtcctcatgtgtattgaatgctcaggtatccaccgcagtcttggcccccacctttcccgtgtgcgatctctggagctggatgactggccagttgagctcaggaaggttatgtcatctattgtcaatgacctagccaacagcatctgggaagggagcagccaggggcagacaaaaccctcagaaaagtccacgagggaagagaaggaacggtggatccgttccaaatatgaggagaagctctttctggccccactaccctgcactgagctgtccctgggccagcagctgctgcgggccaccgctgatgaggacctgcagacagccatcctgctgctggcacatggctcctgtgaggaggtgaacgagacctgtggggagggagacggctgcacggcgctccatctggcctgccgcaaggggaatgtggtcctggcgcagctcctgatctggtacggggtggacgtcatggcccgagatgcccacgggaacacagcgctgacctacgcccggcaggcctccagccaggagtgcatcaacgtgcttctgcagtacggctgccccgacgagtgtgtgtagtatctgttttatttgactgcagtctccttggtgcaaaaacaaaatgggaaaaataaggataactcagaatttcaaaaggaaatcacaaattcagctaatattagcattttcagtacttttcgtaaactaagtaaatacacaaaatgttgatttttctgaccataagacgtattttatgtccttctgccaaggtggatttgttagtctcaggccctcctggccacattgcccaagtcaca

SEQ ID NO: 108571 - DNA, 2690 bp, Homo sapiens
  Payload ID: 1330
  Gene Symbol: AGAP6
  Gene Name: ArfGAP with GTPase domain, ankyrin repeat and PH domain 6
  ENST ID: ENST00000618025
  CDS Start-End: 712-2379
ctgataggaagtgaaaggtggctgaggtaatgagaatagacccatctgcagaggatcataaaaccagcaaagacaagatcttgtctaagatgccttcacaaactttgtccatgagaactctaaggacttctccagacctgttggctgctgctgtgatctctgcccaagaggagcctctgaccaacatccaaagggcttctggacccactggactcctctggagttgctccttcacatgttcccactctctgtgcggccaccatgtaagtcggacctgcccttctgccatgattgactaaaatctcaggaagctggtgatgaatgaaaaccttagtcccaatggcactgcacgaggggccaggagagcagcagcatcataagccacaggcgtcagcctcgagtttgaccagcagcaggggtcggtgtgtccctctgaatctgagacctatgaggcaggagctagggacaggatggcaggagcgcccatggctgctgctgtacagcctgctgaggtgactgttgaagttggtgaggacctccacatgcaccacgttcgtgaccgggagatgcctgaagctttggagtttaacctttctgccaatccagagtcaagcacaatattccagaggaactctcaaacagaagctttggagtttaacccttctgccaatccagaggcaagcacaatattccagaggaactctcaaacagatggtatctgctgtgcgtttcagtcaacaatacagcttgtgttcgacaatattccttgatgacagcacagccatccagcattatcttacaatgacaataatatctgtgaccttggagatacctcatcatatcacacaaagagatgcagatagaactttgagcatacctgatgaacagttacactcatttgcggtttccaccgtgcacattatgaagaaaagaaatggaggtgggagtttaaataactattcctcctccattccatcgactcccagcaccagccaggaggaccctcagttcagtgttcctcccactgccaacacacccacgcccgtttgcaagcggtccatgcgctggtccaacctgtttacatctgagaaagggagtgacccagacaaagagaggaaagccccggagaatcatgctgacaccatcgggagcggtagagccatccccattaaacagggcatgctcttaaagcgaagtgggaaatggctgaagacatggaaaaagaaatacgtcaccctgtgttccaatggcatgctcacctattattcaagcttaggtgattatatgaagaatattcataaaaaagagattgaccttcagacatctaccatcaaagtcccaggaaagtggccatccctagccacatcggcctgcacacccatctccagctctaaaagcaatggcctatccaaggacatggacaccgggctgggtgactccatatgcttcagccccagtatctccagcaccaccagccccaagctcaacccgcccccctctcctcatgctaataaaaagaaacacctaaagaagaaaagcaccaacaactttatgattgtgtctgccactggccaaacgtggcactttgaagccacgacgtatgaggagcgggatgcctgggtccaagccatccagagccagatcctggccagcctgcagtcatgcgagagcagtaaaagcaagtcccagctgaccagccagagcgaggccatggccctgcagtcgatccaaaacatgcgtgggaacgcccactgtgtggactgtgagacccagaatcctaagtgggccagtttgaacttgggagtcctcatgtgtattgaatgctcaggtatccaccgcagtcttggcccccacctttcccgtgtgcgatctctggagctggatgactggccagttgagctcaggaaggttatgtcatctattgtcaatgacctagccaacagcatctgggaagggagcagccaggggcagacaaaaccctcagaaaagtccacgagggaagagaaggaacggtggatccgttccaaatatgaggagaagctctttctggccccactaccctgcactgagctgtccctgggccagcagctgctgcgggccaccgctgatgaggacctgcagacagccatcctgctgctggcacatggctcctgtgaggaggtgaacgagacctgtggggagggagacggctgcacggcgctccatctggcctgccgcaaggggaatgtggtcctggcgcagctcctgatctggtacggggtggacgtcatggcccgagatgcccacgggaacacagcgctgacctacgcccggcaggcctccagccaggagtgcatcaacgtgcttctgcagtacggctgccccgacgagtgtgtgtagtatctgttttatttgactgcagtctccttggtgcaaaaacaaaatgggaaaaataaggataactcagaatttcaaaaggaaatcacaaattcagctaatattagcattttcagtacttttcgtaaactaagtaaatacacaaaatgttgatttttctgaccataagacgtattttatgtccttctgccaaggtggatttgttagtctcaggccctcctggccacattgcccaagtcacacaggcttctgtattatgtatttagataaaatgtgtgaaaacatatttgaaataaagttcataaatatgcatt

SEQ ID NO: 108572 - DNA, 2387 bp, Homo sapiens
  Payload ID: 1330
  Gene Symbol: AGAP6
  Gene Name: ArfGAP with GTPase domain, ankyrin repeat and PH domain 6
  ENST ID: ENST00000622418
  CDS Start-End: 113-2089
agcgggaagaccatctctgcaagtgcagcatagcctcggcctaggacagcgggagtgcgtggccaaagctgtgagcagaggcacaggtggtggcagacagtagaggcgccccatggggaacatactgacctgtcgtgtgcaccctagcgtcagcctcgagtttgaccagcagcaggggtcggtgtgtccctctgaatctgagacctatgaggcaggagctagggacaggatggcaggagcgcccatggctgctgctgtacagcctgctgaggtgactgttgaagttggtgaggacctccacatgcaccacgttcgtgaccgggagatgcctgaagctttggagtttaacctttctgccaatccagagtcaagcacaatattccagaggaactctcaaacagaagctttggagtttaacccttctgccaatccagaggcaagcacaatattccagaggaactctcaaacagatgttgtagaaataagaagaagcaactgtacaaaccatgtatctgctgtgcgtttcagtcaacaatacagcttgtgttcgacaatattccttgatgacagcacagccatccagcattatcttacaatgacaataatatctgtgaccttggagatacctcatcatatcacacaaagagatgcagatagaactttgagcatacctgatgaacagttacactcatttgcggtttccaccgtgcacattatgaagaaaagaaatggaggtgggagtttaaataactattcctcctccattccatcgactcccagcaccagccaggaggaccctcagttcagtgttcctcccactgccaacacacccacgcccgtttgcaagcggtccatgcgctggtccaacctgtttacatctgagaaagggagtgacccagacaaagagaggaaagccccggagaatcatgctgacaccatcgggagcggtagagccatccccattaaacagggcatgctcttaaagcgaagtgggaaatggctgaagacatggaaaaagaaatacgtcaccctgtgttccaatggcatgctcacctattattcaagcttaggtgattatatgaagaatattcataaaaaagagattgaccttcagacatctaccatcaaagtcccaggaaagtggccatccctagccacatcggcctgcacacccatctccagctctaaaagcaatggcctatccaaggacatggacaccgggctgggtgactccatatgcttcagccccagtatctccagcaccaccagccccaagctcaacccgcccccctctcctcatgctaataaaaagaaacacctaaagaagaaaagcaccaacaactttatgattgtgtctgccactggccaaacgtggcactttgaagccacgacgtatgaggagcgggatgcctgggtccaagccatccagagccagatcctggccagcctgcagtcatgcgagagcagtaaaagcaagtcccagctgaccagccagagcgaggccatggccctgcagtcgatccaaaacatgcgtgggaacgcccactgtgtggactgtgagacccagaatcctaagtgggccagtttgaacttgggagtcctcatgtgtattgaatgctcaggtatccaccgcagtcttggcccccacctttcccgtgtgcgatctctggagctggatgactggccagttgagctcaggaaggttatgtcatctattgtcaatgacctagccaacagcatctgggaagggagcagccaggggcagacaaaaccctcagaaaagtccacgagggaagagaaggaacggtggatccgttccaaatatgaggagaagctctttctggccccactaccctgcactgagctgtccctgggccagcagctgctgcgggccaccgctgatgaggacctgcagacagccatcctgctgctggcacatggctcctgtgaggaggtgaacgagacctgtggggagggagacggctgcacggcgctccatctggcctgccgcaaggggaatgtggtcctggcgcagctcctgacggggtggacgtcatggcccgagatgcccacgggaacacagcgctgacctacgcccggcaggcctccagccaggagtgcatcaacgtgcttctgcagtacggctgccccgacgagtgtgtgtagtatctgttttatttgactgcagtctccttggtgcaaaaacaaaatgggaaaaataaggataactcagaatttcaaaaggaaatcacaaattcagctaatattagcattttcagtacttttcgtaaactaagtaaatacacaaaatgttgatttttctgaccataagacgtattttatgtccttctgccaaggtggatttgttagtctcaggccctcctggc

SEQ ID NO: 108573 - DNA, 2387 bp, Homo sapiens
  Payload ID: 1331
  Gene Symbol: AGAP9
  Gene Name: ArfGAP with GTPase domain, ankyrin repeat and PH domain 9
  Uniprot ID: Q5VTM2
  ENST ID: ENST00000452145
  CDS Start-End: 113-2089
agcgggaagaccatctctgcaagtgcagcatagcctcggcctaggacagcgggagtgcgtggccaaagctgtgagcagaggcacaggtggtggcagacagtagaggcgccccatggggaacatactgacctgtcgtgtgcaccctagcgtcagcctcgagtttgaccagcagcaggggtcggtgtgtccctctgaatctgagatctatgaggcaggagctgaggacaggatggcaggagcgcccatggctgctgctgtacagcctgctgaggtgactgttgaagttggtgaggacctccacatgcaccaggttcgtgaccgggagatgcctgaagctttggagtttaacctttctgccaatccagaggcaagcacaatattccagaggaactctcaaacagatgctttggagtttaactcttctgccaatccagaggcaagcacaatattccagaggaactctcaaacagatgttgtagaaataagaagaagcaactgtacaaaccatgtatctactgagcgtttcagtcaacaatacagctcgtgttcgacaatattccttgatgacagcacagccatccagcattatcttacaatgacaataatatctgtgaccttggagatacctcatcatatcacacaaagagatgcagatagatctttgagcatacctgatgaacagttacactcatttgcggtttccaccgtgcacattatgaagaaaagaaatggaggtgggagtttaaataactattcctcctccattccaccgactcccagcaccagccaggaggaccctcagttcagtgttcctcccactgccaacacacccacccccgtttgcaagcggtccatgcgctggtccaacctgtttacatctgagaaagggagtgacccagacaaagagaggaaagccccggagaatcatgctgacaccatcgggagcggcagagccatccccattaaacagggcatgctcttaaagcgaagtggaaaatggctgaagacatggaaaaagaaatacgtcaccctgtgttccaatggcgtgctcacctattattcaagcttaggtgattatatgaagaatattcataaaaaagagattgaccttcggacatctaccatcaaagtcccaggaaagtggccatccctagccacatcagcctgtgcacccatctccagctctaaaagcaatggcctatccaaggacatggacaccgggctgggtgactccatatgcttcagccccggtatctccagcaccaccagccccaagctcaacccgcccccctctcctcatgccaataaaaagaaacacctaaagaagaaaagcaccaacaactttatgattgtgtctgccactggccaaacgtggcactttgaagccacgacgtatgaggagcgggatgcctgggtccaagccatccagagccagatcctggccagcctgcagtcatgcaagagcagtaaaagcaagtcccagctgaccagccagagtgaggccatggccctgcagtcgatccaaaacatgcgtgggaacgcccactgtgtggactgtgagacccagaatcctaagtgggccagtttgaacttgggagtcctcatgtgtattgaatgctcaggtatccaccgcagttttggcacccgcctttcccgtgtgcgatctctggagctggatgactggccagttgagctcaggaaggttatgtcatctattggcaatgagctagccaacagcatctgggaagggagcagccaggggcagacaaaaccctcaataaagtccacgagggaagagaaggaatggtggatccgttccaaatatgaggagaagctctttctggccccactaccctgcactgagctgtccctgggccagcagctgctgcgggccaccactgatgaggacctgcagacagccatcctgctgctggcacatggctcccgtgaggaggtgaacgagacctgtggggagggagacggctgcacggcactccatctggcctgccgcaaggggaatgtggtcctggagcagctcctgacggggtggacgtcatggcccgagatgcccacgggaacacagcgctgacctacgcccggcaggcctccagccaggagtgcatcaacgtgcttctgcagtacggctgccccgacgagtgcgtgtagtatctgttttatttgactgcagtctccttggtgcaaaaacaaaatgggaaaaataaggataactcagaatttcaaaaggaaatcacaaattcagctagtaatagcattttcagtacttttcgtaaactaagtaaatacacaaaatgttgatttttctgaccataagacatattttatgtccttttgccaaggtggatgtgttagtctcaggccctcctggc

SEQ ID NO: 108574 - DNA, 4942 bp, Homo sapiens
  Payload ID: 1332
  Gene Symbol: ARAP1
  Gene Name: ArfGAP with RhoGAP domain, ankyrin repeat and PH domain 1
  Uniprot ID: Q96P48
  ENST ID: ENST00000334211
  CDS Start-End: 736-4353
acttttcgctttctcagtgttttcaggaagtgtgtgtgttggccacggctgcaggaggtgggggagacacaaagcaggaagcctccgggagaccagagctgggtgcagacatacacacacacatacacacagacacacagagtcacacacactcacacacactctctctctctctccctctgtctttctctctctctctctctctctgtcctttcctcctggacagatccacagttatacacagaaacaaacacacacgcacgtagagaagtgattcacaaacacttaaagacataaatcacaggtgcaaagccatacctgggctcaaaaacctccaagagaacgcagcctcagacccacccaggggccaggggccaggctgtttgcgagaccagcccaggcgggacccaggcttgcacgggcaggtacacgacattcttgggcatacgcagcccgcctggccggagctgtgggagtcctcagccccaagacccagcaggcgtctgaggcctgcccactaaggaggaggagtcattgctgccatcattatcatcccctccccagccacagtctgaggagcccctgtccaccctcccccaggggcctccccagcctccctctccacctccctgccccccggagatacctccaaagccggtacgcctgttcccagagttcgatgactctgactacgatgaggtcccagaggaggggccgggggccccagccagagtgatgaccaagaaggaggagcccccaccgagccgagtcccacgggccgtgcgcgtggccagtctgctgagcgagggagaggaactgtctggggacgaccaaggggatgaggaagaggatgaccacgcctatgagggcgtccccaatggcggatggcataccagcagcctgagcttgtccttgcccagcacaatagctgcgccacaccccatggacgggccgcctgggggctccacccccgtcacaccagtcatcaaggctggctggctggacaagaacccaccgcagggatcttacatctatcagaaacgatgggtgagactggatactgatcacctgcgatactttgacagtaacaaggacgcttactctaagcgctttatctctgtggcctgcatctcccacgtggctgccatcggggaccagaagtttgaagtgatcacaaacaaccgaacctttgccttccgggcagagagtgatgtggagcggaaggagtggatgcaggccctgcagcaggccatggctgagcagcgtgcccgggcccggctctctagcgcttatctgctgggagttccaggctcagagcagcctgaccgcgctggcagcctggagcttcgtggcttcaagaataagctgtacgtggccgtggtcggggacaaagtgcagctctacaagaatctagaggagtaccacctgggcattggcatcaccttcatcgacatgagcgtgggcaacgtgaaggaagtggaccggcgcagcttcgacctcaccacgccctaccgcatcttcagcttctctgctgactcagagctagagaaggagcagtggttggaggccatgcagggagccatcgctgaggccctgtctacctcggaggtggccgagcgcatctgggctgcagcccccaacaggttctgtgctgactgcggggctcctcagcctgactgggcctccatcaacctctgtgttgttatctgcaagcgctgtgcaggggagcaccgtggcctgggcgctggcgtctccaaggtgcggagcctgaagatggacaggaaggtgtggacagaaacacttatcgagctcttcttacagctggggaatggcgctgggaaccgcttctgggcagccaacgtgccccccagtgaggccctgcagcccagcagcagccccagcacccggcggtgccacctggaggccaagtaccgtgagggcaagtaccgccgctaccacccgctctttggcaaccaggaggagctggacaaggccctgtgtgctgcagtcaccaccacagacctggctgagacccaggcgctcctgggctgtggggctgggatcaactgcttctcgggggaccctgaggcccccacgcccctggctcttgcagagcaggcggggcagacgctgcagatggaattccttcggaacaaccggaccacagaggtgcctcggctggactcgatgaagcccctggaaaagcactactcagttgtcctgccgaccgtgagccacagtggcttcctctacaagactgcctctgccggcaagctgctacaggaccgccgggcccgggaagagttcagccggcgctggtgtgtccttggtgacggggtcctgagctactttgagaatgagcgggcagtgacccccaatggagagattcgggccagcgagattgtgtgcctggcagtgccccctcctgacacccatggctttgagcacacctttgaggtgtacacggagggagaacggctgtacctgtttgggctggagagtgcggagcaggctcatgagtgggtcaagtgtattgctaaggcattcgtgcctcccctagccgaggatctgctggcccgggattttgagcggctgggacgcctaccctacaaagctggcctgagcctacagcgggcccaggagggctggttctctctcagtggctcggagctccgtgctgtcttcccggaggggccctgcgaagagccgctgcaactacggaaactgcaggagctttccatccagggggacagtgagaaccaggtgctggtgctggtggagcgaaggaggacactgtacatacagggcgagcggcggctggacttcatgggttggctgggggccatccagaaagcagccgccagcatgggggacacgctgtcggagcagcagcttggggactcggatatcccggtgatcgtgtaccgctgtgtggactacatcacgcagtgcggcctgacctccgagggcatctaccgcaagtgtgggcagacatcgaagacacagcggctgctggagagcctgcggcaggatgcgcgctctgtgcacctcaaggagggcgagcagcacgtggatgatgtttcctcggcgctcaagcgcttcctgcgcgacctgcctgatgggctcttcactcgcgcccagcgcctaacctggctggaggcctcagagattgaggacgaggaggagaaggtctccaggtaccgagagctgctggtgcggctgccccctgtcaaccgggccacagtgaaggcccttatcagccacctgtactgtgttcagtgcttctcagacacgaaccagatgaacgtgcacaacctggcaattgtgtttgggcccacgctcttccagacagatgggcaggactacaaggctggccgtgtggtggaagacctcattaaccactatgtggtggtgtttagtgtggatgaggaagagctcaggaagcagcgggaggagatcactgccattgtgaagatgcgcgtggctggcactgccagtgggacccagcatgccggtgacttcatctgcacagtgtatctggaagagaagaaggcagagactgagcagcatatcaaggtcccagcatccatgactgctgaggagctcaccctggagatcctggatcgccggaacgtgggcatcagggagaaggactattggacctgctttgaggtcaacgagagggaggaggcagagcgccccctgcactttgcggagaaggtgctgcccatcctgcacgggctgggcacggacagccacctggtggtgaagaagcaccaggccatggaggccatgctgctgtacctggccagccgtgtcggtgacaccaagcatggcatgatgaagttccgtgaggaccgcagcctcctgggcctgggcctgccctcaggtggcttccacgatcgctacttcatcctcaacagcagctgcttgcggctctacaaggaggtccggagccagaggccgtggagcggggcccctgagaccagtcaccggcctgagaaggagtggcctattaagagtctcaaagtctacctgggagtgaagaagaaactcaggccacccacctgctggggcttcacagtggtgcatgagacagagaaacatgagaagcagcagtggtacctctgctgtgacacacagatggagctccgggagtggttcgctacctttctgtttgtgcagcatgacggcctggtgtggccctcagagccctcacgcgtgtcccgggcagtgcctgaggtccggctgggtagtgtgtcactgatcccccttcgaggtagtgaaaatgaaatgcgccggagtgtggctgccttcaccgcggaccctctgtctcttctgcgcaacgtctgagcacaggagcccatccttggctctaggattccgccgctggaagccttctgttcagacaccccttatgctccaaggcctgatgtgagccagcggggggtgcatgggaaactgcaccccacaacccacatcctccatcctgactgcagcatggggttccccggcaggggtgggaggcagcaggggtcagcctgggcaggaacctctcccaactctgtccaggtgttcagacctcttggcccaacctgctcaccccaccgggttcactgtccttgtggggctggagagatgggcataagtcaggaacttgggaggaccaccaccctttcagaggcgtgaggccctggggccctgccggaagggagccccctgctcctcccaacaaactccagaacagcagaaagcgggtgctgtagaggagcactcagctcacggggagggagctcttggctgagcttctacagggctgagagctgcgctttggggacttcagccttccttccagtctgggctgagtggggggtccagactacctgatgccccttccccaatttggggactttttgataatataaatatatctgtatatttt

SEQ ID NO: 108575 - DNA, 5767 bp, Homo sapiens
  Payload ID: 1332
  Gene Symbol: ARAP1
  Gene Name: ArfGAP with RhoGAP domain, ankyrin repeat and PH domain 1
  Uniprot ID: Q96P48
  ENST ID: ENST00000359373
  CDS Start-End: 853-5172
gattcacaaggaatgaccctcttcatcgcctctcctaattcagtcctcacaacagtccttttacaaatgggacaacaggttagaggaagtcaggcagatttccagcatcatagagagtaaaggaccagggaaggatcaggattcaaggactgcacccaggctctgcttccagcttgctgtgtgactttgggtaattttgttcccttagggaactgagctttctcatttgtaaatgcaaacaggctgttgggaggatcaaatgagatccaggggtgaaaacagcttagtttactttcaggaatttacccacgcggtatataaaggcaaaatattattatagtcaggtgattgtagattgaggaacccatttcctcattctgcaaattgcaaacctgagggcccaaagagggacaggggcttgccccaggtctcagcaggctgtgagcaagagctaaagcctaatcctcctgcctttgggcctggagcccttccttgtaccccaggggtcagtgtctttgttggatacaggcttagattgactgactgtaccctgagaacctaggggagtccctgttcccaattcttctcctacccccaccttggcctgatggaggaagaccctgctgtgttgagatgagcaccagagccaagaagctgaggaggatctggagaattctggaggaagaggagagtgttgctggagctgtacagaccctgcttctcagctcccgcctcaggccgagatgaggagcccttcagaatagctgctgtctctgggaggacccgggcgtccttggcagcccagctgctctggacaaagccctgccagtcaggcctccgctggcaggaaccatggcagaggctggggatgctgcgctatcggtggccgagtggctgcgggcattgcacctggagcagtacacggggctctttgagcagcatggcctggtgtgggccactgagtgccaaggcctcagcgacacccgcctgatggacatgggcatgctactccctggtcaccgccgccgcatcctggctggcctgctccgtgcccatacctcaccggcccctgcaccccgccccaccccacggcctgtgcccatgaagcgccacatcttccgctcaccacctgtgcctgccactccacccgagccgctgcccaccactacagaggatgaggggctccccgctgccccacccatcccgccccggaggagctgccttccgcccacctgcttcaccaccccatccacagctgccccagaccctgtgctgcccccgctgcctgctaagcggcatttggcagagctgagcgttccacccgtgccgccccgcaccggacccccccgcctgctggtgagcctgcccactaaggaggaggagtcattgctgccatcattatcatcccctccccagccacagtctgaggagcccctgtccaccctcccccaggggcctccccagcctccctctccacctccctgccccccggagatacctccaaagccggtacgcctgttcccagagttcgatgactctgactacgatgaggtcccagaggaggggccgggggccccagccagagtgatgaccaagaaggaggagcccccaccgagccgagtcccacgggccgtgcgcgtggccagtctgctgagcgagggagaggaactgtctggggacgaccaaggggatgaggaagaggatgaccacgcctatgagggcgtccccaatggcggatggcataccagcagcctgagcttgtccttgcccagcacaatagctgcgccacaccccatggacgggccgcctgggggctccacccccgtcacaccagtcatcaaggctggctggctggacaagaacccaccgcagggatcttacatctatcagaaacgatgggtgagactggatactgatcacctgcgatactttgacagtaacaaggacgcttactctaagcgctttatctctgtggcctgcatctcccacgtggctgccatcggggaccagaagtttgaagtgatcacaaacaaccgaacctttgccttccgggcagagagtgatgtggagcggaaggagtggatgcaggccctgcagcaggccatggctgagcagcgtgcccgggcccggctctctagcgcttatctgctgggagttccaggctcagagcagcctgaccgcgctggcagcctggagcttcgtggcttcaagaataagctgtacgtggccgtggtcggggacaaagtgcagctctacaagaatctagaggagtaccacctgggcattggcatcaccttcatcgacatgagcgtgggcaacgtgaaggaagtggaccggcgcagcttcgacctcaccacgccctaccgcatcttcagcttctctgctgactcagagctagagaaggagcagtggttggaggccatgcagggagccatcgctgaggccctgtctacctcggaggtggccgagcgcatctgggctgcagcccccaacaggttctgtgctgactgcggggctcctcagcctgactgggcctccatcaacctctgtgttgttatctgcaagcgctgtgcaggggagcaccgtggcctgggcgctggcgtctccaaggtgcggagcctgaagatggacaggaaggtgtggacagaaacacttatcgagctcttcttacagctggggaatggcgctgggaaccgcttctgggcagccaacgtgccccccagtgaggccctgcagcccagcagcagccccagcacccggcggtgccacctggaggccaagtaccgtgagggcaagtaccgccgctaccacccgctctttggcaaccaggaggagctggacaaggccctgtgtgctgcagtcaccaccacagacctggctgagacccaggcgctcctgggctgtggggctgggatcaactgcttctcgggggaccctgaggcccccacgcccctggctcttgcagagcaggcggggcagacgctgcagatggaattccttcggaacaaccggaccacagaggtgcctcggctggactcgatgaagcccctggaaaagcactactcagttgtcctgccgaccgtgagccacagtggcttcctctacaagactgcctctgccggcaagctgctacaggaccgccgggcccgggaagagttcagccggcgctggtgtgtccttggtgacggggtcctgagctactttgagaatgagcgggcagtgacccccaatggagagattcgggccagcgagattgtgtgcctggcagtgccccctcctgacacccatggctttgagcacacctttgaggtgtacacggagggagaacggctgtacctgtttgggctggagagtgcggagcaggctcatgagtgggtcaagtgtattgctaaggcattcgtgcctcccctagccgaggatctgctggcccgggattttgagcggctgggacgcctaccctacaaagctggcctgagcctacagcgggcccaggagggctggttctctctcagtggctcggagctccgtgctgtcttcccggaggggccctgcgaagagccgctgcaactacggaaactgcaggagctttccatccagggggacagtgagaaccaggtgctggtgctggtggagcgaaggaggacactgtacatacagggcgagcggcggctggacttcatgggttggctgggggccatccagaaagcagccgccagcatgggggacacgctgtcggagcagcagcttggggactcggatatcccggtgatcgtgtaccgctgtgtggactacatcacgcagtgcggcctgacctccgagggcatctaccgcaagtgtgggcagacatcgaagacacagcggctgctggagagcctgcggcaggatgcgcgctctgtgcacctcaaggagggcgagcagcacgtggatgatgtttcctcggcgctcaagcgcttcctgcgcgacctgcctgatgggctcttcactcgcgcccagcgcctaacctggctggaggcctcagagattgaggacgaggaggagaaggtctccaggtaccgagagctgctggtgcggctgccccctgtcaaccgggccacagtgaaggcccttatcagccacctgtactgtgttcagtgcttctcagacacgaaccagatgaacgtgcacaacctggcaattgtgtttgggcccacgctcttccagacagatgggcaggactacaaggctggccgtgtggtggaagacctcattaaccactatgtggtggtgtttagtgtggatgaggaagagctcaggaagcagcgggaggagatcactgccattgtgaagatgcgcgtggctggcactgccagtgggacccagcatgccggtgacttcatctgcacagtgtatctggaagagaagaaggcagagactgagcagcatatcaaggtcccagcatccatgactgctgaggagctcaccctggagatcctggatcgccggaacgtgggcatcagggagaaggactattggacctgctttgaggtcaacgagagggaggaggcagagcgccccctgcactttgcggagaaggtgctgcccatcctgcacgggctgggcacggacagccacctggtggtgaagaagcaccaggccatggaggccatgctgctgtacctggccagccgtgtcggtgacaccaagcatggcatgatgaagttccgtgaggaccgcagcctcctgggcctgggcctgccctcaggtggcttccacgatcgctacttcatcctcaacagcagctgcttgcggctctacaaggaggtccggagtcaccggcctgagaaggagtggcctattaagagtctcaaagtctacctgggagtgaagaagaaactcaggccacccacctgctggggcttcacagtggtgcatgagacagagaaacatgagaagcagcagtggtacctctgctgtgacacacagatggagctccgggagtggttcgctacctttctgtttgtgcagcatgacggcctggtgtggccctcagagccctcacgcgtgtcccgggcagtgcctgaggtccggctgggtagtgtgtcactgatcccccttcgaggtagtgaaaatgaaatgcgccggagtgtggctgccttcaccgcggaccctctgtctcttctgcgcaacgtctgagcacaggagcccatccttggctctaggattccgccgctggaagccttctgttcagacaccccttatgctccaaggcctgatgtgagccagcggggggtgcatgggaaactgcaccccacaacccacatcctccatcctgactgcagcatggggttccccggcaggggtgggaggcagcaggggtcagcctgggcaggaacctctcccaactctgtccaggtgttcagacctcttggcccaacctgctcaccccaccgggttcactgtccttgtggggctggagagatgggcataagtcaggaacttgggaggaccaccaccctttcagaggcgtgaggccctggggccctgccggaagggagccccctgctcctcccaacaaactccagaacagcagaaagcgggtgctgtagaggagcactcagctcacggggagggagctcttggctgagcttctacagggctgagagctgcgctttggggacttcagccttccttccagtctgggctgagtggggggtccagactacctgatgccccttccccaatttggggactttttgataatataaatatatctgtatattttacccta

SEQ ID NO: 108576 - DNA, 4778 bp, Homo sapiens
  Payload ID: 1332
  Gene Symbol: ARAP1
  Gene Name: ArfGAP with RhoGAP domain, ankyrin repeat and PH domain 1
  Uniprot ID: Q96P48
  ENST ID: ENST00000393605
  CDS Start-End: 557-4189
gcctgtcagggtgttgtgggggtgcccagctgcctgtcagaccctgaggactaccagacagagagtgggcagccatttcccgggaggcttccccttcccccacctcactctcttgccatacgggggtcaggagtcacgtgtagccacagcgctctgggccaggggtcggggctctggtgtggctcccccaggccctggctgtatgtgggtgggcatgtggcctccccccaccctgtgtgttaggaactcgtgtcctgtcccggagtgtctgtctctgtttcacttcttgtgttcccgtgtctgtctgtcttgcatccctagcccgcagtctttttctctgtccctttatctttctgtttttgtctgtgtcctaggtcggtttctgccactggctctcctgtccctgtgatctgggtctctgtgtggtctccgctggcagggggaggggagtgtgaggaaacagaactaaaagtgctgggctgtgtgggtcggggctgtgtggacagagggggcgtggcagccccgggtgggtgtgatctgtggcttgaagggaaggatgacgctgagtgggtctcgggggcaggaggagcccccaccgagccgagtcccacgggccgtgcgcgtggccagtctgctgagcgagggagaggaactgtctggggacgaccaaggggatgaggaagaggatgaccacgcctatgagggcgtccccaatggcggatggcataccagcagcctgagcttgtccttgcccagcacaatagctgcgccacaccccatggacgggccgcctgggggctccacccccgtcacaccagtcatcaaggctggctggctggacaagaacccaccgcagggatcttacatctatcagaaacgatgggtgagactggatactgatcacctgcgatactttgacagtaacaaggacgcttactctaagcgctttatctctgtggcctgcatctcccacgtggctgccatcggggaccagaagtttgaagtgatcacaaacaaccgaacctttgccttccgggcagagagtgatgtggagcggaaggagtggatgcaggccctgcagcaggccatggctgagcagcgtgcccgggcccggctctctagcgcttatctgctgggagttccaggctcagagcagcctgaccgcgctggcagcctggagcttcgtggcttcaagaataagctgtacgtggccgtggtcggggacaaagtgcagctctacaagaatctagaggagtaccacctgggcattggcatcaccttcatcgacatgagcgtgggcaacgtgaaggaagtggaccggcgcagcttcgacctcaccacgccctaccgcatcttcagcttctctgctgactcagagctagagaaggagcagtggttggaggccatgcagggagccatcgctgaggccctgtctacctcggaggtggccgagcgcatctgggctgcagcccccaacaggttctgtgctgactgcggggctcctcagcctgactgggcctccatcaacctctgtgttgttatctgcaagcgctgtgcaggggagcaccgtggcctgggcgctggcgtctccaaggtgcggagcctgaagatggacaggaaggtgtggacagaaacacttatcgagctcttcttacagctggggaatggcgctgggaaccgcttctgggcagccaacgtgccccccagtgaggccctgcagcccagcagcagccccagcacccggcggtgccacctggaggccaagtaccgtgagggcaagtaccgccgctaccacccgctctttggcaaccaggaggagctggacaaggccctgtgtgctgcagtcaccaccacagacctggctgagacccaggcgctcctgggctgtggggctgggatcaactgcttctcgggggaccctgaggcccccacgcccctggctcttgcagagcaggcggggcagacgctgcagatggaattccttcggaacaaccggaccacagaggtgcctcggctggactcgatgaagcccctggaaaagcactactcagttgtcctgccgaccgtgagccacagtggcttcctctacaagactgcctctgccggcaagctgctacaggaccgccgggcccgggaagagttcagccggcgctggtgtgtccttggtgacggggtcctgagctactttgagaatgagcgggcagtgacccccaatggagagattcgggccagcgagattgtgtgcctggcagtgccccctcctgacacccatggctttgagcacacctttgaggtgtacacggagggagaacggctgtacctgtttgggctggagagtgcggagcaggctcatgagtgggtcaagtgtattgctaaggcattcgtgcctcccctagccgaggatctgctggcccgggattttgagcggctgggacgcctaccctacaaagctggcctgagcctacagcgggcccaggagggctggttctctctcagtggctcggagctccgtgctgtcttcccggaggggccctgcgaagagccgctgcaactacggaaactgcaggagctttccatccagggggacagtgagaaccaggtgctggtgctggtggagcgaaggaggacactgtacatacagggcgagcggcggctggacttcatgggttggctgggggccatccagaaagcagccgccagcatgggggacacgctgtcggagcagcagcttggggactcggatatcccggtgatcgtgtaccgctgtgtggactacatcacgcagtgcggcctgacctccgagggcatctaccgcaagtgtgggcagacatcgaagacacagcggctgctggagagcctgcggcaggatgcgcgctctgtgcacctcaaggagggcgagcagcacgtggatgatgtttcctcggcgctcaagcgcttcctgcgcgacctgcctgatgggctcttcactcgcgcccagcgcctaacctggctggaggcctcagagattgaggacgaggaggagaaggtctccaggtaccgagagctgctggtgcggctgccccctgtcaaccgggccacagtgaaggcccttatcagccacctgtactgtgttcagtgcttctcagacacgaaccagatgaacgtgcacaacctggcaattgtgtttgggcccacgctcttccagacagatgggcaggactacaaggctggccgtgtggtggaagacctcattaaccactatgtggtggtgtttagtgtggatgaggaagagctcaggaagcagcgggaggagatcactgccattgtgaagatgcgcgtggctggcactgccagtgggacccagcatgccggtgacttcatctgcacagtgtatctggaagagaagaaggcagagactgagcagcatatcaaggtcccagcatccatgactgctgaggagctcaccctggagatcctggatcgccggaacgtgggcatcagggagaaggactattggacctgctttgaggtcaacgagagggaggaggcagagcgccccctgcactttgcggagaaggtgctgcccatcctgcacgggctgggcacggacagccacctggtggtgaagaagcaccaggccatggaggccatgctgctgtacctggccagccgtgtcggtgacaccaagcatggcatgatgaagttccgtgaggaccgcagcctcctgggcctgggcctgccctcaggtggcttccacgatcgctacttcatcctcaacagcagctgcttgcggctctacaaggaggtccggagccagaggccgtggagcggggcccctgagaccagtcaccggcctgagaaggagtggcctattaagagtctcaaagtctacctgggagtgaagaagaaactcaggccacccacctgctggggcttcacagtggtgcatgagacagagaaacatgagaagcagcagtggtacctctgctgtgacacacagatggagctccgggagtggttcgctacctttctgtttgtgcagcatgacggcctggtgtggccctcagagccctcacgcgtgtcccgggcagtgcctgaggtccggctgggtagtgtgtcactgatcccccttcgaggtagtgaaaatgaaatgcgccggagtgtggctgccttcaccgcggaccctctgtctcttctgcgcaacgtctgagcacaggagcccatccttggctctaggattccgccgctggaagccttctgttcagacaccccttatgctccaaggcctgatgtgagccagcggggggtgcatgggaaactgcaccccacaacccacatcctccatcctgactgcagcatggggttccccggcaggggtgggaggcagcaggggtcagcctgggcaggaacctctcccaactctgtccaggtgttcagacctcttggcccaacctgctcaccccaccgggttcactgtccttgtggggctggagagatgggcataagtcaggaacttgggaggaccaccaccctttcagaggcgtgaggccctggggccctgccggaagggagccccctgctcctcccaacaaactccagaacagcagaaagcgggtgctgtagaggagcactcagctcacggggagggagctcttggctgagcttctacagggctgagagctgcgctttggggacttcagccttccttccagtctgggctgagtggggggtccagactacctgatgccccttccccaatttggggactttttgataatataaatatatctgtatatttt

SEQ ID NO: 108577 - DNA, 5145 bp, Homo sapiens
  Payload ID: 1332
  Gene Symbol: ARAP1
  Gene Name: ArfGAP with RhoGAP domain, ankyrin repeat and PH domain 1
  Uniprot ID: Q96P48
  ENST ID: ENST00000393609
  CDS Start-End: 204-4556
aatttggcggtggcggtgtaagtcggtggcggcgccggtacgcctggtccccgcgtggagtctttactcaaaacagctcccgcctcaggccgagatgaggagcccttcagaatagctgctgtctctgggaggacccgggcgtccttggcagcccagctgctctggacaaagccctgccagtcaggcctccgctggcaggaaccatggcagaggctggggatgctgcgctatcggtggccgagtggctgcgggcattgcacctggagcagtacacggggctctttgagcagcatggcctggtgtgggccactgagtgccaaggcctcagcgacacccgcctgatggacatgggcatgctactccctggtcaccgccgccgcatcctggctggcctgctccgtgcccatacctcaccggcccctgcaccccgccccaccccacggcctgtgcccatgaagcgccacatcttccgctcaccacctgtgcctgccactccacccgagccgctgcccaccactacagaggatgaggggctccccgctgccccacccatcccgccccggaggagctgccttccgcccacctgcttcaccaccccatccacagctgccccagaccctgtgctgcccccgctgcctgctaagcggcatttggcagagctgagcgttccacccgtgccgccccgcaccggacccccccgcctgctggtgagcctgcccactaaggaggaggagtcattgctgccatcattatcatcccctccccagccacagtctgaggagcccctgtccaccctcccccaggggcctccccagcctccctctccacctccctgccccccggagatacctccaaagccggtacgcctgttcccagagttcgatgactctgactacgatgaggtcccagaggaggggccgggggccccagccagagtgatgaccaagaaggaggagcccccaccgagccgagtcccacgggccgtgcgcgtggccagtctgctgagcgagggagaggaactgtctggggacgaccaaggggatgaggaagaggatgaccacgcctatgagggcgtccccaatggcggatggcataccagcagcctgagcttgtccttgcccagcacaatagctgcgccacaccccatggacgggccgcctgggggctccacccccgtcacaccagtcatcaaggctggctggctggacaagaacccaccgcagggatcttacatctatcagaaacgatgggtgagactggatactgatcacctgcgatactttgacagtaacaaggacgcttactctaagcgctttatctctgtggcctgcatctcccacgtggctgccatcggggaccagaagtttgaagtgatcacaaacaaccgaacctttgccttccgggcagagagtgatgtggagcggaaggagtggatgcaggccctgcagcaggccatggctgagcagcgtgcccgggcccggctctctagcgcttatctgctgggagttccaggctcagagcagcctgaccgcgctggcagcctggagcttcgtggcttcaagaataagctgtacgtggccgtggtcggggacaaagtgcagctctacaagaatctagaggagtaccacctgggcattggcatcaccttcatcgacatgagcgtgggcaacgtgaaggaagtggaccggcgcagcttcgacctcaccacgccctaccgcatcttcagcttctctgctgactcagagctagagaaggagcagtggttggaggccatgcagggagccatcgctgaggccctgtctacctcggaggtggccgagcgcatctgggctgcagcccccaacaggttctgtgctgactgcggggctcctcagcctgactgggcctccatcaacctctgtgttgttatctgcaagcgctgtgcaggggagcaccgtggcctgggcgctggcgtctccaaggtgcggagcctgaagatggacaggaaggtgtggacagaaacacttatcgagctcttcttacagctggggaatggcgctgggaaccgcttctgggcagccaacgtgccccccagtgaggccctgcagcccagcagcagccccagcacccggcggtgccacctggaggccaagtaccgtgagggcaagtaccgccgctaccacccgctctttggcaaccaggaggagctggacaaggccctgtgtgctgcagtcaccaccacagacctggctgagacccaggcgctcctgggctgtggggctgggatcaactgcttctcgggggaccctgaggcccccacgcccctggctcttgcagagcaggcggggcagacgctgcagatggaattccttcggaacaaccggaccacagaggtgcctcggctggactcgatgaagcccctggaaaagcactactcagttgtcctgccgaccgtgagccacagtggcttcctctacaagactgcctctgccggcaagctgctacaggaccgccgggcccgggaagagttcagccggcgctggtgtgtccttggtgacggggtcctgagctactttgagaatgagcgggcagtgacccccaatggagagattcgggccagcgagattgtgtgcctggcagtgccccctcctgacacccatggctttgagcacacctttgaggtgtacacggagggagaacggctgtacctgtttgggctggagagtgcggagcaggctcatgagtgggtcaagtgtattgctaaggcattcgtgcctcccctagccgaggatctgctggcccgggattttgagcggctgggacgcctaccctacaaagctggcctgagcctacagcgggcccaggagggctggttctctctcagtggctcggagctccgtgctgtcttcccggaggggccctgcgaagagccgctgcaactacggaaactgcaggagctttccatccagggggacagtgagaaccaggtgctggtgctggtggagcgaaggaggacactgtacatacagggcgagcggcggctggacttcatgggttggctgggggccatccagaaagcagccgccagcatgggggacacgctgtcggagcagcagcttggggactcggatatcccggtgatcgtgtaccgctgtgtggactacatcacgcagtgcggcctgacctccgagggcatctaccgcaagtgtgggcagacatcgaagacacagcggctgctggagagcctgcggcaggatgcgcgctctgtgcacctcaaggagggcgagcagcacgtggatgatgtttcctcggcgctcaagcgcttcctgcgcgacctgcctgatgggctcttcactcgcgcccagcgcctaacctggctggaggcctcagagattgaggacgaggaggagaaggtctccaggtaccgagagctgctggtgcggctgccccctgtcaaccgggccacagtgaaggcccttatcagccacctgtactgtgttcagtgcttctcagacacgaaccagatgaacgtgcacaacctggcaattgtgtttgggcccacgctcttccagacagatgggcaggactacaaggctggccgtgtggtggaagacctcattaaccactatgtggtggtgtttagtgtggatgaggaagagctcaggaagcagcgggaggagatcactgccattgtgaagatgcgcgtggctggcactgccagtgggacccagcatgccggtgacttcatctgcacagtgtatctggaagagaagaaggcagagactgagcagcatatcaaggtcccagcatccatgactgctgaggagctcaccctggagatcctggatcgccggaacgtgggcatcagggagaaggactattggacctgctttgaggtcaacgagagggaggaggcagagcgccccctgcactttgcggagaaggtgctgcccatcctgcacgggctgggcacggacagccacctggtggtgaagaagcaccaggccatggaggccatgctgctgtacctggccagccgtgtcggtgacaccaagcatggcatgatgaagttccgtgaggaccgcagcctcctgggcctgggcctgccctcaggtggcttccacgatcgctacttcatcctcaacagcagctgcttgcggctctacaaggaggtccggagccagaggccgtggagcggggcccctgagaccagtcaccggcctgagaaggagtggcctattaagagtctcaaagtctacctgggagtgaagaagaaactcaggccacccacctgctggggcttcacagtggtgcatgagacagagaaacatgagaagcagcagtggtacctctgctgtgacacacagatggagctccgggagtggttcgctacctttctgtttgtgcagcatgacggcctggtgtggccctcagagccctcacgcgtgtcccgggcagtgcctgaggtccggctgggtagtgtgtcactgatcccccttcgaggtagtgaaaatgaaatgcgccggagtgtggctgccttcaccgcggaccctctgtctcttctgcgcaacgtctgagcacaggagcccatccttggctctaggattccgccgctggaagccttctgttcagacaccccttatgctccaaggcctgatgtgagccagcggggggtgcatgggaaactgcaccccacaacccacatcctccatcctgactgcagcatggggttccccggcaggggtgggaggcagcaggggtcagcctgggcaggaacctctcccaactctgtccaggtgttcagacctcttggcccaacctgctcaccccaccgggttcactgtccttgtggggctggagagatgggcataagtcaggaacttgggaggaccaccaccctttcagaggcgtgaggccctggggccctgccggaagggagccccctgctcctcccaacaaactccagaacagcagaaagcgggtgctgtagaggagcactcagctcacggggagggagctcttggctgagcttctacagggctgagagctgcgctttggggacttcagccttccttccagtctgggctgagtggggggtccagactacctgatgccccttccccaatttggggactttttgataatataaatatatctgtatatttt

SEQ ID NO: 108578 - DNA, 2683 bp, Homo sapiens
  Payload ID: 1332
  Gene Symbol: ARAP1
  Gene Name: ArfGAP with RhoGAP domain, ankyrin repeat and PH domain 1
  ENST ID: ENST00000455638
  CDS Start-End: 50-2089
ccttgccagtccttcagagccattgtagcaggaggcagagtacagagtgatagatgcttctggaaaaggagagttcagccggcgctggtgtgtccttggtgacggggtcctgagctactttgagaatgagcgggcagtgacccccaatggagagattcgggccagcgagattgtgtgcctggcagtgccccctcctgacacccatggctttgagcacacctttgaggtgtacacggagggagaacggctgtacctgtttgggctggagagtgcggagcaggctcatgagtgggtcaagtgtattgctaaggcattcgtgcctcccctagccgaggatctgctggcccgggattttgagcggctgggacgcctaccctacaaagctggcctgagcctacagcgggcccaggagggctggttctctctcagtggctcggagctccgtgctgtcttcccggaggggccctgcgaagagccgctgcaactacggaaactgcaggagctttccatccagggggacagtgagaaccaggtgctggtgctggtggagcgaaggaggacactgtacatacagggcgagcggcggctggacttcatgggttggctgggggccatccagaaagcagccgccagcatgggggacacgctgtcggagcagcagcttggggactcggatatcccggtgatcgtgtaccgctgtgtggactacatcacgcagtgcggcctgacctccgagggcatctaccgcaagtgtgggcagacatcgaagacacagcggctgctggagagcctgcggcaggatgcgcgctctgtgcacctcaaggagggcgagcagcacgtggatgatgtttcctcggcgctcaagcgcttcctgcgcgacctgcctgatgggctcttcactcgcgcccagcgcctaacctggctggaggcctcagagattgaggacgaggaggagaaggtctccaggtaccgagagctgctggtgcggctgccccctgtcaaccgggccacagtgaaggcccttatcagccacctgtactgtgttcagtgcttctcagacacgaaccagatgaacgtgcacaacctggcaattgtgtttgggcccacgctcttccagacagatgggcaggactacaaggctggccgtgtggtggaagacctcattaaccactatgtggtggtgtttagtgtggatgaggaagagctcaggaagcagcgggaggagatcactgccattgtgaagatgcgcgtggctggcactgccagtgggacccagcatgccggtgacttcatctgcacagtgtatctggaagagaagaaggcagagactgagcagcatatcaaggtcccagcatccatgactgctgaggagctcaccctggagatcctggatcgccggaacgtgggcatcagggagaaggactattggacctgctttgaggtcaacgagagggaggaggcagagcgccccctgcactttgcggagaaggtgctgcccatcctgcacgggctgggcacggacagccacctggtggtgaagaagcaccaggccatggaggccatgctgctgtacctggccagccgtgtcggtgacaccaagcatggcatgatgaagttccgtgaggaccgcagcctcctgggcctgggcctgccctcaggtggcttccacgatcgctacttcatcctcaacagcagctgcttgcggctctacaaggaggtccggagtcaccggcctgagaaggagtggcctattaagagtctcaaagtctacctgggagtgaagaagaaactcaggccacccacctgctggggcttcacagtggtgcatgagacagagaaacatgagaagcagcagtggtacctctgctgtgacacacagatggagctccgggagtggttcgctacctttctgtttgtgcagcatgacggcctggtgtggccctcagagccctcacgcgtgtcccgggcagtgcctgaggtccggctgggtagtgtgtcactgatcccccttcgaggtagtgaaaatgaaatgcgccggagtgtggctgccttcaccgcggaccctctgtctcttctgcgcaacgtctgagcacaggagcccatccttggctctaggattccgccgctggaagccttctgttcagacaccccttatgctccaaggcctgatgtgagccagcggggggtgcatgggaaactgcaccccacaacccacatcctccatcctgactgcagcatggggttccccggcaggggtgggaggcagcaggggtcagcctgggcaggaacctctcccaactctgtccaggtgttcagacctcttggcccaacctgctcaccccaccgggttcactgtccttgtggggctggagagatgggcataagtcaggaacttgggaggaccaccaccctttcagaggcgtgaggccctggggccctgccggaagggagccccctgctcctcccaacaaactccagaacagcagaaagcgggtgctgtagaggagcactcagctcacggggagggagctcttggctgagcttctacagggctgagagctgcgctttggggacttcagccttccttccagtctgggctgagtggggggtccagactacctgatgccccttccccaatttggggactttttgataatataaatatatctgtatattttaccct

SEQ ID NO: 108579 - DNA, 4066 bp, Homo sapiens
  Payload ID: 1332
  Gene Symbol: ARAP1
  Gene Name: ArfGAP with RhoGAP domain, ankyrin repeat and PH domain 1
  ENST ID: ENST00000426523
  CDS Start-End: 406-3990
acctccaagagaacgcagcctcagacccacccaggggccaggggccaggctgtttgcgagaccagcccaggcgggacccaggcttgcacgggcaggtacacgacattcttgggcatacgcagcccgcctggccggagctgtgggagtcctcagccccaagacccagcaggcgtctgaggcctgcccactaaggaggaggagtcattgctgccatcattatcatcccctccccagccacagtctgaggagcccctgtccaccctcccccaggggcctccccagcctccctctccacctccctgccccccggagatacctccaaagccggtacgcctgttcccagagttcgatgactctgactacgatgaggtcccagaggaggggccgggggccccagccagagtgatgaccaagaaggaggagcccccaccgagccgagtcccacgggccgtgcgcgtggccagtctgctgagcgagggagaggaactgtctggggacgaccaaggggatgaggaagaggatgaccacgcctatgagggcgtccccaatggcggatggcataccagcagcctgagcttgtccttgcccagcacaatagctgcgccacaccccatggacgggccgcctgggggctccacccccgtcacaccagtcatcaaggctggctggctggacaagaacccaccgcagggatcttacatctatcagaaacgatgggtgagactggatactgatcacctgcgatactttgacagtaacaaggacgcttactctaagcgctttatctctgtggcctgcatctcccacgtggctgccatcggggaccagaagtttgaagtgatcacaaacaaccgaacctttgccttccgggcagagagtgatgtggagcggaaggagtggatgcaggccctgcagcaggccatggctgagcagcgtgcccgggcccggctctctagcgcttatctgctgggagttccaggctcagagcagcctgaccgcgctggcagcctggagcttcgtggcttcaagaataagctgtacgtggccgtggtcggggacaaagtgcagctctacaagaatctagaggagtaccacctgggcattggcatcaccttcatcgacatgagcgtgggcaacgtgaaggaagtggaccggcgcagcttcgacctcaccacgccctaccgcatcttcagcttctctgctgactcagagctagagaaggagcagtggttggaggccatgcagggagccatcgctgaggccctgtctacctcggaggtggccgagcgcatctgggctgcagcccccaacaggttctgtgctgactgcggggctcctcagcctgactgggcctccatcaacctctgtgttgttatctgcaagcgctgtgcaggggagcaccgtggcctgggcgctggcgtctccaaggtgcggagcctgaagatggacaggaaggtgtggacagaaacacttatcgagctcttcttacagctggggaatggcgctgggaaccgcttctgggcagccaacgtgccccccagtgaggccctgcagcccagcagcagccccagcacccggcggtgccacctggaggccaagtaccgtgagggcaagtaccgccgctaccacccgctctttggcaaccaggaggagctggacaaggccctgtgtgctgcagtcaccaccacagacctggctgagacccaggcgctcctgggctgtggggctgggatcaactgcttctcgggggaccctgaggcccccacgcccctggctcttgcagagcaggcggggcagacgctgcagatggaattccttcggaacaaccggaccacagaggtgcctcggctggactcgatgaagcccctggaaaagcactactcagttgtcctgccgaccgtgagccacagtggcttcctctacaagactgcctctgccggcaagctgctacaggaccgccgggcccgggaagagttcagccggcgctggtgtgtccttggtgacggggtcctgagctactttgagaatgagcgggcagtgacccccaatggagagattcgggccagcgagattgtgtgcctggcagtgccccctcctgacacccatggctttgagcacacctttgaggtgtacacggagggagaacggctgtacctgtttgggctggagagtgcggagcaggctcatgagtgggtcaagtgtattgctaaggcattcgtgcctcccctagccgaggatctgctggcccgggattttgagcggctgggacgcctaccctacaaagctggcctgagcctacagcgggcccaggagggctggttctctctcagtggctcggagctccgtgctgtcttcccggaggggccctgcgaagagccgctgcaactacggaaactgcaggagctttccatccagggggacagtgagaaccaggtgctggtgctggtggagcgaaggaggacactgtacatacagggcgagcggcggctggacttcatgggttggctgggggccatccagaaagcagccgccagcatgggggacacgctgtcggagcagcagcttggggactcggatatcccggtgatcgtgtaccgctgtgtggactacatcacgcagtgcggcctgacctccgagggcatctaccgcaagtgtgggcagacatcgaagacacagcggctgctggagagcctgcggcaggatgcgcgctctgtgcacctcaaggagggcgagcagcacgtggatgatgtttcctcggcgctcaagcgcttcctgcgcgacctgcctgatgggctcttcactcgcgcccagcgcctaacctggctggaggcctcagagattgaggacgaggaggagaaggtctccaggtaccgagagctgctggtgcggctgccccctgtcaaccgggccacagtgaaggcccttatcagccacctgtactgtgttcagtgcttctcagacacgaaccagatgaacgtgcacaacctggcaattgtgtttgggcccacgctcttccagacagatgggcaggactacaaggctggccgtgtggtggaagacctcattaaccactatgtggtggtgtttagtgtggatgaggaagagctcaggaagcagcgggaggagatcactgccattgtgaagatgcgcgtggctggcactgccagtgggacccagcatgccggtgacttcatctgcacagtgtatctggaagagaagaaggcagagactgagcagcatatcaaggtcccagcatccatgactgctgaggagctcaccctggagatcctggatcgccggaacgtgggcatcagggagaaggactattggacctgctttgaggtcaacgagagggaggaggcagagcgccccctgcactttgcggagaaggtgctgcccatcctgcacgggctgggcacggacagccacctggtggtgaagaagcaccaggccatggaggccatgctgctgtacctggccagccgtgtcggtgacaccaagcatggcatgatgaagttccgtgaggaccgcagcctcctgggcctgggcctgccctcaggtggcttccacgatcgctacttcatcctcaacagcagctgcttgcggctctacaaggaggtccggagtcaccggcctgagaaggagtggcctattaagagtctcaaagtctacctgggagtgaagaagaaactcaggccacccacctgctggggcttcacagtggtgcatgagacagagaaacatgagaagcagcagtggtacctctgctgtgacacacagatggagctccgggagtggttcgctacctttctgtttgtgcagcatgacggcctggtgtggccctcagagccctcacgcgtgtcccgggcagtgcctgaggtccggctgggtagtgtgtcactgatcccccttcgaggtagtgaaaatgaaatgcgccggagtgtggctgccttcaccgcggaccctctgtctcttctgcgcaacgtctgagcacaggagcccatccttggctctaggattccgccgctggaagccttctgttcagacaccccttatgctccaaggc

SEQ ID NO: 108580 - DNA, 994 bp, Homo sapiens
  Payload ID: 1332
  Gene Symbol: ARAP1
  Gene Name: ArfGAP with RhoGAP domain, ankyrin repeat and PH domain 1
  ENST ID: ENST00000452383
  CDS Start-End: 231-994
cccggctcctccacaaggcagaaggagcttgagatcctctggaggctctggctgactgggcagctgtgtccaggcagccagcaggggccctgtgtgctgcagtcaccaccacagacctggctgagacccaggcgctcctgggctgtggggctgggatcaactgcttctcgggggaccctgaggcccccacgcccctggctcttgcagagcaggcggggcagacgctgcagatggaattccttcggaacaaccggaccacagaggtgcctcggctggactcgatgaagcccctggaaaagcactactcagttgtcctgccgaccgtgagccacagtggcttcctctacaagactgcctctgccggcaagctgctacaggaccgccgggcccgggaagagttcagccggcgctggtgtgtccttggtgacggggtcctgagctactttgagaatgagcgggcagtgacccccaatggagagattcgggccagcgagattgtgtgcctggcagtgccccctcctgacacccatggctttgagcacacctttgaggtgtacacggagggagaacggctgtacctgtttgggctggagagtgcggagcaggctcatgagtgggtcaagtgtattgctaaggcattcgtgcctcccctagccgaggatctgctggcccgggattttgagcggctgggacgcctaccctacaaagctggcctgagcctacagcgggcccaggagggctggttctctctcagtggctcggagctccgtgctgtcttcccggaggggccctgcgaagagccgctgcaactacggaaactgcaggagctttccatccagggggacagtgagaaccaggtgctggtgctggtggagcgaaggaggacactgtacatacagggcgagcggcggctggacttcatgggttggctgggggccatccagaaagcagccgccagcatgggggacacgctgtcggagcagcagcttgggga

SEQ ID NO: 108581 - DNA, 3883 bp, Homo sapiens
  Payload ID: 1332
  Gene Symbol: ARAP1
  Gene Name: ArfGAP with RhoGAP domain, ankyrin repeat and PH domain 1
  Uniprot ID: Q96P48
  ENST ID: ENST00000429686
  CDS Start-End: 406-3807
acctccaagagaacgcagcctcagacccacccaggggccaggggccaggctgtttgcgagaccagcccaggcgggacccaggcttgcacgggcaggtacacgacattcttgggcatacgcagcccgcctggccggagctgtgggagtcctcagccccaagacccagcaggcgtctgaggcctgcccactaaggaggaggagtcattgctgccatcattatcatcccctccccagccacagtctgaggagcccctgtccaccctcccccaggggcctccccagcctccctctccacctccctgccccccggagatacctccaaagccggtacgcctgttcccagagttcgatgactctgactacgatgaggtcccagaggaggggccgggggccccagccagagtgatgaccaagaaggaggagcccccaccgagccgagtcccacgggccgtgcgcgtggccagtctgctgagcgagggagaggaactgtctggggacgaccaaggggatgaggaagaggatgaccacgcctatgagggcgtccccaatggcggatggcataccagcagcctgagcttgtccttgcccagcacaatagctgcgccacaccccatggacgggccgcctgggggctccacccccgtcacaccagtcatcaaggctggctggctggacaagaacccaccgcagggatcttacatctatcagaaacgatgggtgagactggatactgatcacctgcgatactttgacagtaacaaggacgcttactctaagcgctttatctctgtggcctgcatctcccacgtggctgccatcggggaccagaagtttgaagtgatcacaaacaaccgaacctttgccttccgggcagagagtgatgtggagcggaaggagtggatgcaggccctgcagcaggccatggctgagcagcgtgcccgggcccggctctctagcgcttatctgctgggagttccaggctcagagcagcctgaccgcgctggcagcctggagcttcgtggcttcaagaataagctgtacgtggccgtggtcggggacaaagtgcagctctacaagaatctagaggagtaccacctgggcattggcatcaccttcatcgacatgagcgtgggcaacgtgaaggaagtggaccggcgcagcttcgacctcaccacgccctaccgcatcttcagcttctctgctgactcagagctagagaaggagcagtggttggaggccatgcagggagccatcgctgaggccctgtctacctcggaggtggccgagcgcatctgggctgcagcccccaacaggttctgtgctgactgcggggctcctcagcctgactgggcctccatcaacctctgtgttgttatctgcaagcgctgtgcaggggagcaccgtggcctgggcgctggcgtctccaaggtgcggagcctgaagatggacaggaaggtgtggacagaaacacttatcgaggccctgtgtgctgcagtcaccaccacagacctggctgagacccaggcgctcctgggctgtggggctgggatcaactgcttctcgggggaccctgaggcccccacgcccctggctcttgcagagcaggcggggcagacgctgcagatggaattccttcggaacaaccggaccacagaggtgcctcggctggactcgatgaagcccctggaaaagcactactcagttgtcctgccgaccgtgagccacagtggcttcctctacaagactgcctctgccggcaagctgctacaggaccgccgggcccgggaagagttcagccggcgctggtgtgtccttggtgacggggtcctgagctactttgagaatgagcgggcagtgacccccaatggagagattcgggccagcgagattgtgtgcctggcagtgccccctcctgacacccatggctttgagcacacctttgaggtgtacacggagggagaacggctgtacctgtttgggctggagagtgcggagcaggctcatgagtgggtcaagtgtattgctaaggcattcgtgcctcccctagccgaggatctgctggcccgggattttgagcggctgggacgcctaccctacaaagctggcctgagcctacagcgggcccaggagggctggttctctctcagtggctcggagctccgtgctgtcttcccggaggggccctgcgaagagccgctgcaactacggaaactgcaggagctttccatccagggggacagtgagaaccaggtgctggtgctggtggagcgaaggaggacactgtacatacagggcgagcggcggctggacttcatgggttggctgggggccatccagaaagcagccgccagcatgggggacacgctgtcggagcagcagcttggggactcggatatcccggtgatcgtgtaccgctgtgtggactacatcacgcagtgcggcctgacctccgagggcatctaccgcaagtgtgggcagacatcgaagacacagcggctgctggagagcctgcggcaggatgcgcgctctgtgcacctcaaggagggcgagcagcacgtggatgatgtttcctcggcgctcaagcgcttcctgcgcgacctgcctgatgggctcttcactcgcgcccagcgcctaacctggctggaggcctcagagattgaggacgaggaggagaaggtctccaggtaccgagagctgctggtgcggctgccccctgtcaaccgggccacagtgaaggcccttatcagccacctgtactgtgttcagtgcttctcagacacgaaccagatgaacgtgcacaacctggcaattgtgtttgggcccacgctcttccagacagatgggcaggactacaaggctggccgtgtggtggaagacctcattaaccactatgtggtggtgtttagtgtggatgaggaagagctcaggaagcagcgggaggagatcactgccattgtgaagatgcgcgtggctggcactgccagtgggacccagcatgccggtgacttcatctgcacagtgtatctggaagagaagaaggcagagactgagcagcatatcaaggtcccagcatccatgactgctgaggagctcaccctggagatcctggatcgccggaacgtgggcatcagggagaaggactattggacctgctttgaggtcaacgagagggaggaggcagagcgccccctgcactttgcggagaaggtgctgcccatcctgcacgggctgggcacggacagccacctggtggtgaagaagcaccaggccatggaggccatgctgctgtacctggccagccgtgtcggtgacaccaagcatggcatgatgaagttccgtgaggaccgcagcctcctgggcctgggcctgccctcaggtggcttccacgatcgctacttcatcctcaacagcagctgcttgcggctctacaaggaggtccggagtcaccggcctgagaaggagtggcctattaagagtctcaaagtctacctgggagtgaagaagaaactcaggccacccacctgctggggcttcacagtggtgcatgagacagagaaacatgagaagcagcagtggtacctctgctgtgacacacagatggagctccgggagtggttcgctacctttctgtttgtgcagcatgacggcctggtgtggccctcagagccctcacgcgtgtcccgggcagtgcctgaggtccggctgggtagtgtgtcactgatcccccttcgaggtagtgaaaatgaaatgcgccggagtgtggctgccttcaccgcggaccctctgtctcttctgcgcaacgtctgagcacaggagcccatccttggctctaggattccgccgctggaagccttctgttcagacaccccttatgctccaaggc

SEQ ID NO: 108582 - DNA, 1101 bp, Homo sapiens
  Payload ID: 1332
  Gene Symbol: ARAP1
  Gene Name: ArfGAP with RhoGAP domain, ankyrin repeat and PH domain 1
  ENST ID: ENST00000427971
  CDS Start-End: 180-1101
tctttcagtctgaggatggactgctccaggcctgggccctgtgtgctgcagtcaccaccacagacctggctgagacccaggcgctcctgggctgtggggctgggatcaactgcttctcgggggaccctgaggcccccacgcccctggctcttgcagagcaggcggggcagacgctgcagatggaattccttcggaacaaccggaccacagaggtgcctcggctggactcgatgaagcccctggaaaagcactactcagttgtcctgccgaccgtgagccacagtggcttcctctacaagactgcctctgccggcaagctgctacaggaccgccgggcccgggaagagttcagccggcgctggtgtgtccttggtgacggggtcctgagctactttgagaatgagcgggcagtgacccccaatggagagattcgggccagcgagattgtgtgcctggcagtgccccctcctgacacccatggctttgagcacacctttgaggtgtacacggagggagaacggctgtacctgtttgggctggagagtgcggagcaggctcatgagtgggtcaagtgtattgctaaggcattcgtgcctcccctagccgaggatctgctggcccgggattttgagcggctgggacgcctaccctacaaagctggcctgagcctacagcgggcccaggagggctggttctctctcagtggctcggagctccgtgctgtcttcccggaggggccctgcgaagagccgctgcaactacggaaactgcaggagctttccatccagggggacagtgagaaccaggtgctggtgctggtggagcgaaggaggacactgtacatacagggcgagcggcggctggacttcatgggttggctgggggccatccagaaagcagccgccagcatgggggacacgctgtcggagcagcagcttggggactcggatatcccggtgatcgtgtaccgctgtgtggactacatcacgcagtgcggcctgacctccgagggcatctaccgcaagtgtgggcagacatcgaagacacagcggctgctggagagcctgcggcaggatgcgcgctctgtgcacctcaaggagg

SEQ ID NO: 108583 - DNA, 699 bp, Homo sapiens
  Payload ID: 1332
  Gene Symbol: ARAP1
  Gene Name: ArfGAP with RhoGAP domain, ankyrin repeat and PH domain 1
  ENST ID: ENST00000542596
  CDS Start-End: 1-699
atgactgctgaggagctcaccctggagatcctggatcgccggaacgtgggcatcagggagaaggactattggacctgctttgaggtcaacgagagggaggaggcagagcgccccctgcactttgcggagaaggtgctgcccatcctgcacgggctgggcacggacagccacctggtggtgaagaagcaccaggccatggaggccatgctgctgtacctggccagccgtgtcggtgacaccaagcatggcatgatgaagttccgtgaggaccgcagcctcctgggcctgggcctgccctcaggtggcttccacgatcgctacttcatcctcaacagcagctgcttgcggctctacaaggaggtccggagtcaccggcctgagaaggagtggcctattaagagtctcaaagtctacctgggagtgaagaagaaactcaggccacccacctgctggggcttcacagtggtgcatgagacagagaaacatgagaagcagcagtggtacctctgctgtgacacacagatggagctccgggagtggttcgctacctttctgtttgtgcagcatgacggcctggtgtggccctcagagccctcacgcgtgtcccgggcagtgcctgaggtccggctgggtagtgtgtcactgatcccccttcgaggtacttctgcgcaacgtctgagcacaggagcccatccttgg

SEQ ID NO: 108584 - DNA, 639 bp, Homo sapiens
  Payload ID: 1332
  Gene Symbol: ARAP1
  Gene Name: ArfGAP with RhoGAP domain, ankyrin repeat and PH domain 1
  ENST ID: ENST00000536885
  CDS Start-End: 1-535
gaagaagaaactcaggccacccacctgctggggcttcacagtggtgcatgagacagagaaacatgagaagcagcagtggtacctctgctgtgacacacagatggagctccgggagtggttcgctacctttctgtttgtgcagcatgacggcctggtgtggccctcagagccctcacgcgtgtcccgggcagtgcctgaggtccggctgggtagtgtgtcactgatcccccttcgaggtagtgaaaatgaaatgcgccggagtgtggctgccttcaccgcggaccctctgtctgtgagtggctctccatgcctttgggcagggggctgggggcctggctgggtgcctgccttctactccacagtagatgattgccctgattgccctccccgattgccctccggccccctccctccagccttggtgggggccctcataggcctctttggttcacaccattcaaaggagccccttctgcctggccctggaagctgggagtcccctctgcctggccctgggagctgggagcctggctgattggagtgctccccggctggcagtggagagtggctgcagcagctgcagcagcttcagcggggcgccagcccctctgggccttcacaaaatacctgtgggtctct

SEQ ID NO: 108585 - DNA, 7514 bp, Homo sapiens
  Payload ID: 1333
  Gene Symbol: ARAP2
  Gene Name: ArfGAP with RhoGAP domain, ankyrin repeat and PH domain 2
  Uniprot ID: Q8WZ64
  ENST ID: ENST00000303965
  CDS Start-End: 491-5605
agcggcggccgaggcgaggcgcgggagcacctgagcaaggcgcgggcgccgggctcggcgtttccggagctgagcgcgggtccgcggcccgcgctccccgcctccaggtgcggcggccgcgacacgccggccccactaacagcgccgcccgcgcggccgccgccaggcagcagaggcgactgcggacagccggcggggaccgggaaagaggaggcctggcgcctccggcagaggggcgaggaccgagcgcccaaggctgggagagacgccggcgctgagcttcccagcgccgcctcacctcgcttttcgaactccgcgacccgagcgcaaggcttaagcaggtaaagcagtcactgtgaagaaaataacattttaagaaacttttctgtcacaattgatagaggaaaagccagtagagaagtacatcttcttgtgtgtgtgtctcatcgtgccactttttgtaactcagcttagtaatgaagccaccattatgtcctcagtcagtgaagtaaatgtggatataaaagatttcctaatgagcattaatttggagcagtatctcttacatttccatgagtctggttttactactgtgaaggactgtgcagcaataaatgacagcctgctgcagaaaattggaatatcacctacaggtcaccgtaggaggatacttaaacagttacagataatcttgtcaaaaatgcaagatattccaatatatgcaaatgttcataaaactaagaagaatgatgacccttcaaaggattaccatgttccatcttctgatcagaatatctgcatagaactttccaattctggtagtgttcagacatctagcccaccgcagttggagactgttagaaaaaatcttgaagacagtgatgcaagtgtggaaagaagccagtatcctcaatcagatgataagctgtctcctcctaaacgcgacttccccactgcagaggaaccacacctgaatttgggttctttgaatgattctttatttggtagtgacaatattaaaatagaatcattgattacaaagaagactgtggatcacacagttgaagaacaacaaacagaaaaagttaaattgatcacagaaaatctcagtaagctccctaatgcagactctgaatgcctttcttttgttggctgttcaacatcaggaacaaattctggaaatggaacaaatggtttattagaaggatcaccaccatccccattctttaagtttcaaggagaaatgattgtaaatgacttgtatgttccatcatcaccaatcctagcacctgtgagaagtcgtagcaagttggtttcaagaccatctcgatcttttctgctaagacatcgacctgtaccagagattccagggtcaacaaaaggagtttctgggagctatttccgtgaaagaagaaatgttgctacctcaactgaaaaatctgtggcatggcaaaattcaaatgaggagaattcatcttccatctttccttatggagagacctttctcttccagagactagaaaattccaagaagcgatctataaagaatgaatttttgacccagggagaagcactcaaaggggaagcagctactgcaacaaactcttttatcatcaaatcaagcatatacgataacagaaaggagaaaataagcgaggacaaggtggaagatatttggatacctcgagaggacaaaaacaattttttgatagacactgcttctgaatcagaatactcaacagtagaagaatgctttcagagtttaagaagaaaaaattcaaaggcatctaaatctaggactcaaaaagccttgattttggactccgttaataggcacagttatccgttaagctcaacaagtggaaatgctgattcatcagccgtttcttcacaggcaatatctccctatgcctgcttttatggagcatctgcaaagaaggttaaatcaggatggctggataaactctctcctcaaggaaaacgcatgtttcaaaagagatgggtgaaatttgatggccttagcatttcttactacaataatgagaaggagatgtattcgaaaggaataattcccctttctgctatatcaacagtacgagttcaaggagacaacaaatttgaagttgttacaacacaaagaacttttgtttttagagtagaaaaagaagaggagagaaatgactggatcagcatactattaaatgcactgaaatcacaatcccttacctcgcagtctcaagctgttgttacacctgagaaatgtggatatcttgaattgagaggctataaggcaaaaatttttactgtgttaagtggaaacagtgtgtggctttgcaaaaacgaacaggattttaagagtggacttggtattaccataattcctatgaatgtagcaaatgtaaagcaagtggaccgaactgtgaaacaatcttttgaaataatcactccctacaggagtttcagctttacagccgagactgaaaaggagaaacaagactggattgaagctgtgcagcaatcaatagcagaaactctctctgattatgaagtagctgagaagatttggttcaatgaatccaacaggagctgtgcagattgtaaagccccagatcctgactgggcatccatcaatctctgtgttgtcatctgtaagaagtgtgcaggacagcatagatctttaggaccaaaagattccaaggttagaagtctaaaaatggatgctagcatttggagcaatgaactcatcgagctttttattgtcattggaaacaaaagagcaaatgacttttgggctggtaatcttcaaaaggatgaagaattacatatggactcaccagtagaaaagagaaaaaactttattactcagaaatataaagaaggaaaattcagaaaaactcttttggcatctctcaccaaagaagaattaaataaggctctatgtgctgctgtagtgaaaccggatgttctagaaacaatggctttgctgttcagtggagcagatgtcatgtgtgccaccggagaccccgtgcatagcaccccctatctgctagccaagaaagctgggcaaagtctgcaaatggaatttctctaccataacaaattctcagatttccctcaacatgatattcattccgagggtgtattaagtcaagagtcttcccagtccacattcctctgtgactttttatatcaagctccttctgctgcttctaaactctcttcagagaaaaaactgcttgaagagacaaataaaaaatggtgtgttttggaaggaggcttcttgagttactatgaaaatgataagtctaccacacctaatggcaccattaatatcaatgaagttatctgcctggctatacacaaagaggacttctatttaaatactgggcccatctttatctttgagatctacttaccctccgaacgtgtgtttttatttggagctgaaacatctcaagctcaaagaaaatggacagaggcaatagccaagcattttgttcccttatttgctgaaaacttaacagaagctgactatgatttgattggtcaactcttctacaaagactgccatgccctggatcagtggagaaaaggctggtttgctatggacaaatccagcttgcatttttgccttcaaatgcaagaagttcagggagatagaatgcacttaagaagactgcaagagctaacaatcagcacaatggttcaaaatggggaaaaactggatgttttactcttggtagaaaaagggagaacattatacatccatgggcataccaagttggatttcacagtctggcatactgcaattgaaaaagcagcaggtacagatggtaatgctttacaagatcagcagctcagcaaaaatgacgttcccattatagtgaacagctgtatagcatttgttacacagtatggtttaggatgcaaatatatctatcaaaagaatggtgatcctttgcatataagtgaactcctggagagtttcaaaaaggatgcaagaagctttaaattgagggctggaaaacatcagcttgaagatgtgacggctgtgttgaaaagttttctctctgacattgatgatgcactgcttactaaggagctctacccatattggatctctgctttagatacgcaagatgacaaggaaagaattaaaaaatatggagcatttatacgttctcttccaggggtcaaccgagcaacactagcagctatcattgaacacctgtatagggttcagaaatgctcagaaatcaatcacatgaatgcccataatttggccttggtcttttcatcctgtttgtttcaaacgaagggacaaactagtgaagaagtgaatgtaattgaggacctaattaataattatgtagaaatatttgaggttaaagaagatcaagtcaaacaaatggacatagaaaatagctttattaccaagtggaaagacacccaagtttcccaggctggagatttgttaattgaagtatatgtagaaaggaaggaacccgactgtagtattataattcggatatctcctgtgatggaagcagaagaattaactaatgatatattagcgataaaaaatattattcctacaaaaggtgatatttgggccacatttgaagtcattgaaaatgaagagctagagcgtcctcttcactacaaggaaaatgtactggagcaggtgcttcggtggagttcattagctgaacctggctctgcttacctggtggtgaagagattcttaaccgctgacacaattaaacactgcagtgaccggagtacactgggaagcatcaaagaaggaatcttgaaaatcaaagaagaaccatccaaaatactatctggaaataagtttcaagaccggtattttgttttacgagatgggtttctctttctttacaaggatgtgaagagtagtaaacatgacaagatgttttctctcagttccatgaagttttatcgtggagtgaaaaagaaaatgaagcctccaacaagctggggattgaccgcatattctgagaaacatcactggcacctgtgttgtgatagttcacgaactcagacggagtggatgaccagtatctttattgcccagcatgaatatgatatatggccaccagctggaaaggaacgaaaacgttcaataaccaaaaatcccaaaattggaggtttgcctctgattcctatacagcatgaggggaatgcaaccttggcccggaaaaatattgagagtgcaagagcagaacttgaaaggctgcggctcagtgaaaagtgtgataaagagtccgtggactctagcttaaaggagagagcttccatggtggcccactgcctggagcacaaggacgataaacttcgaaatcgaccccgaaaacatcggagtttcaactgcctggaggacacagagcctgaagccccacttgggcaaccaaaaggccataaaggcctaaagacattgaggaagactgaggacaggaatagcaaagctactttggactctgatcataagttaccatcaagggtaattgaagaacttaatgtggttctacaacggtcaagaacccttccaaaagaattacaggatgagcagattttgaagtaggaaataaaatgaattgctccccagattatttttttaatattgtatgcaatctttatgtgtaactccaaaactgaactataagataattcataagaatttgcctattgataggcaaatttgtctatgcttaggcatttaaggagcatttaaaaatatgtatatatgtgactgaatgtaagattaactttattttggtctgaacaaaccttgtaaagttccattgtattaacgtgtgtaagaagacattgggttacttaggtggtcagtccttttaaagtagttgtctgttaagtggtataatttatgagcagaaatctcaaactgtactgtattgtataaaatgctgtgtttaaatgaagcctaagaaactatctgtaacatattttgcactttgagaaaccttgtatattaaattaccatatgtttttaggtttacagaagttctaccttagggaaaagaaagggaagtaaattgaaaaaggggggagaatttattgtagtggctgcctaaaaaccactggagtttttaaaagaagcaaggagttaaatgtcctgcaaaacaaggaagtgagctaagattcattctagttcactaatgaccagaacttgtcaatgagaaaccacttgttaagaaaaagtccagtgtttatttctcaagagtaatattcggccaacagatgtaaataatagcactagccactcttattaatatttatagtgttagaaaaccagccacattacagattcactacgtttgagctcattgttggtggctgctaagaggaaacttacactgcattggagaggttgtgtacacaggacctggcctggatgctgattgcactgtcattgtatgcaagcattttgtcttttttcagaatttctgactatacttttggtacgaacaaaattcatcaccacagggtcctgttgttttgtttgatttttagatttttttaaattattattaaggttgtaatgtttttctccgagttgtcagaaataactggaagaatacaatatatggccattatggagccaggggctagttggtggtttactatacatttgggggctacctggtcacatttaatctaggtttttttttctttttttaagtaaaggtgtggtctcttccctgtacttatgaataaggacaaagccctatttttgtttccacataaagatcagctactgaattggtgaatttcctgacagacaatgctatctaaccatagttcatgttaggggaagcatttttccatcagtttctttaaaattggattgtctggtgagttttgatattaaacattatgtagctaagttttttttttttagcatttcttttttatttttcaatctatattcacaggcccatacttcagtcagtccaatcatagtacagtgatgtggtggtagatgctatgaatttcttcattgtaaaatacggatcatttgtattttggggtgataaaatagttcaccatgggtatgagatatttattctttaaatcaaagtaaattagaatttttaaaaagcacaaaactgcaggacagtttatgaaataggtggcactattagggaatcttcctttaaagcaagaaatcatgttatttagaaagaaaaactaatcttaaacatactatttctaataaatatttatatttttatgaaataaagaggtatgtggaaattaatatttggtgatgttggacagtggaaaagtatctagagtttttacctgccttatctgaattcttcttgaaacttgagcttaaactctaatagctgtttccctttctattctgaacaactgtctccatttttcaagtgtgagagataagggctaatgatgacatctcatttattttgagtaaacattaaaattgttttacaagtctacttgaa

SEQ ID NO: 108586 - DNA, 631 bp, Homo sapiens
  Payload ID: 1333
  Gene Symbol: ARAP2
  Gene Name: ArfGAP with RhoGAP domain, ankyrin repeat and PH domain 2
  ENST ID: ENST00000506189
  CDS Start-End: 491-631
ggatccggatagacagctggacactccctccattcctctcccctacctttaaataagaagaagctgtagtgagtttcaggcaccaagttatttactcggtagagatcatgaatttgcccgggtgtctgtgctgccccgcaccctgcttgttaaccacgttaagacgactggcctgttaattaactttaattacgatcatttggcttccacctgcctgaacccgataccttacacgggaacctgtatgatgtgagtttaccagattgatctttcttgtttacttttggagacagttctcttgggagaagtggtgtccatcctatttaataaagcttaagcaggtaaagcagtcactgtgaagaaaataacattttaagaaacttttctgtcacaattgatagaggaaaagccagtagagaagtacatcttcttgtgtgtgtgtctcatcgtgccactttttgtaactcagcttagtaatgaagccaccattatgtcctcagtcagtgaagtaaatgtggatataaaagatttcctaatgagcattaatttggagcagtatctcttacatttccatgagtctggttttactactgtgaaggactgtgcagcaataaatgacagcctgctgcag

SEQ ID NO: 108587 - DNA, 396 bp, Homo sapiens
  Payload ID: 1333
  Gene Symbol: ARAP2
  Gene Name: ArfGAP with RhoGAP domain, ankyrin repeat and PH domain 2
  ENST ID: ENST00000511416
  CDS Start-End: 245-396
agcatatacgataacagaaaggagaaaataagcgaggacaaggtggaagatatttggatacctcgagaggacaaaaacaattttttgatagacactgcttctgaatcagaatactcaacagtagaagaatgctttcagagtttaagaagaaaaaattcaaaggcatctaaatctaggactcaaaaagccttgattttggactccgttaataggcacagttatccgttaagctcaacaagtggaaatgctgattcatcagccgtttcttcacaggcaatatctccctatgcctgcttttatggagcatctgcaaagaaggttaaatcaggatggctggataaactctctcctcaagggaaatttgattttgaataaaccaaagcagattacttctta

SEQ ID NO: 108588 - DNA, 2592 bp, Homo sapiens
  Payload ID: 1333
  Gene Symbol: ARAP2
  Gene Name: ArfGAP with RhoGAP domain, ankyrin repeat and PH domain 2
  ENST ID: ENST00000618163
  CDS Start-End: 1-2592
atggatgctagcatttggagcaatgaactcatcgagctttttattgtcattggaaacaaaagagcaaatgacttttgggctggtaatcttcaaaaggatgaagaattacatatggactcaccagtagaaaagagaaaaaactttattactcagaaatataaagaaggaaaattcagaaaaactcttttggcatctctcaccaaagaagaattaaataaggctctatgtgctgctgtagtgaaaccggatgttctagaaacaatggctttgctgttcagtggagcagatgtcatgtgtgccaccggagaccccgtgcatagcaccccctatctgctagccaagaaagctgggcaaagtctgcaaatggaatttctctaccataacaaattctcagatttccctcaacatgatattcattccgagggtgtattaagtcaagagtcttcccagtccacattcctctgtgactttttatatcaagctccttctgctgcttctaaactctcttcagagaaaaaactgcttgaagagacaaataaaaaatggtgtgttttggaaggaggcttcttgagttactatgaaaatgataagtctaccacacctaatggcaccattaatatcaatgaagttatctgcctggctatacacaaagaggacttctatttaaatactgggcccatctttatctttgagatctacttaccctccgaacgtgtgtttttatttggagctgaaacatctcaagctcaaagaaaatggacagaggcaatagccaagcattttgttcccttatttgctgaaaacttaacagaagctgactatgatttgattggtcaactcttctacaaagactgccatgccctggatcagtggagaaaaggctggtttgctatggacaaatccagcttgcatttttgccttcaaatgcaagaagttcagggagatagaatgcacttaagaagactgcaagagctaacaatcagcacaatggttcaaaatggggaaaaactggatgttttactcttggtagaaaaagggagaacattatacatccatgggcataccaagttggatttcacagtctggcatactgcaattgaaaaagcagcaggtacagatggtaatgctttacaagatcagcagctcagcaaaaatgacgttcccattatagtgaacagctgtatagcatttgttacacagtatggtttaggatgcaaatatatctatcaaaagaatggtgatcctttgcatataagtgaactcctggagagtttcaaaaaggatgcaagaagctttaaattgagggctggaaaacatcagcttgaagatgtgacggctgtgttgaaaagttttctctctgacattgatgatgcactgcttactaaggagctctacccatattggatctctgctttagatacgcaagatgacaaggaaagaattaaaaaatatggagcatttatacgttctcttccaggggtcaaccgagcaacactagcagctatcattgaacacctgtatagggttcagaaatgctcagaaatcaatcacatgaatgcccataatttggccttggtcttttcatcctgtttgtttcaaacgaagggacaaactagtgaagaagtgaatgtaattgaggacctaattaataattatgtagaaatatttgaggttaaagaagatcaagtcaaacaaatggacatagaaaatagctttattaccaagtggaaagacacccaagtttcccaggctggagatttgttaattgaagtatatgtagaaaggaaggaacccgactgtagtattataattcggatatctcctgtgatggaagcagaagaattaactaatgatatattagcgataaaaaatattattcctacaaaaggtgatatttgggccacatttgaagtcattgaaaatgaagagctagagcgtcctcttcactacaaggaaaatgtactggagcaggtgcttcggtggagttcattagctgaacctggctctgcttacctggtggtgaagagattcttaaccgctgacacaattaaacactgcagtgaccggagtacactgggaagcatcaaagaaggaatcttgaaaatcaaagaagaaccatccaaaatactatctggaaataagtttcaagaccggtattttgttttacgagatgggtttctctttctttacaaggatgtgaagagtagtaaacatgacaagatgttttctctcagttccatgaagttttatcgtggagtgaaaaagaaaatgaagcctccaacaagctggggattgaccgcatattctgagaaacatcactggcacctgtgttgtgatagttcacgaactcagacggagtggatgaccagtatctttattgcccagcatgaatatgatatatggccaccagctggaaaggaacgaaaacgttcaataaccaaaaatcccaaaattggaggtttgcctctgattcctatacagcatgaggggaatgcaaccttggcccggaaaatattgagagtgcaagagcagaacttgaaaggctgcggctcagtgaaaagtgtgataaagagtccgtggactctagcttaa

SEQ ID NO: 108589 - DNA, 5250 bp, Homo sapiens
  Payload ID: 1334
  Gene Symbol: ARAP3
  Gene Name: ArfGAP with RhoGAP domain, ankyrin repeat and PH domain 3
  Uniprot ID: Q8WWN8
  ENST ID: ENST00000239440
  CDS Start-End: 67-4701
ctcggacgagcggcgggcacccgcgagcggacggcggccgcgtagtgagcaatggcctgagcccccatggctgcccctcaggacctggacatcgctgtgtggctggccacggtgcacctggagcagtatgcagacacgttccgacggcatggcctggctacagcaggtgcagcccggggcctgggccacgaggagttgaagcagttgggcatcagcgccacagggcaccggaaacgcattctacgcctgctacagacaggcaccgaagagggctccctggatcccaaatcagatagtgccatggaaccatcccccagcccagccccgcaagcccagccccctaagcccgtgccgaagcccaggaccgtgtttggtggactcagtggccctgccaccactcagagacctgggctgagcccagccctcgggggaccaggagtgtccaggagcccagagcccagcccaaggcctcctcctctccccacttcctcctctgagcagtcttcagccctaaatactgtggagatgatgcctaattccatctacttcggcctggactcaagaggcagggcacaggcagctcaggacaaggccccagacagctcccaaatctctgcccccacccctgccctcaggcccacaacaggcacagtgcacatcatggatcctggttgcctgtactatggtgtccaacctgtggggactccaggagcccccgacagaagagagagcagaggtgtttgtcagggcagggctgaacacaggctcagcagacaggatctggaggcacgggaggatgctggctatgccagccttgagctacctggagactccaccctcttatcgcccaccctggaaacagaggagaccagtgatgacctcatttcaccctatgccagcttctccttcacggcagaccgcctcacgcccctgctcagtggctggctagacaagctctcccctcagggaaactatgtcttccagagacgctttgtgcagttcaatgggaggagtctgatgtactttggcagtgacaaggaccccttccctaagggtgtgatacctttgactgccattgagatgacccgcagcagcaaggacaacaagttccaggtcatcaccggccagagggtgttcgtgttccgcacagagagcgaggctcagcgggacatgtggtgctccacgctgcagtcctgtctgaaggagcagcgcctcctgggccacccccggcccccccaaccaccccgacccctccgcacgggcatgctggagctgcgtggacacaaggccaaggtgtttgctgccttgagccctggagagctggcactgtacaagagtgagcaggccttctctctgggcatcgggatctgcttcatcgaactgcagggctgcagcgtccgggagaccaagagtcgaagctttgacctgctcacaccccatcgctgcttcagcttcacagccgagtctgggggtgctcggcagagctgggcggccgctctgcaggaagcagtaaccgagaccctgtctgactacgaggtggctgagaagatctggtctaatcgggccaaccggcagtgtgcggactgtgggtcctcccgcccagattgggctgctgtcaatttgggggtggtcatctgcaagcagtgtgcaggtcagcaccgggccctgggttctgggatctccaaggtgcagagcctgaagctggacacgagtgtctggagtaatgagatagtacagttattcattgtcctgggaaatgatcgtgccaaccgcttctgggcagggaccctacccccaggtgagggactacatccagatgcgacccctggcccccggggagagttcatctcccgaaagtaccgtctgggtctcttccggaagccccaccctcagtacccagatcatagccagcttctccaggcactgtgtgcagctgtggcaagacccaacctgctgaagaacatgacccagctcctctgtgttgaggcctttgaaggcgaggagccctggttccccccagcccctgatggcagctgccctggcctcttgccctcagacccctcccctggtgtgtacaatgaggtggtggtgcgtgctacttacagcggcttcctgtactgcagtcccgtcagcaacaaagctggaccctcaccccctcgcaggggccgggatgctcccccgcgcctttggtgtgtgctgggagcagctctggaaatgtttgcatcggaaaacagccctgaacccctcagcctcatacagccccaggatattgtatgtctgggtgtgagccccccacccactgacccaggtgacaggttccccttttcctttgagctcatcctcgctggggggaggatccagcattttggcacagatggagctgacagtctggaggcctggactagtgctgtgggcaagtggttctccccgctgagctgccaccagctgctgggccccgggctgctgcggctgggccgcctatggctgcggtccccctcccatacagccccggcccctggtctctggctgtcagggtttggcctccttcgtggtgaccacctcttcctgtgctcagcgccgggcccaggccccccagcccctgaggacatggtgcatctgcggcggctacaggagatcagtgtggtttctgcagctgacaccccagataagaaagagcatttggtcctggtggagacaggaaggaccctgtatctgcaaggagagggccggctggacttcacggcatggaacgcagccattgggggcgcggctggtgggggcggcacagggctgcaggagcagcagatgagccggggtgacatccccatcatcgtggatgcctgcatcagttttgttacccagcatgggctccggctggaaggtgtataccggaaagggggcgctcgtgcccgcagcctgagactcctggctgagttccgtcgggatgcccggtcggtgaagctccgaccaggggagcactttgtggaggatgtcactgacacactcaaacgcttctttcgtgagctcgatgaccctgtgacctctgcacggttgctgcctcgctggagggaggctgctgagctgccccagaagaatcagcgcctggagaaatataaagatgtgattggctgcctgccgcgggtcaaccgccgcacactggccaccctcattgggcatctctatcgggtgcagaaatgtgcggctctaaaccagatgtgcacgcggaacttggctctgctgtttgcacccagcgtgttccagacggatgggcgaggggagcacgaggtgcgagtgctgcaagagctcattgatggctacatctctgtctttgatatcgattctgaccaggtagctcagattgacttggaggtcagtcttatcaccacctggaaggacgtgcagctgtctcaggctggagacctcatcatggaagtttatatagagcagcagctcccagacaactgtgtcaccctgaaggtgtccccaaccctgactgctgaggagctgactaaccaggtactggagatgcgggggacagcagctgggatggacttgtgggtgacttttgagattcgcgagcatggggagctggagcggccactgcatcccaaggaaaaggtcttagagcaggctttacaatggtgccagctcccagagccctgctcagcttccctgctcttgaaaaaagtccccctggcccaagctggctgcctcttcacaggtatccgacgtgagagcccacgggtggggctgttgcggtgtcgtgaggagccacctcgcttgctgggaagccgcttccaggagaggttctttctgctgcgtggccgctgcctgctgctgctcaaggagaagaaaagctctaaaccagaacgggagtggcctttggaaggtgccaaggtctacctgggaatccgcaagaagttaaagcccccaacaccgtggggcttcacattgatactagagaagatgcacctctacttgtcctgcactgacgaggatgaaatgtgggattggaccaccagcatccttaaagcccagcacgatgaccagcagccagtggtcttacgacgccattcctcctctgaccttgcccgtcagaagtttggcactatgcctttgctgcctatccgtggggatgacagtggagccaccctcctctctgccaatcagaccctgcggcgactacacaaccggaggaccctgtccatgttctttccaatgaagtcatcccaggggtctgtggaggagcaagaggagctggaggagcctgtgtacgaggagccagtgtatgaggaagtaggggccttccctgagttgatccaggacacttctacctccttctccaccacacgggagtggacagtgaagccagagaaccccctcaccagccagaagtcattggatcaaccctttctctccaagtcaagcacccttggccaggaggagaggccacctgagccccctccaggccccccttcaaagagcagtccccaggcacgggggtccctagaggaacagctgctccaggagctcagcagcctcatcctgaggaaaggagagaccactgcaggcctgggaagtccttcccagccatccagcccccaatcccccagccccactggccttccaacacagacacctggcttccccacccaacccccatgcacttccagtccaccctccagccagcccctcacatgaccctaggaccagcagtctgagagggtaggtaccagaagacccagaaactcttatcgtggcactgttgcagcttcctctgccctggctggaaagactccagaatccagtgtggtgctgtggaaggagcactggactaaaggcttcagtggctgcgtgtcccaggacaggtcatggcccctctctgggcccagcccatttatctataccatgaggtaactgaagtaaggagagcagtgaatgtcaaactgtgtttcttagagccataagccccacatattatccctgaacaagggcagctcctgctttatatatttgatacgtaggggttccatgagagattttgggttttaaaggaatggttttactgcattaaagaaaaaaaatgctttggaaaccagaggcctgggtgatgttaaagtctatcctgtcccacttcctacattctgggactaccgtgaagcctggagtagggagagcgagtttgggagctgggactcggggagtcaaaaatagatgagtaattgtcaataaacctgggaaccaaaagac

SEQ ID NO: 108590 - DNA, 1765 bp, Homo sapiens
  Payload ID: 1334
  Gene Symbol: ARAP3
  Gene Name: ArfGAP with RhoGAP domain, ankyrin repeat and PH domain 3
  ENST ID: ENST00000504448
  CDS Start-End: 346-1765
gtgcagtcaggcaggagcagagctttgacccagacccagggtgggcaggaactgaggggccaactctagcactgacttactgtgaacctggggcaagccccttcccctctctgggcctcagtttccttaacttcaaatgaagtcccttccctaagtagagagccattgctgttgttctgggatggctctgcttccagatcgcaggcctttcagcatctttctttggaggaagattggaggctggtgctcactgtccaggcctcagactctggggcagagagggggattctcagcctgagccctcccttcaccctgcccctccccccagcaatggcctgagcccccatggctgcccctcaggacctggacatcgctgtgtggctggccacggtgcacctggagcagtatgcagacacgttccgacggcatggcctggctacagcaggtgcagcccggggcctgggccacgaggagttgaagcagttgggcatcagcgccacagggcaccggaaacgcattctacgcctgctacagacaggcaccgaagagggctccctggatcccaaatcagatagtgccatggaaccatcccccagcccagccccgcaagcccagccccctaagcccgtgccgaagcccaggaccgtgtttggtggactcagtggccctgccaccactcagagacctgggctgagcccagccctcgggggaccaggagtgtccaggagcccagagcccagcccaaggcctcctcctctccccacttcctcctctgagcagtcttcagccctaaatactgtggagatgatgcctaattccatctacttcggcctggactcaagaggcagggcacaggcagctcaggacaaggccccagacagctcccaaatctctgcccccacccctgccctcaggcccacaacaggcacagtgcacatcatggatcctggttgcctgtactatggtgtccaacctgtggggactccaggagcccccgacagaagagagagcagaggtgtttgtcagggcagggctgaacacaggctcagcagacaggatctggaggcacgggaggatgctggctatgccagccttgagctacctggagactccaccctcttatcgcccaccctggaaacagaggagaccagtgatgacctcatttcaccctatgccagcttctccttcacggcagaccgcctcacgcccctgctcagtggctggctagacaagctctcccctcagggaaactatgtcttccagagacgctttgtgcagttcaatgggaggagtctgatgtactttggcagtgacaaggaccccttccctaagggtgtgatacctttgactgccattgagatgacccgcagcagcaaggacaacaagttccaggtcatcaccggccagagggtgttcgtgttccgcacagagagcgaggctcagcgggacatgtggtgctccacgctgcagtcctgtctgaaggagcagcgcctcctgggccacccccggcccccccaaccaccccgacccctccgcacgggcatgctggagctgcgtggacacaaggccaaggtgtttgctgccttgagccctggagagctggcactgtacaagagtgagcaggccttctctctgggcatcgggatctgcttcatcgaactgcagggctgcagcgtccgggagaccaagagtcgaagctttgacctgctcacaccccatcgctgcttcagcttcacagccgagtctgggggtgctcggcagagct

SEQ ID NO: 108591 - DNA, 3810 bp, Homo sapiens
  Payload ID: 1334
  Gene Symbol: ARAP3
  Gene Name: ArfGAP with RhoGAP domain, ankyrin repeat and PH domain 3
  Uniprot ID: Q8WWN8
  ENST ID: ENST00000513878
  CDS Start-End: 70-3651
atgggtcattgagctctctctctccaggaccccttccctaagggtgtgatacctttgactgccattgagatgacccgcagcagcaaggacaacaagttccaggtcatcaccggccagagggtgttcgtgttccgcacagagagcgaggctcagcgggacatgtggtgctccacgctgcagtcctgtctgaaggagcagcgcctcctgggccacccccggcccccccaaccaccccgacccctccgcacgggcatgctggagctgcgtggacacaaggccaaggtgtttgctgccttgagccctggagagctggcactgtacaagagtgagcaggccttctctctgggcatcgggatctgcttcatcgaactgcagggctgcagcgtccgggagaccaagagtcgaagctttgacctgctcacaccccatcgctgcttcagcttcacagccgagtctgggggtgctcggcagagctgggcggccgctctgcaggaagcagtaaccgagaccctgtctgactacgaggtggctgagaagatctggtctaatcgggccaaccggcagtgtgcggactgtgggtcctcccgcccagattgggctgctgtcaatttgggggtggtcatctgcaagcagtgtgcaggtcagcaccgggccctgggttctgggatctccaaggtgcagagcctgaagctggacacgagtgtctggagtaatgagatagtacagttattcattgtcctgggaaatgatcgtgccaaccgcttctgggcagggaccctacccccaggtgagggactacatccagatgcgacccctggcccccggggagagttcatctcccgaaagtaccgtctgggtctcttccggaagccccaccctcagtacccagatcatagccagcttctccaggcactgtgtgcagctgtggcaagacccaacctgctgaagaacatgacccagctcctctgtgttgaggcctttgaaggcgaggagccctggttccccccagcccctgatggcagctgccctggcctcttgccctcagacccctcccctggtgtgtacaatgaggtggtggtgcgtgctacttacagcggcttcctgtactgcagtcccgtcagcaacaaagctggaccctcaccccctcgcaggggccgggatgctcccccgcgcctttggtgtgtgctgggagcagctctggaaatgtttgcatcggaaaacagccctgaacccctcagcctcatacagccccaggatattgtatgtctgggtgtgagccccccacccactgacccaggtgacaggttccccttttcctttgagctcatcctcgctggggggaggatccagcattttggcacagatggagctgacagtctggaggcctggactagtgctgtgggcaagtggttctccccgctgagctgccaccagctgctgggccccgggctgctgcggctgggccgcctatggctgcggtccccctcccatacagccccggcccctggtctctggctgtcagggtttggcctccttcgtggtgaccacctcttcctgtgctcagcgccgggcccaggccccccagcccctgaggacatggtgcatctgcggcggctacaggagatcagtgtggtttctgcagctgacaccccagataagaaagagcatttggtcctggtggagacaggaaggaccctgtatctgcaaggagagggccggctggacttcacggcatggaacgcagccattgggggcgcggctggtgggggcggcacagggctgcaggagcagcagatgagccggggtgacatccccatcatcgtggatgcctgcatcagttttgttacccagcatgggctccggctggaaggtgtataccggaaagggggcgctcgtgcccgcagcctgagactcctggctgagttccgtcgggatgcccggtcggtgaagctccgaccaggggagcactttgtggaggatgtcactgacacactcaaacgcttctttcgtgagctcgatgaccctgtgacctctgcacggttgctgcctcgctggagggaggctgctgagctgccccagaagaatcagcgcctggagaaatataaagatgtgattggctgcctgccgcgggtcaaccgccgcacactggccaccctcattgggcatctctatcgggtgcagaaatgtgcggctctaaaccagatgtgcacgcggaacttggctctgctgtttgcacccagcgtgttccagacggatgggcgaggggagcacgaggtgcgagtgctgcaagagctcattgatggctacatctctgtctttgatatcgattctgaccaggtagctcagattgacttggaggtcagtcttatcaccacctggaaggacgtgcagctgtctcaggctggagacctcatcatggaagtttatatagagcagcagctcccagacaactgtgtcaccctgaaggtgtccccaaccctgactgctgaggagctgactaaccaggtactggagatgcgggggacagcagctgggatggacttgtgggtgacttttgagattcgcgagcatggggagctggagcggccactgcatcccaaggaaaaggtcttagagcaggctttacaatggtgccagctcccagagccctgctcagcttccctgctcttgaaaaaagtccccctggcccaagctggctgcctcttcacaggtatccgacgtgagagcccacgggtggggctgttgcggtgtcgtgaggagccacctcgcttgctgggaagccgcttccaggagaggttctttctgctgcgtggccgctgcctgctgctgctcaaggagaagaaaagctctaaaccagaacgggagtggcctttggaaggtgccaaggtctacctgggaatccgcaagaagttaaagcccccaacaccgtggggcttcacattgatactagagaagatgcacctctacttgtcctgcactgacgaggatgaaatgtgggattggaccaccagcatccttaaagcccagcacgatgaccagcagccagtggtcttacgacgccattcctcctctgaccttgcccgtcagaagtttggcactatgcctttgctgcctatccgtggggatgacagtggagccaccctcctctctgccaatcagaccctgccaatgaagtcatcccaggggtctgtggaggagcaagaggagctggaggagcctgtgtacgaggagccagtgtatgaggaagtaggggccttccctgagttgatccaggacacttctacctccttctccaccacacgggagtggacagtgaagccagagaaccccctcaccagccagaagtcattggatcaaccctttctctccaagtcaagcacccttggccaggaggagaggccacctgagccccctccaggccccccttcaaagagcagtccccaggcacgggggtccctagaggaacagctgctccaggagctcagcagcctcatcctgaggaaaggagagaccactgcaggcctgggaagtccttcccagccatccagcccccaatcccccagccccactggccttccaacacagacacctggcttccccacccaacccccatgcacttccagtccaccctccagccagcccctcacatgaccctaggaccagcagtctgagagggtaggtaccagaagacccagaaactcttatcgtggcactgttgcagcttcctctgccctggctggaaagactccagaatccagtgtggtgctgtggaaggagcactggactaaaggcttcagtggctgcgtgtcc

SEQ ID NO: 108592 - DNA, 4927 bp, Homo sapiens
  Payload ID: 1334
  Gene Symbol: ARAP3
  Gene Name: ArfGAP with RhoGAP domain, ankyrin repeat and PH domain 3
  ENST ID: ENST00000508305
  CDS Start-End: 251-4378
acccgcgagcggacggcggccgcgtagtgaggacctggacatcgctgtgtggctggccacggtgcacctggagcagtatgcagacacgttccgacggcatggcctggctacagcaggtgcagcccggggcctgggccacgaggagttgaagcagttgggcatcagcgccacagggcaccggaaacgcattctacgcctgctacagacaggcaccgaagagggctccctggatcccaaatcagatagtgccatggaaccatcccccagcccagccccgcaagcccagccccctaagcccgtgccgaagcccaggaccgtgtttggtggactcagtggccctgccaccactcagagacctgggctgagcccagccctcgggggaccaggagtgtccaggagcccagagcccagcccaaggcctcctcctctccccacttcctcctctgagcagtcttcagccctaaatactgtggagatgatgcctaattccatctacttcggcctggactcaagaggcagggcacaggcagctcaggacaaggccccagacagctcccaaatctctgcccccacccctgccctcaggcccacaacaggcacagtgcacatcatggatcctggttgcctgtactatggtgtccaacctgtggggactccaggagcccccgacagaagagagagcagaggtgtttgtcagggcagggctgaacacaggctcagcagacaggatctggaggcacgggaggatgctggctatgccagccttgagctacctggagactccaccctcttatcgcccaccctggaaacagaggagaccagtgatgacctcatttcaccctatgccagcttctccttcacggcagaccgcctcacgcccctgctcagtggctggctagacaagctctcccctcagggaaactatgtcttccagagacgctttgtgcagttcaatgggaggagtctgatgtactttggcagtgacaaggaccccttccctaagggtgtgatacctttgactgccattgagatgacccgcagcagcaaggacaacaagttccaggtcatcaccggccagagggtgttcgtgttccgcacagagagcgaggctcagcgggacatgtggtgctccacgctgcagtcctgtctgaaggagcagcgcctcctgggccacccccggcccccccaaccaccccgacccctccgcacgggcatgctggagctgcgtggacacaaggccaaggtgtttgctgccttgagccctggagagctggcactgtacaagagtgagcaggccttctctctgggcatcgggatctgcttcatcgaactgcagggctgcagcgtccgggagaccaagagtcgaagctttgacctgctcacaccccatcgctgcttcagcttcacagccgagtctgggggtgctcggcagagctgggcggccgctctgcaggaagcagtaaccgagaccctgtctgactacgaggtggctgagaagatctggtctaatcgggccaaccggcagtgtgcggactgtgggtcctcccgcccagattgggctgctgtcaatttgggggtggtcatctgcaagcagtgtgcaggtcagcaccgggccctgggttctgggatctccaaggtgcagagcctgaagctggacacgagtgtctggagtaatgagatagtacagttattcattgtcctgggaaatgatcgtgccaaccgcttctgggcagggaccctacccccaggtgagggactacatccagatgcgacccctggcccccggggagagttcatctcccgaaagtaccgtctgggtctcttccggaagccccaccctcagtacccagatcatagccagcttctccaggcactgtgtgcagctgtggcaagacccaacctgctgaagaacatgacccagctcctctgtgttgaggcctttgaagacccctcccctggtgtgtacaatgaggtggtggtgcgtgctacttacagcggcttcctgtactgcagtcccgtcagcaacaaagctggaccctcaccccctcgcaggggccgggatgctcccccgcgcctttggtgtgtgctgggagcagctctggaaatgtttgcatcggaaaacagccctgaacccctcagcctcatacagccccaggatattgtatgtctgggtgtgagccccccacccactgacccaggtgacaggttccccttttcctttgagctcatcctcgctggggggaggatccagcattttggcacagatggagctgacagtctggaggcctggactagtgctgtgggcaagtggttctccccgctgagctgccaccagctgctgggccccgggctgctgcggctgggccgcctatggctgcggtccccctcccatacagccccggcccctggtctctggctgtcagggtttggcctccttcgtggtgaccacctcttcctgtgctcagcgccgggcccaggccccccagcccctgaggacatggtgcatctgcggcggctacaggagatcagtgtggtttctgcagctgacaccccagataagaaagagcatttggtcctggtggagacaggaaggaccctgtatctgcaaggagagggccggctggacttcacggcatggaacgcagccattgggggcgcggctggtgggggcggcacagggctgcaggagcagcagatgagccggggtgacatccccatcatcgtggatgcctgcatcagttttgttacccagcatgagctgccccagaagaatcagcgcctggagaaatataaagatgtgattggctgcctgccgcgggtcaaccgccgcacactggccaccctcattgggcatctctatcgggtgcagaaatgtgcggctctaaaccagatgtgcacgcggaacttggctctgctgtttgcacccagcgtgttccagacggatgggcgaggggagcacgaggtgcgagtgctgcaagagctcattgatggctacatctctgtctttgatatcgattctgaccaggtagctcagattgacttggaggtcagtcttatcaccacctggaaggacgtgcagctgtctcaggctggagacctcatcatggaagtttatatagagcagcagctcccagacaactgtgtcaccctgaaggtgtccccaaccctgactgctgaggagctgactaaccaggtactggagatgcgggggacagcagctgggatggacttgtgggtgacttttgagattcgcgagcatggggagctggagcggccactgcatcccaaggaaaaggtcttagagcaggctttacaatggtgccagctcccagagccctgctcagcttccctgctcttgaaaaaagtccccctggcccaagctggctgcctcttcacaggtatccgacgtgagagcccacgggtggggctgttgcggtgtcgtgaggagccacctcgcttgctgggaagccgcttccaggagaggttctttctgctgcgtggccgctgcctgctgctgctcaaggagaagaaaagctctaaaccagaacgggagtggcctttggaaggtgccaaggtctacctgggaatccgcaagaagttaaagcccccaacaccgtggggcttcacattgatactagagaagatgcacctctacttgtcctgcactgacgaggatgaaatgtgggattggaccaccagcatccttaaagcccagcacgatgaccagcagccagtggtcttacgacgccattcctcctctgaccttgcccgtcagaagtttggcactatgcctttgctgcctatccgtggggatgacagtggagccaccctcctctctgccaatcagaccctgcggcgactacacaaccggaggaccctgtccatgttctttccaatgaagtcatcccaggggtctgtggaggagcaagaggagctggaggagcctgtgtacgaggagccagtgtatgaggaagtaggggccttccctgagttgatccaggacacttctacctccttctccaccacacgggagtggacagtgaagccagagaaccccctcaccagccagaagtcattggatcaaccctttctctccaagtcaagcacccttggccaggaggagaggccacctgagccccctccaggccccccttcaaagagcagtccccaggcacgggggtccctagaggaacagctgctccaggagctcagcagcctcatcctgaggaaaggagagaccactgcaggcctgggaagtccttcccagccatccagcccccaatcccccagccccactggccttccaacacagacacctggcttccccacccaacccccatgcacttccagtccaccctccagccagcccctcacatgaccctaggaccagcagtctgagagggtaggtaccagaagacccagaaactcttatcgtggcactgttgcagcttcctctgccctggctggaaagactccagaatccagtgtggtgctgtggaaggagcactggactaaaggcttcagtggctgcgtgtcccaggacaggtcatggcccctctctgggcccagcccatttatctataccatgaggtaactgaagtaaggagagcagtgaatgtcaaactgtgtttcttagagccataagccccacatattatccctgaacaagggcagctcctgctttatatatttgatacgtaggggttccatgagagattttgggttttaaaggaatggttttactgcattaaagaaaaaaaatgctttggaaaccagaggcctgggtgatgttaaagtctatcctgtcccacttcctacattctgggactaccgtgaagcctggagtagggagagcgagtttgggagctgggactcggggagtcaaaaatagatgagtaattgtcaataaacctgggaaccaaaagac

SEQ ID NO: 108593 - DNA, 4928 bp, Homo sapiens
  Payload ID: 1334
  Gene Symbol: ARAP3
  Gene Name: ArfGAP with RhoGAP domain, ankyrin repeat and PH domain 3
  ENST ID: ENST00000626478
  CDS Start-End: 254-4381
agcaatggcctgagcccccatggctgcccctcaggacctggacatcgctgtgtggctggccacggtgcacctggagcagtatgcagacacgttccgacggcatggcctggctacagcaggtgcagcccggggcctgggccacgaggagttgaagcagttgggcatcagcgccacagggcaccggaaacgcattctacgcctgctacagacaggcaccgaagagggctccctggatcccaaatcagatagtgccatggaaccatcccccagcccagccccgcaagcccagccccctaagcccgtgccgaagcccaggaccgtgtttggtggactcagtggccctgccaccactcagagacctgggctgagcccagccctcgggggaccaggagtgtccaggagcccagagcccagcccaaggcctcctcctctccccacttcctcctctgagcagtcttcagccctaaatactgtggagatgatgcctaattccatctacttcggcctggactcaagaggcagggcacaggcagctcaggacaaggccccagacagctcccaaatctctgcccccacccctgccctcaggcccacaacaggcacagtgcacatcatggatcctggttgcctgtactatggtgtccaacctgtggggactccaggagcccccgacagaagagagagcagaggtgtttgtcagggcagggctgaacacaggctcagcagacaggatctggaggcacgggaggatgctggctatgccagccttgagctacctggagactccaccctcttatcgcccaccctggaaacagaggagaccagtgatgacctcatttcaccctatgccagcttctccttcacggcagaccgcctcacgcccctgctcagtggctggctagacaagctctcccctcagggaaactatgtcttccagagacgctttgtgcagttcaatgggaggagtctgatgtactttggcagtgacaaggaccccttccctaagggtgtgatacctttgactgccattgagatgacccgcagcagcaaggacaacaagttccaggtcatcaccggccagagggtgttcgtgttccgcacagagagcgaggctcagcgggacatgtggtgctccacgctgcagtcctgtctgaaggagcagcgcctcctgggccacccccggcccccccaaccaccccgacccctccgcacgggcatgctggagctgcgtggacacaaggccaaggtgtttgctgccttgagccctggagagctggcactgtacaagagtgagcaggccttctctctgggcatcgggatctgcttcatcgaactgcagggctgcagcgtccgggagaccaagagtcgaagctttgacctgctcacaccccatcgctgcttcagcttcacagccgagtctgggggtgctcggcagagctgggcggccgctctgcaggaagcagtaaccgagaccctgtctgactacgaggtggctgagaagatctggtctaatcgggccaaccggcagtgtgcggactgtgggtcctcccgcccagattgggctgctgtcaatttgggggtggtcatctgcaagcagtgtgcaggtcagcaccgggccctgggttctgggatctccaaggtgcagagcctgaagctggacacgagtgtctggagtaatgagatagtacagttattcattgtcctgggaaatgatcgtgccaaccgcttctgggcagggaccctacccccaggtgagggactacatccagatgcgacccctggcccccggggagagttcatctcccgaaagtaccgtctgggtctcttccggaagccccaccctcagtacccagatcatagccagcttctccaggcactgtgtgcagctgtggcaagacccaacctgctgaagaacatgacccagctcctctgtgttgaggcctttgaagacccctcccctggtgtgtacaatgaggtggtggtgcgtgctacttacagcggcttcctgtactgcagtcccgtcagcaacaaagctggaccctcaccccctcgcaggggccgggatgctcccccgcgcctttggtgtgtgctgggagcagctctggaaatgtttgcatcggaaaacagccctgaacccctcagcctcatacagccccaggatattgtatgtctgggtgtgagccccccacccactgacccaggtgacaggttccccttttcctttgagctcatcctcgctggggggaggatccagcattttggcacagatggagctgacagtctggaggcctggactagtgctgtgggcaagtggttctccccgctgagctgccaccagctgctgggccccgggctgctgcggctgggccgcctatggctgcggtccccctcccatacagccccggcccctggtctctggctgtcagggtttggcctccttcgtggtgaccacctcttcctgtgctcagcgccgggcccaggccccccagcccctgaggacatggtgcatctgcggcggctacaggagatcagtgtggtttctgcagctgacaccccagataagaaagagcatttggtcctggtggagacaggaaggaccctgtatctgcaaggagagggccggctggacttcacggcatggaacgcagccattgggggcgcggctggtgggggcggcacagggctgcaggagcagcagatgagccggggtgacatccccatcatcgtggatgcctgcatcagttttgttacccagcatgagctgccccagaagaatcagcgcctggagaaatataaagatgtgattggctgcctgccgcgggtcaaccgccgcacactggccaccctcattgggcatctctatcgggtgcagaaatgtgcggctctaaaccagatgtgcacgcggaacttggctctgctgtttgcacccagcgtgttccagacggatgggcgaggggagcacgaggtgcgagtgctgcaagagctcattgatggctacatctctgtctttgatatcgattctgaccaggtagctcagattgacttggaggtcagtcttatcaccacctggaaggacgtgcagctgtctcaggctggagacctcatcatggaagtttatatagagcagcagctcccagacaactgtgtcaccctgaaggtgtccccaaccctgactgctgaggagctgactaaccaggtactggagatgcgggggacagcagctgggatggacttgtgggtgacttttgagattcgcgagcatggggagctggagcggccactgcatcccaaggaaaaggtcttagagcaggctttacaatggtgccagctcccagagccctgctcagcttccctgctcttgaaaaaagtccccctggcccaagctggctgcctcttcacaggtatccgacgtgagagcccacgggtggggctgttgcggtgtcgtgaggagccacctcgcttgctgggaagccgcttccaggagaggttctttctgctgcgtggccgctgcctgctgctgctcaaggagaagaaaagctctaaaccagaacgggagtggcctttggaaggtgccaaggtctacctgggaatccgcaagaagttaaagcccccaacaccgtggggcttcacattgatactagagaagatgcacctctacttgtcctgcactgacgaggatgaaatgtgggattggaccaccagcatccttaaagcccagcacgatgaccagcagccagtggtcttacgacgccattcctcctctgaccttgcccgtcagaagtttggcactatgcctttgctgcctatccgtggggatgacagtggagccaccctcctctctgccaatcagaccctgcggcgactacacaaccggaggaccctgtccatgttctttccaatgaagtcatcccaggggtctgtggaggagcaagaggagctggaggagcctgtgtacgaggagccagtgtatgaggaagtaggggccttccctgagttgatccaggacacttctacctccttctccaccacacgggagtggacagtgaagccagagaaccccctcaccagccagaagtcattggatcaaccctttctctccaagtcaagcacccttggccaggaggagaggccacctgagccccctccaggccccccttcaaagagcagtccccaggcacgggggtccctagaggaacagctgctccaggagctcagcagcctcatcctgaggaaaggagagaccactgcaggcctgggaagtccttcccagccatccagcccccaatcccccagccccactggccttccaacacagacacctggcttccccacccaacccccatgcacttccagtccaccctccagccagcccctcacatgaccctaggaccagcagtctgagagggtaggtaccagaagacccagaaactcttatcgtggcactgttgcagcttcctctgccctggctggaaagactccagaatccagtgtggtgctgtggaaggagcactggactaaaggcttcagtggctgcgtgtcccaggacaggtcatggcccctctctgggcccagcccatttatctataccatgaggtaactgaagtaaggagagcagtgaatgtcaaactgtgtttcttagagccataagccccacatattatccctgaacaagggcagctcctgctttatatatttgatacgtaggggttccatgagagattttgggttttaaaggaatggttttactgcattaaagaaaaaaaatgctttggaaaccagaggcctgggtgatgttaaagtctatcctgtcccacttcctacattctgggactaccgtgaagcctggagtagggagagcgagtttgggagctgggactcggggagtcaaaaatagatgagtaattgtcaataaacctgggaaccaaaag

SEQ ID NO: 108594 - DNA, 6344 bp, Homo sapiens
  Payload ID: 1335
  Gene Symbol: ASAP1
  Gene Name: ArfGAP with SH3 domain, ankyrin repeat and PH domain 1
  ENST ID: ENST00000357668
  CDS Start-End: 352-3720
cccttcctgcgccgcgctcggctcccgcgcctcgcctggcctggccgctgccgcgggcgagcactgtgcgctgggcagccccgggcccgcgcctcccgcccagccggcgcttcccggtcgcagttcgctttcccacccgagagccgcgagcgcccggccgaacccgcgatggaataatgcccagcggcccgccaggtcccggtcgttttctgatgtgacggctgagacatgagatcttcagcctccaggctctccagtttttcgtcgagagattcactatggaatcgatatccaggaatgattttcagagtatttgagaaaatgagaggtgcagatggttttcactgaggcatggtttcaaatttaaagaggattatggcccagaaatggatgccggaccagatctctgtctcggagttcatcgccgagaccaccgaggactacaactcgcccaccacgtccagcttcaccacgcggctgcacaactgcaggaacaccgtcacgctgctggaggaggctctagaccaagatagaacagcccttcagaaagtgaagaagtctgtaaaagcaatatataattctggtcaagatcatgtacaaaatgaagaaaactatgcacaagttcttgataagtttgggagtaattttttaagtcgagacaaccccgaccttggcaccgcgtttgtcaagttttctactcttacaaaggaactgtccacactgctgaaaaatctgctccagggtttgagccacaatgtgatcttcaccttggattctttgttaaaaggagacctaaagggagtcaaaggagatctcaagaagccatttgacaaagcctggaaagattatgagacaaagtttacaaaaattgagaaagagaaaagagagcacgcaaaacaacatgggatgatccgcacagagataacaggagctgagattgcggaagaaatggagaaggaaaggcgcctctttcagctccaaatgtgtgaatatctcattaaagttaatgaaatcaagaccaaaaagggtgtggatctgctgcagaatcttataaagtattaccatgcacagtgcaatttctttcaagatggcttgaaaacagctgataagttgaaacagtacattgaaaaactggctgctgatttatataatataaaacagacccaggatgaagaaaagaaacagctaactgcactccgagacttaataaaatcctctcttcaactggatcagaaagaagattctcagagccggcaaggaggatacagcatgcatcagctccagggcaataaggaatatggcagtgaaaagaaggggtacctgctaaagaaaagtgacgggatccggaaagtatggcagaggaggaagtgttcagtcaagaatgggattctgaccatctcacatgccacatctaacaggcaaccagccaagttgaaccttctcacctgccaagtaaaacctaatgccgaagacaaaaaatcttttgacctgatatcacataatagaacatatcactttcaggcagaagatgagcaggattatgtagcatggatatcagtattgacaaatagcaaagaagaggccctaaccatggccttccgtggagagcagagtgcgggagagaacagcctggaagacctgacaaaagccattattgaggatgtccagcggctcccagggaatgacatttgctgcgattgtggctcatcagaacccacctggctttcaaccaacttgggtattttgacctgtatagaatgttctggcatccatagggaaatgggggttcatatttctcgcattcagtctttggaactagacaaattaggaacttctgaactcttgctggccaagaatgtaggaaacaatagttttaatgatattatggaagcaaatttacccagcccctcaccaaaacccaccccttcaagtgatatgactgtacgaaaagaatatatcactgcaaagtatgtagatcataggttttcaaggaagacctgttcaacttcatcagctaaactaaatgaattgcttgaggccatcaaatccagggatttacttgcactaattcaagtctatgcagaaggggtagagctaatggaaccactgctggaacctgggcaggagcttggggagacagcccttcaccttgccgtccgaactgcagatcagacatctctccatttggttgacttccttgtacaaaactgtgggaacctggataagcagacggccctgggaaacacagttctacactactgtagtatgtacagtaaacctgagtgtttgaagcttttgctcaggagcaagcccactgtggatatagttaaccaggctggagaaactgccctagacatagcaaagagactaaaagctacccagtgtgaagatctgctttcccaggctaaatctggaaagttcaatccacacgtccacgtagaatatgagtggaatcttcgacaggaggagatagatgagagcgatgatgatctggatgacaaaccaagccctatcaagaaagagcgctcacccagacctcagagcttctgccactcctccagcatctccccccaggacaagctggcactgccaggattcagcactccaagggacaaacagcggctctcctatggagccttcaccaaccagatcttcgtttccacaagcacagactcgcccacatcaccaaccacggaggctccccctctgcctcctaggaacgccgggaaaggtccaactggcccaccttcaacactccctctaagcacccagacctctagtggcagctccaccctatccaagaagaggcctcctcccccaccacccggacacaagagaaccctatccgaccctcccagcccactacctcatgggcccccaaacaaaggcgcagttccttggggtaacgatgggggtccatcctcttcaagtaagactacaaacaagtttgagggactatcccagcagtcgagcaccagttctgcaaagactgcccttggcccaagagttcttcctaaactacctcagaaagtggcactaaggaaaacagatcatctctccctagacaaagccaccatcccgcccgaaatctttcagaaatcatcacagttggcagagttgccacaaaagccaccacctggagacctgcccccaaagcccacagaactggcccccaagccccaaattggagatttgccgcctaagccaggagaactgccccccaaaccacagctgggggacctgccacccaaaccccaactctcagacttacctcccaaaccacagatgaaggacctgccccccaaaccacagctgggagacctgctagcaaaatcccagactggagatgtctcacccaaggctcagcaaccctctgaggtcacactgaagtcacacccattggatctatccccaaatgtgcagtccagagacgccatccaaaagcaagcatctgaagactccaacgacctcacgcctactctgccagagacgcccgtaccactgcccagaaaaatcaatacggggaaaaataaagtgaggcgagtgaagaccatttatgactgccaggcagacaacgatgacgagctcacattcatcgagggagaagtgattatcgtcacaggggaagaggaccaggagtggtggattggccacatcgaaggacagcctgaaaggaagggggtctttccagtgtcctttgttcatatcctgtctgactagcaaaacgcagaaccttaagattgtccacatccttcatgcaagactgctgccttcatgtaaccctgggcacagtgtgtatatagctgctgttacagagtaagaaactcatggaagggccacctcaggagggggatataatgtgtgttgtaaatatcctgtggttttctgccttcaccagtatgagggtagcctcggacccggcgcgccttactggtttgccaaagccatccttggcatctagcacttacatctctctatgctgttctacaagcaaacaaacaaaaataggagtataggaactgctggctttgcaaatagaagtggtctccagcaaccgttgaaaggcatagaattgactctgttcctaacaatgcagtattctcaattgtgttactgaaaatgcaacattagcaaagaggtgggttctgttttccaggtgaaacttttagctccatgacagaccagcctgtagttatctgtgtacacagtttacagctacaaaaacctactttggtatttattacagaaaagtgctcagttaaatgtaagtgttattccttcagcaaaatattcactgacccaaaactctttatggcattttacaatgcacacagcctcatgcaagtttagacaagtggatttatactgtcttatgagtgcccgcccctgatatattacctcattatgcaaaaataacatatctttcatgactattttgacaaaagtttaaaacacatatgaagttcaaatttcaggaaccaaggactgccagaaaatattagcctctacattacgcatgcatttagaagcttacctgaaatctgccttttataaaggaatagtatggataagtggaattgtacattttttaaacttgattgccattaaagcagaaattataaggttgcaacaatatttgtttctaatcactggctttctcaagagtatggattgacatattgtgttatgaatgcacatctctcagatgtgttgaagcatccattgcatccattttttattattttcttagttttgttcttggacaaatttaaacttttaaaagattattcaagatgaatttaaaagtcaacccttcacacagtttccctactgtatgtagaatccaggtgctgaaaccaagtgtttcttttcccatgctctttgttaaaccccaattatagataatttttccagtcttaagctctgtccaccttcaagtcaattcataaccaagtttttgaacgctgctatgaattgcactgtgaaaagcactcttccctctcagttttcttttcatcccagccatgtttatcagatccttaagaacattgtatttcagtcttttacatcagtctgaattttggaaaagaatgcaatagttgtactccacagtcagtggaactgttccctgagtccgaggctcatgtgtcattctggcactacatttgcttaaattgctattttggcaacagcacagaaaactaatatttttaagcagagaatcttggcaatgagtgagagatgttaatttcacagaagcacaactcccaacccaacccttaggaaaagccctcttccatcgttacagtgctcagtgaatattaatttagttctgcttaagtggttgctatacaaactttgaatagccacctaataaataaaccttgcatgacaaacctgcaaaatattttatcagctgttattggaaagtgattttaagcaattgcttcctcagtgtcagggcacatgtgaatttccacaccaaacagagcatgaggaaccagttgacatgctgggttgtgactggcagctttagcagcctcggtactgaagccacaccagtgtccggatggaagtctgcatctgaggttgctcagtgtcccggtcattcatttacacattttaacttgcattaaagagctgttcttttctgtggcctagactcttttcactgatctcaaaataaactggtttttttcaaaaaaaaaaaaaaaacaaaaacaaaaaaaaaacacaaaagctgcatgtctaaaattacatggagttagtgtctattctttttccccttttgcagcaacttacacagcatttttaacaccttttttttctagtttttttgttcggttttgttttccatcaggaatttgagttctctctaacccagcttactgtgggacataggaaaactcagtagaaatacctttggtgatcttgttgagtttaagtctgatcttgatcttaaactcagtaagccactatctgcaattttgtacattatatagtattttgaagatatggaaccttatgaaaaaaaaatagcaaattagttctttttcccccagaggggaaagttatgttctgcaaatagtgtgtgtcttattttactgttgaacagcaattgctatttatttttttattgcctagaacttcaacatgttgtataggaatcctgtagtgccactagttaaatgccgaattctcatctggatgttaccatcaaacatcagtacacttgtcatttcacatgtgtttaatgtgacagtttttcagtactgtatgtgttaatttctactttttttaatatttaaaattgcttttaaataaacatattctcagttgatccc

SEQ ID NO: 108595 - DNA, 5406 bp, Homo sapiens
  Payload ID: 1335
  Gene Symbol: ASAP1
  Gene Name: ArfGAP with SH3 domain, ankyrin repeat and PH domain 1
  ENST ID: ENST00000521075
  CDS Start-End: 26-145
cgttttctgatgtgacggctgagacatgagatcttcagcctccaggctctccagtttttcgtcgagagattcactatggaatcgatatccaggaatgattttcagagtatttgagaaaatgagaggtgcagatggttttcactgaggcatggtttcaaatttaaagaggattatggcccagaaatggatgccggaccagatctctgtctcggagttcatcgccgagaccaccgaggactacaactcgcccaccacgtccagcttcaccacgcggctgcacaactgcaggaacaccgtcacgctgctggaggaggctctagaccaagatagaacagcccttcagaaagtgaagaagtctgtaaaagcaatatataattctggtcaagatcatgtacaaaatgaagaaaactatgcacaagttcttgataagtttgggagtaattttttaagtcgagacaaccccgaccttggcaccgcgtttgtcaagttttctactcttacaaaggaactgtccacactgctgaaaaatctgctccagggtttgagccacaatgtgatcttcaccttggattctttgttaaaaggagacctaaagggagtcaaaggagatctcaagaagccatttgacaaagcctggaaagattatgagacaaagtttacaaaaattgagaaagagaaaagagagcacgcaaaacaacatgggatgatccgcacagagataacaggagctgagattgcggaagaaatggagaaggaaaggcgcctctttcagctccaaatgtgtgaatatctcattaaagttaatgaaatcaagaccaaaaagggtgtggatctgctgcagaatcttataaagtattaccatgcacagtgcaatttctttcaagatggcttgaaaacagctgataagttgaaacagtacattgaaaaactggctgctgatttatataatataaaacagacccaggatgaagaaaagaaacagctaactgcactccgagacttaataaaatcctctcttcaactggatcagaaagaagattctcagagccggcaaggaggatacagcatgcatcagctccagggcaataaggaatatggcagtgaaaagaaggggtacctgctaaagaaaagtgacgggatccggaaagtatggcagaggaggaagtgttcagtcaagaatgggattctgaccatctcacatgccacatctaacaggcaaccagccaagttgaaccttctcacctgccaagtaaaacctaatgccgaagacaaaaaatcttttgacctgatatcacataatagaacatatcactttcaggcagaagatgagcaggattatgtagcatggatatcagtattgacaaatagcaaagaagaggccctaaccatggccttccgtggagagcagagtgcgggagagaacagcctggaagacctgacaaaagccattattgaggatgtccagcggctcccagggaatgacatttgctgcgattgtggctcatcagaacccacctggctttcaaccaacttgggtattttgacctgtatagaatgttctggcatccatagggaaatgggggttcatatttctcgcattcagtctttggaactagacaaattaggaacttctgaactcttgctggccaagaatgtaggaaacaatagttttaatgatattatggaagcaaatttacccagcccctcaccaaaacccaccccttcaagtgatatgactgtacgaaaagaatatatcactgcaaagtatgtagatcataggttttcaaggaagacctgttcaacttcatcagctaaactaaatgaattgcttgaggccatcaaatccagggatttacttgcactaattcaagtctatgcagaaggggtagagctaatggaaccactgctggaacctgggcaggagcttggggagacagcccttcaccttgccgtccgaactgcagatcagacatctctccatttggttgacttccttgtacaaaactgtgggaacctggataagcagacggccctgggaaacacagttctacactactgtagtatgtacagtaaacctgagtgtttgaagcttttgctcaggagcaagcccactgtggatatagttaaccaggctggagaaactgccctagacatagcaaagagactaaaagctacccagtgtgaagatctgctttcccaggctaaatctggaaagttcaatccacacgtccacgtagaatatgagtggaatcttcgacaggaggagatagatgagagcgatgatgatctggatgacaaaccaagccctatcaagaaagagcgctcacccagacctcagagcttctgccactcctccagcatctccccccaggacaagctggcactgccaggattcagcactccaagggacaaacagcggctctcctatggagccttcaccaaccagatcttcgtttccacaagcacagactcgcccacatcaccaaccacggaggctccccctctgcctcctaggaacgccgggaaaggtccaactggcccaccttcaacactccctctaagcacccagacctctagtggcagctccaccctatccaagaagaggcctcctcccccaccacccggacacaagagaaccctatccgaccctcccagcccactacctcatgggcccccaaacaaaggcgcagttccttggggtaacgatgggggtccatcctcttcaagtaagactacaaacaagtttgagggactatcccagcagtcgagcaccagttctgcaaagactgcccttggcccaagagttcttcctaaactacctcagaaagtggcactaaggaaaacagatcatctctccctagacaaagccaccatcccgcccgaaatctttcagaaatcatcacagttggcagagttgccacaaaagccaccacctggagacctgcccccaaagcccacagaactggcccccaagccccaaattggagatttgccgcctaagccaggagaactgccccccaaaccacagctgggggacctgccacccaaaccccaactctcagacttacctcccaaaccacagatgaaggacctgccccccaaaccacagctgggagacctgctagcaaaatcccagactggagatgtctcacccaaggctcagcaaccctctgaggtcacactgaagtcacacccattggatctatccccaaatgtgcagtccagagacgccatccaaaagcaagcatctgaagactccaacgacctcacgcctactctgccagagacgcccgtaccactgcccagaaaaatcaatacggggaaaaataaagtgaggcgagtgaagaccatttatgactgccaggcagacaacgatgacgagctcacattcatcgagggagaagtgattatcgtcacaggggaagaggaccaggagtggtggattggccacatcgaaggacagcctgaaaggaagggggtctttccagtgtcctttgttcatatcctgtctgactagcaaaacgcagaaccttaagattgtccacatccttcatgcaagactgctgccttcatgtaaccctgggcacagtgtgtatatagctgctgttacagagtaagaaactcatggaagggccacctcaggagggggatataatgtgtgttgtaaatatcctgtggttttctgccttcaccagtatgagggtagcctcggacccggcgcgccttactggtttgccaaagccatccttggcatctagcacttacatctctctatgctgttctacaagcaaacaaacaaaaataggagtataggaactgctggctttgcaaatagaagtggtctccagcaaccgttgaaaggcatagaattgactctgttcctaacaatgcagtattctcaattgtgttactgaaaatgcaacattagcaaagaggtgggttctgttttccaggtgaaacttttagctccatgacagaccagcctgtagttatctgtgtacacagtttacagctacaaaaacctactttggtatttattacagaaaagtgctcagttaaatgtaagtgttattccttcagcaaaatattcactgacccaaaactctttatggcattttacaatgcacacagcctcatgcaagtttagacaagtggatttatactgtcttatgagtgcccgcccctgatatattacctcattatgcaaaaataacatatctttcatgactattttgacaaaagtttaaaacacatatgaagttcaaatttcaggaaccaaggactgccagaaaatattagcctctacattacgcatgcatttagaagcttacctgaaatctgccttttataaaggaatagtatggataagtggaattgtacattttttaaacttgattgccattaaagcagaaattataaggttgcaacaatatttgtttctaatcactggctttctcaagagtatggattgacatattgtgttatgaatgcacatctctcagatgtgttgaagcatccattgcatccattttttattattttcttagttttgttcttggacaaatttaaacttttaaaagattattcaagatgaatttaaaagtcaacccttcacacagtttccctactgtatgtagaatccaggtgctgaaaccaagtgtttcttttcccatgctctttgttaaaccccaattatagataatttttccagtcttaagctctgtccaccttcaagtcaattcataaccaagtttttgaacgctgctatgaattgcactgtgaaaagcactcttccctctcagttttcttttcatcccagccatgtttatcagatccttaagaacattgtatttcagtcttttacatcagtctgaattttggaaaagaatgcaatagttgtactccacagtcagtggaactgttccctgagtccgaggctcatgtgtcattctggcactacatttgcttaaattgctattttggcaacagcacagaaaactaatatttttaagcagagaatcttggcaatgagtgagagatgttaatttcacagaagcacaactcccaacccaacccttaggaaaagccctcttccatcgttacagtgctcagtgaatattaatttagttctgcttaagtggttgctatacaaactttgaatagccacctaataaataaaccttgcatgacaaacctgcaaaatattttatcagctgttattggaaagtgattttaagcaattgcttcctcagtgtcagggcacatgtgaatttccacaccaaacagagcatgaggaaccagttgacatgctgggttgtgactggcagctttagcagcctcggtactgaagccacaccagtgtccggatggaagtctgcatctgaggttgctcagtgtcccggtcat

SEQ ID NO: 108596 - DNA, 742 bp, Homo sapiens
  Payload ID: 1335
  Gene Symbol: ASAP1
  Gene Name: ArfGAP with SH3 domain, ankyrin repeat and PH domain 1
  ENST ID: ENST00000520927
  CDS Start-End: 97-216
cattgcattgagaggatattcaaactgaaggggagaagcacggattctgaaggatgaaaaaggaacaatgtcgttttctgatgtgacggctgagacatgagatcttcagcctccaggctctccagtttttcgtcgagagattcactatggaatcgatatccaggaatgattttcagagtatttgagaaaatgagaggtgcagatggttttcactgaggcatggtttcaaatttaaagaggattatggcccagaaatggatgccggaccagatctctgtctcggagttcatcgccgagaccaccgaggactacaactcgcccaccacgtccagcttcaccacgcggctgcacaactgcaggaacaccgtcacgctgctggaggaggctctagaccaagatagaacagcccttcagaaagtgaagaagtctgtaaaagcaatatataattctggtcaagatcatgtacaaaatgaagaaaactatgcacaagttcttgataagtttgggagtaattttttaagtcgagacaaccccgaccttggcaccgcgtttgtcaagttttctactcttacaaaggaactgtccacactgctgaaaaatctgctccagggtttgagccacaatgtgatcttcaccttggattctttgttaaaaggagacctaaagggagtcaaaggagatctcaagaagccatttgacaaagcctggaaagattatgagacaaagtttacaaaaattgaga

SEQ ID NO: 108597 - DNA, 566 bp, Homo sapiens
  Payload ID: 1335
  Gene Symbol: ASAP1
  Gene Name: ArfGAP with SH3 domain, ankyrin repeat and PH domain 1
  ENST ID: ENST00000520342
  CDS Start-End: 468-566
gtttgtagccgtggctttacacctctcaagatggtagcttgccgcgtgataggctatgtttcttccaagaggcaaaggctctagaccaagatagaacagcccttcagaaagtgaagaagtctgtaaaagcaatatataattctggtcaagatcatgtacaaaatgaagaaaactatgcacaagttcttgataagtttgggagtaattttttaagtcgagacaaccccgaccttggcaccgcgtttgtcaagttttctactcttacaaaggaactgtccacactgctgaaaaatctgctccagggtttgagccacaatgtgatcttcaccttggattctttgttaaaaggagacctaaagggagtcaaaggagatctcaagaagccatttgacaaagcctggaaagattatgagacaaagtttacaaaaattgagaaagagaaaagagagcacgcaaaacaacatgggatgatccgcacagagataacaggagctgagattgcggaagaaatggagaaggaaaggcgcctctttcagctccaaatgtgtgaatatctcattaaagtt

SEQ ID NO: 108598 - DNA, 5478 bp, Homo sapiens
  Payload ID: 1335
  Gene Symbol: ASAP1
  Gene Name: ArfGAP with SH3 domain, ankyrin repeat and PH domain 1
  ENST ID: ENST00000524124
  CDS Start-End: 1-2851
gaaaagagagcacgcaaaacaacatgggatgatccgcacagagataacaggagctgagattgcggaagaaatggagaaggaaaggcgcctctttcagctccaaatgtgtgaatatctcattaaagttaatgaaatcaagaccaaaaagggtgtggatctgctgcagaatcttataaagtattaccatgcacagtgcaatttctttcaagatggcttgaaaacagctgataagttgaaacagtacattgaaaaactggctgctgatttatataatataaaacagacccaggatgaagaaaagaaacagctaactgcactccgagacttaataaaatcctctcttcaactggatcagaaagaatctaggagagattctcagagccggcaaggaggatacagcatgcatcagctccagggcaataaggaatatggcagtgaaaagaaggggtacctgctaaagaaaagtgacgggatccggaaagtatggcagaggaggaagtgttcagtcaagaatgggattctgaccatctcacatgccacatctaacaggcaaccagccaagttgaaccttctcacctgccaagtaaaacctaatgccgaagacaaaaaatcttttgacctgatatcacataatagaacatatcactttcaggcagaagatgagcaggattatgtagcatggatatcagtattgacaaatagcaaagaagaggccctaaccatggccttccgtggagagcagagtgcgggagagaacagcctggaagacctgacaaaagccattattgaggatgtccagcggctcccagggaatgacatttgctgcgattgtggctcatcagaacccacctggctttcaaccaacttgggtattttgacctgtatagaatgttctggcatccatagggaaatgggggttcatatttctcgcattcagtctttggaactagacaaattaggaacttctgaactcttgctggccaagaatgtaggaaacaatagttttaatgatattatggaagcaaatttacccagcccctcaccaaaacccaccccttcaagtgatatgactgtacgaaaagaatatatcactgcaaagtatgtagatcataggttttcaaggaagacctgttcaacttcatcagctaaactaaatgaattgcttgaggccatcaaatccagggatttacttgcactaattcaagtctatgcagaaggggtagagctaatggaaccactgctggaacctgggcaggagcttggggagacagcccttcaccttgccgtccgaactgcagatcagacatctctccatttggttgacttccttgtacaaaactgtgggaacctggataagcagacggccctgggaaacacagttctacactactgtagtatgtacagtaaacctgagtgtttgaagcttttgctcaggagcaagcccactgtggatatagttaaccaggctggagaaactgccctagacatagcaaagagactaaaagctacccagtgtgaagatctgctttcccaggctaaatctggaaagttcaatccacacgtccacgtagaatatgagtggaatcttcgacaggaggagatagatgagagcgatgatgatctggatgacaaaccaagccctatcaagaaagagcgctcacccagacctcagagcttctgccactcctccagcatctccccccaggacaagctggcactgccaggattcagcactccaagggacaaacagcggctctcctatggagccttcaccaaccagatcttcgtttccacaagcacagactcgcccacatcaccaaccacggaggctccccctctgcctcctaggaacgccgggaaaggtccaactggcccaccttcaacactccctctaagcacccagacctctagtggcagctccaccctatccaagaagaggcctcctcccccaccacccggacacaagagaaccctatccgaccctcccagcccactacctcatgggcccccaaacaaaggcgcagttccttggggtaacgatgggggtccatcctcttcaagtaagactacaaacaagtttgagggactatcccagcagtcgagcaccagttctgcaaagactgcccttggcccaagagttcttcctaaactacctcagaaagtggcactaaggaaaacagatcatctctccctagacaaagccaccatcccgcccgaaatctttcagaaatcatcacagttggcagagttgccacaaaagccaccacctggagacctgcccccaaagcccacagaactggcccccaagccccaaattggagatttgccgcctaagccaggagaactgccccccaaaccacagctgggggacctgccacccaaaccccaactctcagacttacctcccaaaccacagatgaaggacctgccccccaaaccacagctgggagacctgctagcaaaatcccagactggagatgtctcacccaaggctcagcaaccctctgaggtcacactgaagtcacacccattggatctatccccaaatgtgcagtccagagacgccatccaaaagcaagcatctgaagactccaacgacctcacgcctactctgccagagacgcccgtaccactgcccagaaaaatcaatacggggaaaaataaagtgaggcgagtgaagaccatttatgactgccaggcagacaacgatgacgagctcacattcatcgagggagaagtgattatcgtcacaggggaagaggaccaggagtggtggattggccacatcgaaggacagcctgaaaggaagggggtctttccagtgtcctttgttcatatcctgtctgactagcaaaacgcagaaccttaagattgtccacatccttcatgcaagactgctgccttcatgtaaccctgggcacagtgtgtatatagctgctgttacagagtaagaaactcatggaagggccacctcaggagggggatataatgtgtgttgtaaatatcctgtggttttctgccttcaccagtatgagggtagcctcggacccggcgcgccttactggtttgccaaagccatccttggcatctagcacttacatctctctatgctgttctacaagcaaacaaacaaaaataggagtataggaactgctggctttgcaaatagaagtggtctccagcaaccgttgaaaggcatagaattgactctgttcctaacaatgcagtattctcaattgtgttactgaaaatgcaacattagcaaagaggtgggttctgttttccaggtgaaacttttagctccatgacagaccagcctgtagttatctgtgtacacagtttacagctacaaaaacctactttggtatttattacagaaaagtgctcagttaaatgtaagtgttattccttcagcaaaatattcactgacccaaaactctttatggcattttacaatgcacacagcctcatgcaagtttagacaagtggatttatactgtcttatgagtgcccgcccctgatatattacctcattatgcaaaaataacatatctttcatgactattttgacaaaagtttaaaacacatatgaagttcaaatttcaggaaccaaggactgccagaaaatattagcctctacattacgcatgcatttagaagcttacctgaaatctgccttttataaaggaatagtatggataagtggaattgtacattttttaaacttgattgccattaaagcagaaattataaggttgcaacaatatttgtttctaatcactggctttctcaagagtatggattgacatattgtgttatgaatgcacatctctcagatgtgttgaagcatccattgcatccattttttattattttcttagttttgttcttggacaaatttaaacttttaaaagattattcaagatgaatttaaaagtcaacccttcacacagtttccctactgtatgtagaatccaggtgctgaaaccaagtgtttcttttcccatgctctttgttaaaccccaattatagataatttttccagtcttaagctctgtccaccttcaagtcaattcataaccaagtttttgaacgctgctatgaattgcactgtgaaaagcactcttccctctcagttttcttttcatcccagccatgtttatcagatccttaagaacattgtatttcagtcttttacatcagtctgaattttggaaaagaatgcaatagttgtactccacagtcagtggaactgttccctgagtccgaggctcatgtgtcattctggcactacatttgcttaaattgctattttggcaacagcacagaaaactaatatttttaagcagagaatcttggcaatgagtgagagatgttaatttcacagaagcacaactcccaacccaacccttaggaaaagccctcttccatcgttacagtgctcagtgaatattaatttagttctgcttaagtggttgctatacaaactttgaatagccacctaataaataaaccttgcatgacaaacctgcaaaatattttatcagctgttattggaaagtgattttaagcaattgcttcctcagtgtcagggcacatgtgaatttccacaccaaacagagcatgaggaaccagttgacatgctgggttgtgactggcagctttagcagcctcggtactgaagccacaccagtgtccggatggaagtctgcatctgaggttgctcagtgtcccggtcattcatttacacattttaacttgcattaaagagctgttcttttctgtggcctagactcttttcactgatctcaaaataaactggtttttttcaaaaaaaaaaaaaaaacaaaaacaaaaaaaaaacacaaaagctgcatgtctaaaattacatggagttagtgtctattctttttccccttttgcagcaacttacacagcatttttaacaccttttttttctagtttttttgttcggttttgttttccatcaggaatttgagttctctctaacccagcttactgtgggacataggaaaactcagtagaaatacctttggtgatcttgttgagtttaagtctgatcttgatcttaaactcagtaagccactatctgcaattttgtacattatatagtattttgaagatatggaaccttatgaaaaaaaaatagcaaattagttctttttcccccagaggggaaagttatgttctgcaaatagtgtgtgtcttattttactgttgaacagcaattgctatttatttttttattgcctagaacttcaacatgttgtataggaatcctgtagtgccactagttaaatgccgaattctcatctggatgttaccatcaaacatcagtacacttgtcatttcacatgtgtttaatgtgacagtttttcagtactgtatgtgttaatttctactttttttaatatttaaaattgcttttaaataaacatattctcagttgatcccaaa

SEQ ID NO: 108599 - DNA, 550 bp, Homo sapiens
  Payload ID: 1335
  Gene Symbol: ASAP1
  Gene Name: ArfGAP with SH3 domain, ankyrin repeat and PH domain 1
  ENST ID: ENST00000524299
  CDS Start-End: 106-225
ttcgctttcccacccgagagccgcgagcgcccggccgaacccgcgatggaataatgcccagcggcccgccaggtcccggtcgttttctgatgtgacggctgagacatgagatcttcagcctccaggctctccagtttttcgtcgagagattcactatggaatcgatatccaggaatgattttcagagtatttgagaaaatgagaggtgcagatggttttcactgaggcatggtttcaaatttaaagaggattatggcccagaaatggatgccggaccagatctctgtctcggagttcatcgccgagaccaccgaggactacaactcgcccaccacgtccagcttcaccacgcggctgcacaactgcaggaacaccgtcacgctgctggaggaggctctagaccaagatagaacagcccttcagaaagtgaagaagtctgtaaaagcaatatataattctggtcaagatcatgtacaaaatgaagaaaactatgcacaagttcttgataagtttgggagtaattttttaagtcgagacaaccccgaccttg

SEQ ID NO: 108600 - DNA, 1449 bp, Homo sapiens
  Payload ID: 1335
  Gene Symbol: ASAP1
  Gene Name: ArfGAP with SH3 domain, ankyrin repeat and PH domain 1
  ENST ID: ENST00000519483
  CDS Start-End: 1-1449
agagctaatggaaccactgctggaacctgggcaggagcttggggagacagcccttcaccttgccgtccgaactgcagatcagacatctctccatttggttgacttccttgtacaaaactgtgggaacctggataagcagacggccctgggaaacacagttctacactactgtagtatgtacagtaaacctgagtgtttgaagcttttgctcaggagcaagcccactgtggatatagttaaccaggctggagaaactgccctagacatagcaaagagactaaaagctacccagtgtgaagatctgctttcccaggctaaatctggaaagttcaatccacacgtccacgtagaatatgagtggaatcttcgacaggaggagatagatgagagcgatgatgatctggatgacaaaccaagccctatcaagaaagagcgctcacccagacctcagagcttctgccactcctccagcatctccccccaggacaagctggcactgccaggattcagcactccaagggacaaacagcggctctcctatggagccttcaccaaccagatcttcgtttccacaagcacagactcgcccacatcaccaaccacggaggctccccctctgcctcctaggaacgccgggaaaggtaacgatgggggtccatcctcttcaagtaagactacaaacaagtttgagggactatcccagcagtcgagcaccagttctgcaaagactgcccttggcccaagagttcttcctaaactacctcagaaagtggcactaaggaaaacagatcatctctccctagacaaagccaccatcccgcccgaaatctttcagaaatcatcacagttggcagagttgccacaaaagccaccacctggagacctgcccccaaagcccacagaactggcccccaagccccaaattggagatttgccgcctaagccaggagaactgccccccaaaccacagctgggggacctgccacccaaaccccaactctcagacttacctcccaaaccacagatgaaggacctgccccccaaaccacagctgggagacctgctagcaaaatcccagactggagatgtctcacccaaggctcagcaaccctctgaggtcacactgaagtcacacccattggatctatccccaaatgtgcagtccagagacgccatccaaaagcaagcatctgaagactccaacgacctcacgcctactctgccagagacgcccgtaccactgcccagaaaaatcaatacggggaaaaataaagtgaggcgagtgaagaccatttatgactgccaggcagacaacgatgacgagctcacattcatcgagggagaagtgattatcgtcacaggggaagaggaccaggagtggtggattggccacatcgaaggacagcctgaaaggaagggggtctttccagtgtcctttgttcatatcct

SEQ ID NO: 108601 - DNA, 5507 bp, Homo sapiens
  Payload ID: 1335
  Gene Symbol: ASAP1
  Gene Name: ArfGAP with SH3 domain, ankyrin repeat and PH domain 1
  Uniprot ID: Q9ULH1
  ENST ID: ENST00000518721
  CDS Start-End: 229-3618
cccttcctgcgccgcgctcggctcccgcgcctcgcctggcctggccgctgccgcgggcgagcactgtgcgctgggcagccccgggcccgcgcctcccgcccagccggcgcttcccggtcgcagttcgctttcccacccgagagccgcgagcgcccggccgaacccgcgatggaataatgcccagcggcccgccaggtcccggtcgttttctgatgtgacggctgagacatgagatcttcagcctccaggctctccagtttttcgtcgagagattcactatggaatcggatgccggaccagatctctgtctcggagttcatcgccgagaccaccgaggactacaactcgcccaccacgtccagcttcaccacgcggctgcacaactgcaggaacaccgtcacgctgctggaggaggctctagaccaagatagaacagcccttcagaaagtgaagaagtctgtaaaagcaatatataattctggtcaagatcatgtacaaaatgaagaaaactatgcacaagttcttgataagtttgggagtaattttttaagtcgagacaaccccgaccttggcaccgcgtttgtcaagttttctactcttacaaaggaactgtccacactgctgaaaaatctgctccagggtttgagccacaatgtgatcttcaccttggattctttgttaaaaggagacctaaagggagtcaaaggagatctcaagaagccatttgacaaagcctggaaagattatgagacaaagtttacaaaaattgagaaagagaaaagagagcacgcaaaacaacatgggatgatccgcacagagataacaggagctgagattgcggaagaaatggagaaggaaaggcgcctctttcagctccaaatgtgtgaatatctcattaaagttaatgaaatcaagaccaaaaagggtgtggatctgctgcagaatcttataaagtattaccatgcacagtgcaatttctttcaagatggcttgaaaacagctgataagttgaaacagtacattgaaaaactggctgctgatttatataatataaaacagacccaggatgaagaaaagaaacagctaactgcactccgagacttaataaaatcctctcttcaactggatcagaaagaagattctcagagccggcaaggaggatacagcatgcatcagctccagggcaataaggaatatggcagtgaaaagaaggggtacctgctaaagaaaagtgacgggatccggaaagtatggcagaggaggaagtgttcagtcaagaatgggattctgaccatctcacatgccacatctaacaggcaaccagccaagttgaaccttctcacctgccaagtaaaacctaatgccgaagacaaaaaatcttttgacctgatatcacataatagaacatatcactttcaggcagaagatgagcaggattatgtagcatggatatcagtattgacaaatagcaaagaagaggccctaaccatggccttccgtggagagcagagtgcgggagagaacagcctggaagacctgacaaaagccattattgaggatgtccagcggctcccagggaatgacatttgctgcgattgtggctcatcagaacccacctggctttcaaccaacttgggtattttgacctgtatagaatgttctggcatccatagggaaatgggggttcatatttctcgcattcagtctttggaactagacaaattaggaacttctgaactcttgctggccaagaatgtaggaaacaatagttttaatgatattatggaagcaaatttacccagcccctcaccaaaacccaccccttcaagtgatatgactgtacgaaaagaatatatcactgcaaagtatgtagatcataggttttcaaggaagacctgttcaacttcatcagctaaactaaatgaattgcttgaggccatcaaatccagggatttacttgcactaattcaagtctatgcagaaggggtagagctaatggaaccactgctggaacctgggcaggagcttggggagacagcccttcaccttgccgtccgaactgcagatcagacatctctccatttggttgacttccttgtacaaaactgtgggaacctggataagcagacggccctgggaaacacagttctacactactgtagtatgtacagtaaacctgagtgtttgaagcttttgctcaggagcaagcccactgtggatatagttaaccaggctggagaaactgccctagacatagcaaagagactaaaagctacccagtgtgaagatctgctttcccaggctaaatctggaaagttcaatccacacgtccacgtagaatatgagtggaatcttcgacaggaggagatagatgagagcgatgatgatctggatgacaaaccaagccctatcaagaaagagcgctcacccagacctcagagcttctgccactcctccagcatctccccccaggacaagctggcactgccaggattcagcactccaagggacaaacagcggctctcctatggagccttcaccaaccagatcttcgtttccacaagcacagactcgcccacatcaccaaccacggaggctccccctctgcctcctaggaacgccgggaaaggtccaactggcccaccttcaacactccctctaagcacccagacctctagtggcagctccaccctatccaagaagaggcctcctcccccaccacccggacacaagagaaccctatccgaccctcccagcccactacctcatgggcccccaaacaaaggcgcagttccttggggtaacgatgggggtccatcctcttcaagtaagactacaaacaagtttgagggactatcccagcagtcgagcaccagttctgcaaagactgcccttggcccaagagttcttcctaaactacctcagaaagtggcactaaggaaaacagatcatctctccctagacaaagccaccatcccgcccgaaatctttcagaaatcatcacagttggcagagttgccacaaaagccaccacctggagacctgcccccaaagcccacagaactggcccccaagccccaaattggagatttgccgcctaagccaggagaactgccccccaaaccacagctgggggacctgccacccaaaccccaactctcagacttacctcccaaaccacagatgaaggacctgccccccaaaccacagctgggagacctgctagcaaaatcccagactggagatgtctcacccaaggctcagcaaccctctgaggtcacactgaagtcacacccattggatctatccccaaatgtgcagtccagagacgccatccaaaagcaagcatctgaagactccaacgacctcacgcctactctgccagagacgcccgtaccactgcccagaaaaatcaatacggggaaaaataaagtgaggcgagtgaagaccatttatgactgccaggcagacaacgatgacgagctcacattcatcgagggagaagtgattatcgtcacaggggaagaggaccaggagtggtggattggccacatcgaaggacagcctgaaaggaagggggtctttccagtgtcctttgttcatatcctgtctgactagcaaaacgcagaaccttaagattgtccacatccttcatgcaagactgctgccttcatgtaaccctgggcacagtgtgtatatagctgctgttacagagtaagaaactcatggaagggccacctcaggagggggatataatgtgtgttgtaaatatcctgtggttttctgccttcaccagtatgagggtagcctcggacccggcgcgccttactggtttgccaaagccatccttggcatctagcacttacatctctctatgctgttctacaagcaaacaaacaaaaataggagtataggaactgctggctttgcaaatagaagtggtctccagcaaccgttgaaaggcatagaattgactctgttcctaacaatgcagtattctcaattgtgttactgaaaatgcaacattagcaaagaggtgggttctgttttccaggtgaaacttttagctccatgacagaccagcctgtagttatctgtgtacacagtttacagctacaaaaacctactttggtatttattacagaaaagtgctcagttaaatgtaagtgttattccttcagcaaaatattcactgacccaaaactctttatggcattttacaatgcacacagcctcatgcaagtttagacaagtggatttatactgtcttatgagtgcccgcccctgatatattacctcattatgcaaaaataacatatctttcatgactattttgacaaaagtttaaaacacatatgaagttcaaatttcaggaaccaaggactgccagaaaatattagcctctacattacgcatgcatttagaagcttacctgaaatctgccttttataaaggaatagtatggataagtggaattgtacattttttaaacttgattgccattaaagcagaaattataaggttgcaacaatatttgtttctaatcactggctttctcaagagtatggattgacatattgtgttatgaatgcacatctctcagatgtgttgaagcatccattgcatccattttttattattttcttagttttgttcttggacaaatttaaacttttaaaagattattcaagatgaatttaaaagtcaacccttcacacagtttccctactgtatgtagaatccaggtgctgaaaccaagtgtttcttttcccatgctctttgttaaaccccaattatagataatttttccagtcttaagctctgtccaccttcaagtcaattcataaccaagtttttgaacgctgctatgaattgcactgtgaaaagcactcttccctctcagttttcttttcatcccagccatgtttatcagatccttaagaacattgtatttcagtcttttacatcagtctgaattttggaaaagaatgcaatagttgtactccacagtcagtggaactgttccctgagtccgaggctcatgtgtcattctggcactacatttgcttaaattgctattttggcaacagcacagaaaactaatatttttaagcagagaatcttggcaatgagtgagagatgttaatttcacagaagcacaactcccaacccaacccttaggaaaagccctcttccatcgttacagtgctcagtgaatattaatttagttctgcttaagtggttgctatacaaactttgaatagccacctaataaataaaccttgcatgacaaacctgcaaaatattttatcagctgttattggaaagtgattttaagcaattgcttcctcagtgtcagggcacatgtgaatttccacaccaaacagagcatgaggaaccagttgacatgctgggttgtgactggcagctttagcagcctcggtactgaagccacaccagtgtccggatggaagtctgcatctgaggttgctcagtgtcccggtcat

SEQ ID NO: 108602 - DNA, 566 bp, Homo sapiens
  Payload ID: 1335
  Gene Symbol: ASAP1
  Gene Name: ArfGAP with SH3 domain, ankyrin repeat and PH domain 1
  ENST ID: ENST00000521426
  CDS Start-End: 272-566
ggtgcaaacatgcttgccaagctgaagtgtggagtgacagtttttggctgagccatgaacctaaaagtggaggtttacaaagttactgcagacaggtcattagcacgactggctgcagtgagctccctaagtcttcatcgctcctgccttttcatcagcagcgagataattgactgttagactcccgagccacagaccacggcagagatatccaggaatgattttcagagtatttgagaaaatgagaggtgcagatggttttcactgaggcatggtttcaaatttaaagaggattatggcccagaaatggatgccggaccagatctctgtctcggagttcatcgccgagaccaccgaggactacaactcgcccaccacgtccagcttcaccacgcggctgcacaactgcaggaacaccgtcacgctgctggaggaggctctagaccaagatagaacagcccttcagaaagtgaagaagtctgtaaaagcaatatataattctggtcaagatcatgtacaaaatgaagaaaactatgcacaagttcttgataagtttgggagtaatt

SEQ ID NO: 108603 - DNA, 5712 bp, Homo sapiens
  Payload ID: 1336
  Gene Symbol: ASAP2
  Gene Name: ArfGAP with SH3 domain, ankyrin repeat and PH domain 2
  Uniprot ID: O43150
  ENST ID: ENST00000281419
  CDS Start-End: 341-3361
cgcccctctccgcgggaggcgtcggggcccgcggctgggtggcgggtagttcccgccggctgtgcgcgcccgcctcggggctcgctctgagaggacgcggcggcagcggactcggagccctcggcgcgcaggcgggcggaccggccgagctgcgcggggctgcgcgccgcccctgctccgccgccaggccccgcgcggctcccgcgcccggcgctcccctttgtccgcgggccggagcggcggcggcagcggcggtgtccgagcggcggtcggagcctgctgcggcagttgaggcggcggcgcccctgcggctgtgcgccagcgccctcgcgccgaggcgatgccggaccagatctccgtgtcggaattcgtggccgagacccatgaggactacaaggcgcccacggcctccagcttcaccacccgcacggcgcagtgccggaacactgtggcggccatcgaggaggctttggacgtggaccggatggttctttacaaaatgaagaaatccgtgaaagcaatcaacagctctgggctggctcacgtggaaaatgaagagcagtacacccaggctctggagaagtttggcggcaactgtgtatgcagagatgacccagatttaggaagtgcgttcctgaagttctcagtgtttacaaaggagttgacagcacttttcaaaaacctgattcagaatatgaacaacataatctccttccctttggacagtttgctgaagggggacctgaaaggagtgaaaggggatctgaaaaagccttttgataaagcttggaaggactatgaaacaaaaataaccaagatagaaaaggagaaaaaggaacacgccaagctccatgggatgattcggactgaaataagcggagcggaaattgccgaagagatggaaaaggagaggcgcttcttccagctacagatgtgcgagtatctgctgaaggtcaacgaaatcaagattaaaaagggagtagatttacttcagaatctgatcaaatactttcatgcccaatgcaatttttttcaggatggactcaaagccgtggaaagcctcaaaccttccattgaaacgctgtctacggatcttcacacgatcaaacaggcccaggatgaagaaagaaggcagttgatacagcttcgagatattttgaaatccgcattgcaggttgaacagaaagaggactcccaaattcgtcagagcacagcttatagcttacatcagcctcagggaaacaaggaacatgggaccgagcggaacggcagcctctacaagaagagtgacgggatccgaaaagtgtggcagaaaaggaaatgttcagttaaaaatggttttctgaccatatcccatggtaccgctaaccggcctcctgcaaagctcaacctgctaacctgccaggtgaagaccaaccctgaggagaagaagtgctttgacctcatttcacatgacagaacttaccactttcaagctgaagatgaacaggaatgtcaaatatggatgtctgtgctgcaaaatagcaaagaagaagctttaaacaatgcatttaagggggatgacaatactggagaaaataacatcgtccaagaactgacaaaggagatcatctcagaagtgcagaggatgacgggcaatgacgtctgctgtgactgtggggcgccagatcctacatggctttccaccaacctgggcatcctgacctgcatcgagtgttccggaatccaccgagagctgggggttcattattccaggatgcagtccctgaccttagatgtactgggaacatctgagctgctgctcgccaagaatattgggaatgcaggctttaatgagatcatggaatgttgcctaccagctgaggactcagtcaaacccaacccaggcagcgacatgaatgcaagaaaggactacatcacagccaagtacatcgagaggagatacgcaaggaagaagcacgcggataacgcggcgaagcttcacagtctttgcgaggccgtcaaaacgagagatatttttggattgctccaagcttatgctgatggtgtggatcttacggaaaaaatcccactggccaacggacatgagccggatgaaacggccctccaccttgcagtcagatccgtggatcgaacctctcttcacattgtagactttttagttcagaacagtgggaacctggataaacagacagggaaaggcagcacagccctgcactactgctgcctgaccgacaatgccgagtgcctcaagttgctcctgcgggggaaggcctccatcgagatagcaaacgagtcaggagagactccgctggacattgccaagcgcctcaagcacgagcactgtgaggagctgctgacccaagccttatctggaagatttaattctcacgttcacgttgaatatgaatggcgactactccacgaagacctggatgaaagtgatgacgacatggatgagaaattgcagcccagtcccaaccggcgggaagaccggcccatcagcttctaccagctgggctccaaccagcttcagtctaacgctgtatctttggccagagatgctgcaaaccttgccaaggagaagcagagggctttcatgcccagcatcttgcagaatgagacttacggagccctcctgagtggcagcccacctcccgcccagcctgcagcccccagcaccaccagcgcccccccgcttcctccacggaatgttggcaaagttcagacagcctcctctgctaacaccctgtggaagacaaactctgtaagtgtggacggtggaagccggcagcgatcttcgtcagatccgccagctgtccatccaccgctgccccctcttcgcgtgacatctaccaatcccctgacccccacgccgcccccacccgttgccaagacgcccagcgtaatggaagccttgagccagccgagcaagcctgccccgcctgggatctcacagatcaggcccccacctctgcccccacagccgcccagccgcctcccgcagaagaagcctgcgccgggggctgacaagtccaccccactgaccaacaaaggccaaccgagaggacctgtggatctctctgcaacggaagctctgggtcctctgtccaatgctatggtcctgcagccccctgcacccatgcctaggaagtcgcaggcaaccaagttgaagcctaagcgggtgaaagcgctctataactgtgtggctgacaaccccgatgagctcaccttctccgagggggatgtgatcatcgtggacggggaggaggaccaggagtggtggattggccacattgatggagatcctggtcgcaaaggcgcattcccggtgtcatttgtgcactttatcgctgactgaattgctactgaacaaaagcattaacagttatgttcctgtttcgttattggtaccaaaactcttgccagataaccagtttcatgaactgtttgtatggcagcccatgttctctaatgccactgctctgttttaaaaactcagaggcaatttttacatatcagtaattgtttttataatttgtggttttcatgaaacattgctatgcatttattaggaaaaactgaatttcccaacaggtgaactgaaaagttattttaactattatacataatcaagatcctgcctctacggaattagctaaacctaaaaatgtttgcattaatgaataaattcttcctgcattccttggcccagttctggagttggtgacctttatcacaattattattttaggcggccagtgaactgctgcttcagaagtccatagcccagctctgaactttctcgataaaatgccatcagttcacctttaaagacacacattcctttgaaatccacccagtgtttaaaaagcaacttggaaatttacacattagcattgtactttctagccctaatttgtgaggttgcagctatcattatattctgcatgtatgtataacctgttgtgaacaatcatacttaacaaaactactgatggtttatgacaacgtagggtaactacagttcattctgttccaggttatataaaactgcatttcctgaatttggttaaaaactaaggatgatggattgcaaaacagttcttttaaattagtttatatgctttaggtgttttggaatttgccttcttgaacttcctgagtcacacagaaagcaactgtacacagtagaattctgtggcgcagaccatgctgtattaacacatcacttgctgtttcctactgagtgtaccactgccttcccttctagcccaggagaatgtttactcagtttagtgtcttgtatttctataatactccaacaggaatggtagtcacactgtcttgaaattgaatctgtccatctgtttataatcaagaacatatcagaaatatataggtcccaggtaatactcccaaacatcccactttttactgtttcaggccatcatatcattcttaagctacttggggtggtagtagaggattaggttgtctattataaaaccaaaactcattcgtttaatgaacttgactgtcatacctctatttagtaattgcgagggtaagattcatagtaggaatattggaaattttggcactctgagaataaataggcatatgatacccacttggacttttaacaaaagtaaaggaataaatttgcatataggcttggaaagtgaggcagcaatgctgttaactgcatttgttgtgatggtgcatttgattgaagcagcttgtctttattatgcaagactgtgtagagttttttttttttttggcattgtactttttgtttttgttataaaggaagacagaacaaactggaatgttttatgatgttgtatagcaatcgctttttacctttcaaagttccgggtaaaaatgtgttatatctgtagttttttgtttttgtttttttttaaagcactacatctgttttcactaattgttaatttctgtttgaacccttcatttaattttctcatagatttaagtaaacagatgtattttgcacagtgcacttatgtctattttaacaatcctcctgcatctgtattttatagtcagccttttgaccacctggtgccagctatataaggaataaagttgattcatatcaacattagaactccagtcccaaactaatctgtcaggttcactggtacataaatacctaggaaatatttttccagtctacaatttggtgctattgtgcagtaactaatagtactcttaccagaggagaaattatattaacgaccctgctaatatcctttcttagttatttgctccttgcaaattaaaaaagcaactaagagaaagaaaaacattgtagatatctatttatatttaaagtttatgtttcatgaactgcagctgcaggattctggcattttgcatgccattctccatcagatctgggatgatggctcagaacatgtacacagactaagagtaactgtgtgatctgttaaggggtggataacataatatgcagcttaggatgctattttgagatgtatgatattcagttcattcacctgattactttggttgcagcacaactgtatatattgtataaccgaaattgattattttcattgtccttaatgcagtgatttataattagagcatgtttaataagtttactcttcttgttaactagtcatttgactggaaaaaaataaaatacttttaaatgga

SEQ ID NO: 108604 - DNA, 5582 bp, Homo sapiens
  Payload ID: 1336
  Gene Symbol: ASAP2
  Gene Name: ArfGAP with SH3 domain, ankyrin repeat and PH domain 2
  Uniprot ID: O43150
  ENST ID: ENST00000315273
  CDS Start-End: 341-3226
cgcccctctccgcgggaggcgtcggggcccgcggctgggtggcgggtagttcccgccggctgtgcgcgcccgcctcggggctcgctctgagaggacgcggcggcagcggactcggagccctcggcgcgcaggcgggcggaccggccgagctgcgcggggctgcgcgccgcccctgctccgccgccaggccccgcgcggctcccgcgcccggcgctcccctttgtccgcgggccggagcggcggcggcagcggcggtgtccgagcggcggtcggagcctgctgcggcagttgaggcggcggcgcccctgcggctgtgcgccagcgccctcgcgccgaggcgatgccggaccagatctccgtgtcggaattcgtggccgagacccatgaggactacaaggcgcccacggcctccagcttcaccacccgcacggcgcagtgccggaacactgtggcggccatcgaggaggctttggacgtggaccggatggttctttacaaaatgaagaaatccgtgaaagcaatcaacagctctgggctggctcacgtggaaaatgaagagcagtacacccaggctctggagaagtttggcggcaactgtgtatgcagagatgacccagatttaggaagtgcgttcctgaagttctcagtgtttacaaaggagttgacagcacttttcaaaaacctgattcagaatatgaacaacataatctccttccctttggacagtttgctgaagggggacctgaaaggagtgaaaggggatctgaaaaagccttttgataaagcttggaaggactatgaaacaaaaataaccaagatagaaaaggagaaaaaggaacacgccaagctccatgggatgattcggactgaaataagcggagcggaaattgccgaagagatggaaaaggagaggcgcttcttccagctacagatgtgcgagtatctgctgaaggtcaacgaaatcaagattaaaaagggagtagatttacttcagaatctgatcaaatactttcatgcccaatgcaatttttttcaggatggactcaaagccgtggaaagcctcaaaccttccattgaaacgctgtctacggatcttcacacgatcaaacaggcccaggatgaagaaagaaggcagttgatacagcttcgagatattttgaaatccgcattgcaggttgaacagaaagaggactcccaaattcgtcagagcacagcttatagcttacatcagcctcagggaaacaaggaacatgggaccgagcggaacggcagcctctacaagaagagtgacgggatccgaaaagtgtggcagaaaaggaaatgttcagttaaaaatggttttctgaccatatcccatggtaccgctaaccggcctcctgcaaagctcaacctgctaacctgccaggtgaagaccaaccctgaggagaagaagtgctttgacctcatttcacatgacagaacttaccactttcaagctgaagatgaacaggaatgtcaaatatggatgtctgtgctgcaaaatagcaaagaagaagctttaaacaatgcatttaagggggatgacaatactggagaaaataacatcgtccaagaactgacaaaggagatcatctcagaagtgcagaggatgacgggcaatgacgtctgctgtgactgtggggcgccagatcctacatggctttccaccaacctgggcatcctgacctgcatcgagtgttccggaatccaccgagagctgggggttcattattccaggatgcagtccctgaccttagatgtactgggaacatctgagctgctgctcgccaagaatattgggaatgcaggctttaatgagatcatggaatgttgcctaccagctgaggactcagtcaaacccaacccaggcagcgacatgaatgcaagaaaggactacatcacagccaagtacatcgagaggagatacgcaaggaagaagcacgcggataacgcggcgaagcttcacagtctttgcgaggccgtcaaaacgagagatatttttggattgctccaagcttatgctgatggtgtggatcttacggaaaaaatcccactggccaacggacatgagccggatgaaacggccctccaccttgcagtcagatccgtggatcgaacctctcttcacattgtagactttttagttcagaacagtgggaacctggataaacagacagggaaaggcagcacagccctgcactactgctgcctgaccgacaatgccgagtgcctcaagttgctcctgcgggggaaggcctccatcgagatagcaaacgagtcaggagagactccgctggacattgccaagcgcctcaagcacgagcactgtgaggagctgctgacccaagccttatctggaagatttaattctcacgttcacgttgaatatgaatggcgactactccacgaagacctggatgaaagtgatgacgacatggatgagaaattgcagcccagtcccaaccggcgggaagaccggcccatcagcttctaccagctgggctccaaccagcttcagtctaacgctgtatctttggccagagatgctgcaaaccttgccaaggagaagcagagggctttcatgcccagcatcttgcagaatgagacttacggagccctcctgagtggcagcccacctcccgcccagcctgcagcccccagcaccaccagcgcccccccgcttcctccacggaatgttggcaaagatcccctgacccccacgccgcccccacccgttgccaagacgcccagcgtaatggaagccttgagccagccgagcaagcctgccccgcctgggatctcacagatcaggcccccacctctgcccccacagccgcccagccgcctcccgcagaagaagcctgcgccgggggctgacaagtccaccccactgaccaacaaaggccaaccgagaggacctgtggatctctctgcaacggaagctctgggtcctctgtccaatgctatggtcctgcagccccctgcacccatgcctaggaagtcgcaggcaaccaagttgaagcctaagcgggtgaaagcgctctataactgtgtggctgacaaccccgatgagctcaccttctccgagggggatgtgatcatcgtggacggggaggaggaccaggagtggtggattggccacattgatggagatcctggtcgcaaaggcgcattcccggtgtcatttgtgcactttatcgctgactgaattgctactgaacaaaagcattaacagttatgttcctgtttcgttattggtaccaaaactcttgccagataaccagtttcatgaactgtttgtatggcagcccatgttctctaatgccactgctctgttttaaaaactcagaggcaatttttacatatcagtaattgtttttataatttgtggttttcatgaaacattgctatgcatttattaggaaaaactgaatttcccaacaggtgaactgaaaagttattttaactattatacataatcaagatcctgcctctacggaattagctaaacctaaaaatgtttgcattaatgaataaattcttcctgcattccttggcccagttctggagttggtgacctttatcacaattattattttaggcggccagtgaactgctgcttcagaagtccatagcccagctctgaactttctcgataaaatgccatcagttcacctttaaagacacacattcctttgaaatccacccagtgtttaaaaagcaacttggaaatttacacattagcattgtactttctagccctaatttgtgaggttgcagctatcattatattctgcatgtatgtataacctgttgtgaacaatcatacttaacaaaactactgatggtttatgacaacgtagggtaactacagttcattctgttccaggttatataaaactgcatttcctgaatttggttaaaaactaaggatgatggattgcaaaacagttcttttaaattagtttatatgctttaggtgttttggaatttgccttcttgaacttcctgagtcacacagaaagcaactgtacacagtagaattctgtggcgcagaccatgctgtattaacacatcacttgctgtttcctactgagtgtaccactgccttcccttctagcccaggagaatgtttactcagtttagtgtcttgtatttctataatactccaacaggaatggtagtcacactgtcttgaaattgaatctgtccatctgtttataatcaagaacatatcagaaatatataggtcccaggtaatactcccaaacatcccactttttactgtttcaggccatcatatcattcttaagctacttggggtggtagtagaggattaggttgtctattataaaaccaaaactcattcgtttaatgaacttgactgtcatacctctatttagtaattgcgagggtaagattcatagtaggaatattggaaattttggcactctgagaataaataggcatatgatacccacttggacttttaacaaaagtaaaggaataaatttgcatataggcttggaaagtgaggcagcaatgctgttaactgcatttgttgtgatggtgcatttgattgaagcagcttgtctttattatgcaagactgtgtagagttttttttttttttggcattgtactttttgtttttgttataaaggaagacagaacaaactggaatgttttatgatgttgtatagcaatcgctttttacctttcaaagttccgggtaaaaatgtgttatatctgtagttttttgtttttgtttttttttaaagcactacatctgttttcactaattgttaatttctgtttgaacccttcatttaattttctcatagatttaagtaaacagatgtattttgcacagtgcacttatgtctattttaacaatcctcctgcatctgtattttatagtcagccttttgaccacctggtgccagctatataaggaataaagttgattcatatcaacattagaactccagtcccaaactaatctgtcaggttcactggtacataaatacctaggaaatatttttccagtctacaatttggtgctattgtgcagtaactaatagtactcttaccagaggagaaattatattaacgaccctgctaatatcctttcttagttatttgctccttgcaaattaaaaaagcaactaagagaaagaaaaacattgtagatatctatttatatttaaagtttatgtttcatgaactgcagctgcaggattctggcattttgcatgccattctccatcagatctgggatgatggctcagaacatgtacacagactaagagtaactgtgtgatctgttaaggggtggataacataatatgcagcttaggatgctattttgagatgtatgatattcagttcattcacctgattactttggttgcagcacaactgtatatattgtataaccgaaattgattattttcattgtccttaatgcagtgatttataattagagcatgtttaataagtttactcttcttgttaactagtcatttgactggaaaaaaataaaatacttttaaatggacatgg

SEQ ID NO: 108605 - DNA, 4050 bp, Homo sapiens
  Payload ID: 1337
  Gene Symbol: ASAP3
  Gene Name: ArfGAP with SH3 domain, ankyrin repeat and PH domain 3
  Uniprot ID: Q8TDY4
  ENST ID: ENST00000336689
  CDS Start-End: 46-2757
gtgccccccgcgccccgctccggcagctccacgctcgcgcccgccatgccggagcagttcagcgtcgccgagttcctggccgtcaccgcggaggacctcagctccccggctggggccgccgccttcgccgccaagatgccccggtaccgaggggcggcgctggcgcgggaggagatcttggaaggagaccaagccatcctgcagagaataaagaaggctgtgcgggcaatccatagctccggccttggccatgtggagaatgaagagcagtaccgagaggccgtggaatccttaggcaacagccacctgtcccagaacagccatgagctgtccacaggcttcctaaacttggccgtgttcacccgcgaggttgctgcgctcttcaagaacctgattcagaacttgaacaacattgtctctttccccctggacagtctgatgaaggggcagctgagggacggtcgacaggattccaaaaaacagctggagaaggcatggaaggactatgaagccaaaatggccaagctggagaaggagcgcgatcgggccagggtgacaggagggatccctggggaggtggcccaggacatgcagagagagcggcgcatcttccagctgcacatgtgtgagtatctgctcaaagccggggagagccagatgaagcaaggtcctgacttccttcagagcctcatcaagttcttccacgcccagcacaactttttccaagatggctggaaggctgcccagagcctgttccccttcatcgagaagctggcggcctcagtacatgcactccatcaggcccaggaggacgagctacagaagctgacccagctccgggactccctccgagggacactgcagcttgagagcagagaggaacacctgagccggaagaactcaggatgtggctatagcatccaccagcaccaaggcaacaagcagtttgggacggagaaagtgggctttctatacaagaaaagtgacggaattcgaagagtctggcagaaaaggaagtgtggagtcaagtatggctgcctgaccatctcacacagcacgataaaccggcccccggtgaagctgaccctgctgacgtgccaagtgaggccaaaccctgaggagaaaaagtgcttcgacctggtgacccacaaccggacgtaccactttcaggcagaggacgagcacgagtgtgaggcgtgggtgtcagtgttgcagaacagcaaggacgaagccctgagcagcgccttcctcggggagcccagcgctggcccggggtcctgggggtccgccggccatgatggggagccgcacgacctcacaaagctgctcatcgcggaggtgaagagcaggcctgggaatagccagtgctgcgactgcggggctgcagaccccacgtggctcagcaccaacctgggcgtgctcacctgcatccagtgctcgggcgtccaccgcgaactgggcgtgcgcttttcgcgcatgcagtcactcaccttggacctgctgggcccctccgagttgttgctggccttgaacatgggaaacacgagcttcaatgaggtcatggaggcccagctaccctcacacggcggccctaaaccctcagctgagagtgacatgggcacccgcagggactacattatggccaagtatgtggagcataggtttgcacgccggtgcacacctgagcctcagcgactctggacagccatttgcaacagggacctcctgtcggtactggaggcctttgccaatgggcaggactttggacagccgctgccagggcctgatgcacaggcacctgaagaactcgtcttgcatttggctgtcaaagtcgccaaccaggcttccctgcctctggtggatttcatcatccagaacggtggtcacctggatgccaaggctgctgacgggaacacggctctgcactacgcagcactctacaaccagcccgactgcctcaagctgctgctgaaggggagagctttggttggcacagtaaatgaagcaggcgagacagctctggacatagccaggaagaagcaccacaaggagtgtgaggagctgctggagcaggcccaggcggggacctttgccttccctctacatgtggactactcctgggtaatttccacagagcctggctctgacagtgaggaggatgaggaagagaagcgctgcttgctgaagctcccggcccaggctcactgggccagtgggaggctggacatcagcaacaagacctatgagactgtcgccagcctgggagcagccacccctcagggcgagagtgaggactgtcccccgcccttgccagtcaaaaactcttctcggactttggtccaagggtgtgcaagacatgccagtggagatcgttctgaagtctccagcctgagttcagaggcccctgagacccctgagagcctgggcagtccagcctcctcctccagtctgatgagccccttggaacctggggatcccagccaagccccacccaactctgaagagggcctccgagagcccccaggcacctccagacccagcctgacatccgggaccaccccttcggagatgtacctccccgtcagattcagctccgagagcactcgctcctatcggcggggggcgcggagccctgaagatggtccctcagccaggcagcctctgcccagaaggaacgtgccggttggcatcactgaaggagatggctcaaggactgggagtctcccagcaagttctgtgcaacttttgcaagactagctccttgctggcccccacatgccccatgctaggccccaatgttcagagctgggacttgagctcacaaaactggggagctgagacatttgttctcttggatctcactctctctgtcccttgtgcctctgtagctggccttcttcctgccacaggccatgcctctaccaaggacacatggcctttccctgttaggactgatggcggttctttcctatctcattacccgctaggggcctgggagccctgtggctggatctgagtgctcctgagctggcttcagctgcagaactctcagtccctcatcagatcgagactctatttcccccgtcagtctgggggcttcacaagggcaggagagccctccatcactgacttccagatcagggaccctgccaagtagggactgtcttctcagccagccatttattagtctaatattccttcactaaattccaactctatgtctggacctgtgttaggcacttcagataccacacgagtaagacaagggccctgcaggggtggtcctttggtggaaagctggtcttaagggttgggcttgggaataggcagggtcagattccagggcatggctctggactcagctggtttatacctatatgaccattacaattgtctacagatcacatccattctggctggtcaacatgcatgctgtactggctgttaaataaaaatattctgaatgtcactccttttgagggacagcacagccttccctaggcattctcctatattccccagccaaattgtagagtcagatgcacccacatttgcctgtgtccttgatttagcaggaaggaaaggaatagtcagggttgatggatgcccacttctcttctctttctcttggtcaactcaggagccttttagtctgagggaatggagaggcaaagaaagaagggagagtaatagaattgggagggcagagacttaagggttctgcttcccagccctagaaattctatcattgctcagccccaatgagaaagcagatacacctaagccatcatcaaccactaacatctcaacttgccagttgctgggtgctgggccctggcaggaatgggccaagccaagcaggggagactagagagcaccaatggccaacacagctgcctggctggggaggctgtgctgtttcccctggagacctgactggtctgtggttcccacaggaacagggttgtcttttgagcccccagtgtctggtttcattcatctcagacttgttatttcactcatctctaataaaggattggggggtcagtt

SEQ ID NO: 108606 - DNA, 2865 bp, Homo sapiens
  Payload ID: 1337
  Gene Symbol: ASAP3
  Gene Name: ArfGAP with SH3 domain, ankyrin repeat and PH domain 3
  Uniprot ID: Q8TDY4
  ENST ID: ENST00000437606
  CDS Start-End: 47-2731
agtgccccccgcgccccgctccggcagctccacgctcgcgcccgccatgccggagcagttcagcgtcgccgagttcctggccgtcaccgcggaggacctcagctccccggctggggccgccgccttcgccgccaagatgccccggtaccgaggggcggcgctggcgcgggaggagatcttggaaggagaccaagccatcctgcagagaataaagaaggctgtgcgggcaatccatagctccggccttggccatgtggagaatgaagagcagtaccgagaggccgtggaatccttaggcaacagccacctgtcccagaacagccatgagctgtccacaggcttcctaaacttggccgtgttcacccgcgaggttgctgcgctcttcaagaacctgattcagaacttgaacaacattgtctctttccccctggacagtctgatgaaggggcagctgagggacggtcgacaggcttctctttccttggggtctagggccaagctggagaaggagcgcgatcgggccagggtgacaggagggatccctggggaggtggcccaggacatgcagagagagcggcgcatcttccagctgcacatgtgtgagtatctgctcaaagccggggagagccagatgaagcaaggtcctgacttccttcagagcctcatcaagttcttccacgcccagcacaactttttccaagatggctggaaggctgcccagagcctgttccccttcatcgagaagctggcggcctcagtacatgcactccatcaggcccaggaggacgagctacagaagctgacccagctccgggactccctccgagggacactgcagcttgagagcagagaggaacacctgagccggaagaactcaggatgtggctatagcatccaccagcaccaaggcaacaagcagtttgggacggagaaagtgggctttctatacaagaaaagtgacggaattcgaagagtctggcagaaaaggaagtgtggagtcaagtatggctgcctgaccatctcacacagcacgataaaccggcccccggtgaagctgaccctgctgacgtgccaagtgaggccaaaccctgaggagaaaaagtgcttcgacctggtgacccacaaccggacgtaccactttcaggcagaggacgagcacgagtgtgaggcgtgggtgtcagtgttgcagaacagcaaggacgaagccctgagcagcgccttcctcggggagcccagcgctggcccggggtcctgggggtccgccggccatgatggggagccgcacgacctcacaaagctgctcatcgcggaggtgaagagcaggcctgggaatagccagtgctgcgactgcggggctgcagaccccacgtggctcagcaccaacctgggcgtgctcacctgcatccagtgctcgggcgtccaccgcgaactgggcgtgcgcttttcgcgcatgcagtcactcaccttggacctgctgggcccctccgagttgttgctggccttgaacatgggaaacacgagcttcaatgaggtcatggaggcccagctaccctcacacggcggccctaaaccctcagctgagagtgacatgggcacccgcagggactacattatggccaagtatgtggagcataggtttgcacgccggtgcacacctgagcctcagcgactctggacagccatttgcaacagggacctcctgtcggtactggaggcctttgccaatgggcaggactttggacagccgctgccagggcctgatgcacaggcacctgaagaactcgtcttgcatttggctgtcaaagtcgccaaccaggcttccctgcctctggtggatttcatcatccagaacggtggtcacctggatgccaaggctgctgacgggaacacggctctgcactacgcagcactctacaaccagcccgactgcctcaagctgctgctgaaggggagagctttggttggcacagtaaatgaagcaggcgagacagctctggacatagccaggaagaagcaccacaaggagtgtgaggagctgctggagcaggcccaggcggggacctttgccttccctctacatgtggactactcctgggtaatttccacagagcctggctctgacagtgaggaggatgaggaagagaagcgctgcttgctgaagctcccggcccaggctcactgggccagtgggaggctggacatcagcaacaagacctatgagactgtcgccagcctgggagcagccacccctcagggcgagagtgaggactgtcccccgcccttgccagtcaaaaactcttctcggactttggtccaagggtgtgcaagacatgccagtggagatcgttctgaagtctccagcctgagttcagaggcccctgagacccctgagagcctgggcagtccagcctcctcctccagtctgatgagccccttggaacctggggatcccagccaagccccacccaactctgaagagggcctccgagagcccccaggcacctccagacccagcctgacatccgggaccaccccttcggagatgtacctccccgtcagattcagctccgagagcactcgctcctatcggcggggggcgcggagccctgaagatggtccctcagccaggcagcctctgcccagaaggaacgtgccggttggcatcactgaaggagatggctcaaggactgggagtctcccagcaagttctgtgcaacttttgcaagactagctccttgctggcccccacatgccccatgctaggccccaatgttcagagctgggacttgagctcacaaaactggggagctgagacatttgttctcttggatctcactctctctgtcccttgtgcctctgtagctg

SEQ ID NO: 108607 - DNA, 907 bp, Homo sapiens
  Payload ID: 1337
  Gene Symbol: ASAP3
  Gene Name: ArfGAP with SH3 domain, ankyrin repeat and PH domain 3
  ENST ID: ENST00000484418
  CDS Start-End: 1-373
gcgcttttcgcgcatgcagtcactcaccttggacctgctgggcccctccgagttgttgctggccttgaacatgggaaacacgagcttcaatgaggtcatggaggcccagctaccctcacacggcggccctaaaccctcagctgagagtgacatgggcacccgcagggactacattatggccaagtatgtggagcataggtttgcacgccggtgcacacctgagcctcagcgactctggacagccatttgcaacagggacctcctgtcggtactggaggcctttgccaatgggcaggactttggacagccgctgccagggcctgatgcacaggtgagaacccctccaagggccacttataacccacctgtctaacatattccccagttcttctccaggaccagctgttactcccctccaccccacctctgacatctgctcagatctcacccatcagagtggcacctgaagaactcgtcttgcatttggctgtcaaagtcgccaaccaggcttccctgcctctggtggatttcatcatccagaacggtggtcacctggatgccaaggctgctgacgggaacacggctctgcactacgcagcactctacaaccagcccgactgcctcaagctgctgctgaaggggagagctttggttggcacagtaaatgaagcaggcgagacagctctggacatagccaggaagaagcaccacaaggagtgtgaggagctgctggagcaggcccaggcggggacctttgccttccctctacatgtggactactcctgggtaatttccacagagcctggctctgacagtgaggaggatgaggaagagaagcgctgcttgctgaagctcccggcccaggctcactgggccagtgggaggctggacatcagcaacaagacct

SEQ ID NO: 108608 - DNA, 936 bp, Homo sapiens
  Payload ID: 1337
  Gene Symbol: ASAP3
  Gene Name: ArfGAP with SH3 domain, ankyrin repeat and PH domain 3
  ENST ID: ENST00000465372
  CDS Start-End: 1-612
ctggagcaggcccaggcggggacctttgccttccctctacatgtggactactcctgggtaatttccacagagcctggctctgacagtgaggaggatgaggaagagaagcgctgcttgctgaagctcccggcccaggctcactgggccagtgggaggctggacatcagcaacaagacctatgagactgtcgccagcctgggagcagccacccctcagggcgagaatcgttctgaagtctccagcctgagttcagaggcccctgagacccctgagagcctgggcagtccagcctcctcctccagtctgatgagccccttggaacctggggatcccagccaagccccacccaactctgaagagggcctccgagagcccccaggcacctccagacccagcctgacatccgggaccaccccttcggagatgtacctccccgtcagattcagctccgagagcactcgctcctatcggcggggggcgcggagccctgaagatggtccctcagccaggcagcctctgcccagaaggaacgtgccggttggcatcactgaaggagatggctcaaggactgggagtctcccagcaagttctgtgcaacttttgcaagactagctccttgctggcccccacatgccccatgctaggccccaatgttcagagctgggacttgagctcacaaaactggggagctgagacatttgttctcttggatctcactctctctgtcccttgtgcctctgtagctggccttcttcctgccacaggccatgcctctaccaaggacacatggcctttccctgttaggactgatggcggttctttcctatctcattacccgctaggggcctgggagccctgtggctggatctgagtgctcctgagctggcttcagctgcagaactctcagtccctcatcagatcgagactctatttccc

SEQ ID NO: 108609 - DNA, 3024 bp, Homo sapiens
  Payload ID: 1337
  Gene Symbol: ASAP3
  Gene Name: ArfGAP with SH3 domain, ankyrin repeat and PH domain 3
  ENST ID: ENST00000492982
  CDS Start-End: 52-186
agctcagtgccccccgcgccccgctccggcagctccacgctcgcgcccgccatgccggagcagttcagcgtcgccgagttcctggccgtcaccgcggaggacctcagctccccggctggggccgccgccttcgccgccaagatgccccgatcttggaaggagaccaagccatcctgcagagaataaagaaggctgtgcgggcaatccatagctccggccttggccatgtggagaatgaagagcagtaccgagaggccgtggaatccttaggcaacagccacctgtcccagaacagccatgagctgtccacaggcttcctaaacttggccgtgttcacccgcgaggttgctgcgctcttcaagaacctgattcagaacttgaacaacattgtctctttccccctggacagtctgatgaaggggcagctgagggacggtcgacaggattccaaaaaacagctggagaaggcatggaaggactatgaagccaaaatggccaagctggagaaggagcgcgatcgggccagggtgacaggagggatccctggggaggtggcccaggacatgcagagagagcggcgcatcttccagctgcacatgtgtgagtatctgctcaaagccggggagagccagatgaagcaaggtcctgacttccttcagagcctcatcaagttcttccacgcccagcacaactttttccaagatggctggaaggctgcccagagcctgttccccttcatcgagaagctggcggcctcagtacatgcactccatcaggcccaggaggacgagctacagaagctgacccagctccgggactccctccgagggacactgcagcttgagagcagagaggaacacctgagccggaagaactcaggatgtggctatagcatccaccagcaccaaggcaacaagcagtttgggacggagaaagtgggctttctatacaagaaaagtgacggaattcgaagagtctggcagaaaaggaagtgtggagtcaagtatggctgcctgaccatctcacacagcacgataaaccggcccccggtgaagctgaccctgctgacgtgccaagtgaggccaaaccctgaggagaaaaagtgcttcgacctggtgacccacaaccggacgtaccactttcaggcagaggacgagcacgagtgtgaggcgtgggtgtcagtgttgcagaacagcaaggacgaagccctgagcagcgccttcctcggggagcccagcgctggcccggggtcctgggggtccgccggccatgatggggagccgcacgacctcacaaagctgctcatcgcggaggtgaagagcaggcctgggaatagccagtgctgcgactgcggggctgcagaccccacgtggctcagcaccaacctgggcgtgctcacctgcatccagtgctcgggcgtccaccgcgaactgggcgtgcgcttttcgcgcatgcagtcactcaccttggacctgctgggcccctccgagttgttgctggccttgaacatgggaaacacgagcttcaatgaggtcatggaggcccagctaccctcacacggcggccctaaaccctcagctgagagtgacatgggcacccgcagggactacattatggccaagtatgtggagcataggtttgcacgccggtgcacacctgagcctcagcgactctggacagccatttgcaacagggacctcctgtcggtactggaggcctttgccaatgggcaggactttggacagccgctgccagggcctgatgcacaggcacctgaagaactcgtcttgcatttggctgtcaaagtcgccaaccaggcttccctgcctctggtggatttcatcatccagaacggtggtcacctggatgccaaggctgctgacgggaacacggctctgcactacgcagcactctacaaccagcccgactgcctcaagctgctgctgaaggggagagctttggttggcacagtaaatgaagcaggcgagacagctctggacatagccaggaagaagcaccacaaggagtgtgaggagctgctggagcaggcccaggcggggacctttgccttccctctacatgtggactactcctgggtaatttccacagagcctggctctgacagtgaggaggatgaggaagagaaggtgggtcccagccctgtccctcaggcctctggatggcagaaggaaagagccagattgggcctgcgctgcttgctgaagctcccggcccaggctcactgggccagtgggaggctggacatcagcaacaagacctatgagactgtcgccagcctgggagcagccacccctcagggcgagagtgaggactgtcccccgcccttgccagtcaaaaactcttctcggactttggtccaagggtgtgcaagacatgccagtggagatcgttctgaagtctccagcctgagttcagaggcccctgagacccctgagagcctgggcagtccagcctcctcctccagtctgatgagccccttggaacctggggatcccagccaagccccacccaactctgaagagggcctccgagagcccccaggcacctccagacccagcctgacatccgggaccaccccttcggagatgtacctccccgtcagattcagctccgagagcactcgctcctatcggcggggggcgcggagccctgaagatggtccctcagccaggcagcctctgcccagaaggaacgtgccggttggcatcactgaaggagatggctcaaggactgggagtctcccagcaagttctgtgcaacttttgcaagactagctccttgctggcccccacatgccccatgctaggccccaatgttcagagctgggacttgagctcacaaaactggggagctgagacatttgttctcttggatctcactctctctgtcccttgtgcctctgtagctggccttcttcctgccacaggccatgcctctaccaaggacacatggcctttccctgttaggactgatggcggttctttcctatctcattacccgcta

SEQ ID NO: 108610 - DNA, 2552 bp, Homo sapiens
  Payload ID: 1337
  Gene Symbol: ASAP3
  Gene Name: ArfGAP with SH3 domain, ankyrin repeat and PH domain 3
  Uniprot ID: Q8TDY4
  ENST ID: ENST00000495646
  CDS Start-End: 36-1259
cgtctattttcctacgactccagctggccttgaacatgggaaacacgagcttcaatgaggtcatggaggcccagctaccctcacacggcggccctaaaccctcagctgagagtgacatgggcacccgcagggactacattatggccaagtatgtggagcataggtttgcacgccggtgcacacctgagcctcagcgactctggacagccatttgcaacagggacctcctgtcggtactggaggcctttgccaatgggcaggactttggacagccgctgccagggcctgatgcacaggcacctgaagaactcgtcttgcatttggctgtcaaagtcgccaaccaggcttccctgcctctggtggatttcatcatccagaacggtggtcacctggatgccaaggctgctgacgggaacacggctctgcactacgcagcactctacaaccagcccgactgcctcaagctgctgctgaaggggagagctttggttggcacagtaaatgaagcaggcgagacagctctggacatagccaggaagaagcaccacaaggagtgtgaggagctgctggagcaggcccaggcggggacctttgccttccctctacatgtggactactcctgggtaatttccacagagcctggctctgacagtgaggaggatgaggaagagaagcgctgcttgctgaagctcccggcccaggctcactgggccagtgggaggctggacatcagcaacaagacctatgagactgtcgccagcctgggagcagccacccctcagggcgagagtgaggactgtcccccgcccttgccagtcaaaaactcttctcggactttggtccaagggtgtgcaagacatgccagtggagatcgttctgaagtctccagcctgagttcagaggcccctgagacccctgagagcctgggcagtccagcctcctcctccagtctgatgagccccttggaacctggggatcccagccaagccccacccaactctgaagagggcctccgagagcccccaggcacctccagacccagcctgacatccgggaccaccccttcggagatgtacctccccgtcagattcagctccgagagcactcgctcctatcggcggggggcgcggagccctgaagatggtccctcagccaggcagcctctgcccagaaggaacgtgccggttggcatcactgaaggagatggctcaaggactgggagtctcccagcaagttctgtgcaacttttgcaagactagctccttgctggcccccacatgccccatgctaggccccaatgttcagagctgggacttgagctcacaaaactggggagctgagacatttgttctcttggatctcactctctctgtcccttgtgcctctgtagctggccttcttcctgccacaggccatgcctctaccaaggacacatggcctttccctgttaggactgatggcggttctttcctatctcattacccgctaggggcctgggagccctgtggctggatctgagtgctcctgagctggcttcagctgcagaactctcagtccctcatcagatcgagactctatttcccccgtcagtctgggggcttcacaagggcaggagagccctccatcactgacttccagatcagggaccctgccaagtagggactgtcttctcagccagccatttattagtctaatattccttcactaaattccaactctatgtctggacctgtgttaggcacttcagataccacacgagtaagacaagggccctgcaggggtggtcctttggtggaaagctggtcttaagggttgggcttgggaataggcagggtcagattccagggcatggctctggactcagctggtttatacctatatgaccattacaattgtctacagatcacatccattctggctggtcaacatgcatgctgtactggctgttaaataaaaatattctgaatgtcactccttttgagggacagcacagccttccctaggcattctcctatattccccagccaaattgtagagtcagatgcacccacatttgcctgtgtccttgatttagcaggaaggaaaggaatagtcagggttgatggatgcccacttctcttctctttctcttggtcaactcaggagccttttagtctgagggaatggagaggcaaagaaagaagggagagtaatagaattgggagggcagagacttaagggttctgcttcccagccctagaaattctatcattgctcagccccaatgagaaagcagatacacctaagccatcatcaaccactaacatctcaacttgccagttgctgggtgctgggccctggcaggaatgggccaagccaagcaggggagactagagagcaccaatggccaacacagctgcctggctggggaggctgtgctgtttcccctggagacctgactggtctgtggttcccacaggaacagggttgtcttttgagcccccagtgtctggtttcattcatctcagacttgttatttcactcatctctaataaaggattggggggtcagtt

SEQ ID NO: 108611 - DNA, 805 bp, Homo sapiens
  Payload ID: 1337
  Gene Symbol: ASAP3
  Gene Name: ArfGAP with SH3 domain, ankyrin repeat and PH domain 3
  ENST ID: ENST00000475814
  CDS Start-End: 1-363
tatctgctcaaagccggggagagccagatgaagcaaggtcctgacttccttcagagcctcatcaagttcttccacgcccagcacaactttttccaagatggctggaaggctgcccagagcctgttccccttcatcgagaagctggcggcctcagtacatgcactccatcaggcccaggaggacgagctacagaagctgacccagctccgggactccctccgagggacactgcagcttgagagcagagaggaacacctgagccggaagaactcaggatgtggctatagcatccaccagcaccaaggcaacaagcagtttgggacggagaaagtgggctttctatacaagaaaagtgacggataaaccggcccccggtgaagctgaccctgctgacgtgccaagtgaggccaaaccctgaggagaaaaagtgcttcgacctggtgacccacaaccggacgtaccactttcaggcagaggacgagcacgagtgtgaggcgtgggtgtcagtgttgcagaacagcaaggacgaagccctgagcagcgccttcctcggggagcccagcgctggcccggggtcctgggggtccgccggccatgatggggagccgcacgacctcacaaagctgctcatcgcggaggtgaagagcaggcctgggaatagccagtgctgcgactgcggggctgcagaccccacgtggctcagcaccaacctgggcgtgctcacctgcatccagtgctcgggcgtccaccgcgaactgggcgtgcgcttttcgcgcatgcagtcactcaccttggacctgctggg

SEQ ID NO: 108612 - DNA, 589 bp, Homo sapiens
  Payload ID: 1337
  Gene Symbol: ASAP3
  Gene Name: ArfGAP with SH3 domain, ankyrin repeat and PH domain 3
  ENST ID: ENST00000608765
  CDS Start-End: 117-589
gaggaggatttggaagacccagagcgggatgaaacgggacagagccctgaaggggcagggatgggggaaggcggaggagtttctactgaggccagggctccacgctcgcgcccgccatgccggagcagttcagcgtcgccgagttcctggccgtcaccgcggaggacctcagctccccggctggggccgccgccttcgccgccaagatgccccggtaccgaggggcggcgctggcgcgggaggagatcttggaaggagaccaagccatcctgcagagaataaagaaggctgtgcgggcaatccatagctccggccttggccatgtggagaatgaagagcagtaccgagaggccgtggaatccttaggcaacagccacctgtcccagaacagccatgagctgtccacaggcttcctaaacttggccgtgttcacccgcgaggttgctgcgctcttcaagaacctgattcagaacttgaacaacattgtctctttccccctggacagtctgatgaaggggcagctgagggacggtcgacaggattccaaaaaacagctggagaaggcatggaaggactatgaagccaaaat

SEQ ID NO: 108613 - DNA, 2226 bp, Homo sapiens
  Payload ID: 1337
  Gene Symbol: ASAP3
  Gene Name: ArfGAP with SH3 domain, ankyrin repeat and PH domain 3
  ENST ID: ENST00000618240
  CDS Start-End: 113-721
aggatttggaagacccagagcgggatgaaacgggacagagccctgaaggggcagggatgggggaaggcggaggagtttctactgaggccagggctccacgctcgcgcccgccatgccggagcagttcagcgtcgccgagttcctggccgtcaccgcggaggacctcagctccccggctggggccgccgccttcgccgccaagatgccccggtaccgaggggcggcgctggcgcgggaggagatcttggaaggagaccaagccatcctgcagagaataaagaaggctgtgcgggcaatccatagctccggccttggccatgtggagaatgaagagcagtaccgagaggccgtggaatccttaggcaacagccacctgtcccagaacagccatgagctgtccacaggcttcctaaacttggccgtgttcacccgcgaggttgctgcgctcttcaagaacctgattcagaacttgaacaacattgtctctttccccctggacagtctgatgaaggggcagctgagggacggtcgacaggattccaaaaaacagctggagaaggcatggaaggactatgaagccaaaatggccaagctggagaaggagcgcgatcgggccagggtgacaggagggatccctgggaacctggggatcccagccaagccccacccaactctgaagagggcctccgagagcccccaggcacctccagacccagcctgacatccgggaccaccccttcggagatgtacctccccgtcagattcagctccgagagcactcgctcctatcggcggggggcgcggagccctgaagatggtccctcagccaggcagcctctgcccagaaggaacgtgccggttggcatcactgaaggagatggctcaaggactgggagtctcccagcaagttctgtgcaacttttgcaagactagctccttgctggcccccacatgccccatgctaggccccaatgttcagagctgggacttgagctcacaaaactggggagctgagacatttgttctcttggatctcactctctctgtcccttgtgcctctgtagctggccttcttcctgccacaggccatgcctctaccaaggacacatggcctttccctgttaggactgatggcggttctttcctatctcattacccgctaggggcctgggagccctgtggctggatctgagtgctcctgagctggcttcagctgcagaactctcagtccctcatcagatcgagactctatttcccccgtcagtctgggggcttcacaagggcaggagagccctccatcactgacttccagatcagggaccctgccaagtagggactgtcttctcagccagccatttattagtctaatattccttcactaaattccaactctatgtctggacctgtgttaggcacttcagataccacacgagtaagacaagggccctgcaggggtggtcctttggtggaaagctggtcttaagggttgggcttgggaataggcagggtcagattccagggcatggctctggactcagctggtttatacctatatgaccattacaattgtctacagatcacatccattctggctggtcaacatgcatgctgtactggctgttaaataaaaatattctgaatgtcactccttttgagggacagcacagccttccctaggcattctcctatattccccagccaaattgtagagtcagatgcacccacatttgcctgtgtccttgatttagcaggaaggaaaggaatagtcagggttgatggatgcccacttctcttctctttctcttggtcaactcaggagccttttagtctgagggaatggagaggcaaagaaagaagggagagtaatagaattgggagggcagagacttaagggttctgcttcccagccctagaaattctatcattgctcagccccaatgagaaagcagatacacctaagccatcatcaaccactaacatctcaacttgccagttgctgggtgctgggccctggcaggaatgggccaagccaagcaggggagactagagagcaccaatggccaacacagctgcctggctggggaggctgtgctgtttcccctggagacctgactggtctgtggttcccacaggaacagggttgtcttttgagcccccagtgtctggtttcattcatctcagacttgttatttcactcatctctaataaaggattggggggtcagtt

SEQ ID NO: 108614 - DNA, 2552 bp, Homo sapiens; identical to SEQ ID NO: 108610
  Payload ID: 1337
  Gene Symbol: ASAP3
  Gene Name: ArfGAP with SH3 domain, ankyrin repeat and PH domain 3
  ENST ID: ENST00000634513
  CDS Start-End: 36-1259

SEQ ID NO: 108615 - DNA, 4050 bp, Homo sapiens; identical to SEQ ID NO: 108605
  Payload ID: 1337
  Gene Symbol: ASAP3
  Gene Name: ArfGAP with SH3 domain, ankyrin repeat and PH domain 3
  ENST ID: ENST00000634561
  CDS Start-End: 46-2757

SEQ ID NO: 108616 - DNA, 2865 bp, Homo sapiens; identical to SEQ ID NO: 108606
  Payload ID: 1337
  Gene Symbol: ASAP3
  Gene Name: ArfGAP with SH3 domain, ankyrin repeat and PH domain 3
  ENST ID: ENST00000635198
  CDS Start-End: 47-2731

SEQ ID NO: 108617 - DNA, 805 bp, Homo sapiens; identical to SEQ ID NO: 108611
  Payload ID: 1337
  Gene Symbol: ASAP3
  Gene Name: ArfGAP with SH3 domain, ankyrin repeat and PH domain 3
  ENST ID: ENST00000634883
  CDS Start-End: 1-363

SEQ ID NO: 108618 - DNA, 589 bp, Homo sapiens; identical to SEQ ID NO: 108612
  Payload ID: 1337
  Gene Symbol: ASAP3
  Gene Name: ArfGAP with SH3 domain, ankyrin repeat and PH domain 3
  ENST ID: ENST00000634548
  CDS Start-End: 117-589

SEQ ID NO: 108619 - DNA, 907 bp, Homo sapiens; identical to SEQ ID NO: 108607
  Payload ID: 1337
  Gene Symbol: ASAP3
  Gene Name: ArfGAP with SH3 domain, ankyrin repeat and PH domain 3
  ENST ID: ENST00000635167
  CDS Start-End: 1-373

SEQ ID NO: 108620 - DNA, 2226 bp, Homo sapiens; identical to SEQ ID NO: 108613
  Payload ID: 1337
  Gene Symbol: ASAP3
  Gene Name: ArfGAP with SH3 domain, ankyrin repeat and PH domain 3
  ENST ID: ENST00000635693
  CDS Start-End: 113-721

SEQ ID NO: 108621 - DNA, 936 bp, Homo sapiens; identical to SEQ ID NO: 108608
  Payload ID: 1337
  Gene Symbol: ASAP3
  Gene Name: ArfGAP with SH3 domain, ankyrin repeat and PH domain 3
  ENST ID: ENST00000635461
  CDS Start-End: 1-612

SEQ ID NO: 108622 - DNA, 3024 bp, Homo sapiens; identical to SEQ ID NO: 108609
  Payload ID: 1337
  Gene Symbol: ASAP3
  Gene Name: ArfGAP with SH3 domain, ankyrin repeat and PH domain 3
  ENST ID: ENST00000634705
  CDS Start-End: 52-186

SEQ ID NO: 108623 - DNA, 14877 bp, Homo sapiens
  Payload ID: 1338
  Gene Symbol: ARFGEF3
  Gene Name: ARFGEF family member 3
  Uniprot ID: Q5TH69
  ENST ID: ENST00000251691
  CDS Start-End: 167-6700
ccgcggcatggagcgggcgtgattcatcagcatccgcgccggggcggcatgggggcgcgcgcggcggccgcctaggcgcccagggccaggcagcggcggcttccccggcccggctcgcccgcgcttctctccctgtgggcggcggcccggcgcctggaaggtcaagatggaagaaatcctgaggaagctgcagaaggaggcgtccgggagcaagtacaaagccatcaaggagagctgcacctgggccctggaaactctaggtggtctggataccattgtcaagatccctccacatgtactgagggagaaatgcctgctgcctctccagttggctttggaatccaagaatgtgaagctggcccaacatgctttggcagggatgcagaagcttctgtcggaagagaggtttgtatccatggaaacagattctgatgagaagcagctgctcaatcagatactgaatgccgtgaaagtgacgccttcgctcaacgaggacctgcaggtggaagtgatgaaggttttactatgcatcacctacacgccaacatttgatctgaatgggagtgccgtgctgaagatcgcggaggtgtgcattgagacgtacataagcagctgtcaccagcgtagcataaacactgctgtgcgggcaactctcagtcaaatgctgagtgacttgactttacagttacgacagaggcaggagaatacgataattgaaaacccagatgtcccacaggatttcgggaatcaagggtcaacagtagagtccctctgtgatgatgttgtctctgtactcaccgtcctgtgtgagaagctgcaagccgccataaatgacagccagcagctgcagcttctctacctggagtgcatcctgtctgtgctcagcagctcctcctcctccatgcacctgcacaggcgcttcacggacctgatctggaaaaacctctgccctgctctcatcgtgatcttggggaatccaattcatgacaaaaccatcacctctgctcacaccagcagcaccagtaccagcctggagtcggactctgcgtctccgggagtgtctgaccacggccgaggatcaggctgctcctgcactgcgccggccctgagcggacctgtggctcggactatctattacatcgcagccgagctggtccggctggtggggtctgtggactccatgaagcccgtgctccagtccctctaccaccgagtgctgctctaccccccaccccagcaccgggtggaagccatcaaaataatgaaagagatacttgggagcccacagcgtctctgtgacttggcaggacccagctccactgaatcagagtccagaaaaagatcaatttcaaaaagaaagtctcatctggatctcctcaaactcatcatggatggcatgaccgaagcatgcatcaagggtggcatcgaagcttgctatgcagccgtgtcctgtgtctgcaccttgctgggtgccctggatgagctcagccaggggaagggcttgagcgaaggtcaggtgcaactgctgcttctgcgccttgaggagctgaaggatggggctgagtggagccgagattccatggagatcaatgaggctgacttccgctggcagcggcgagtgctgtcctcagaacacacgccgtgggagtcagggaacgagaggagccttgacatcagcatcagtgtcaccacagacacaggccagaccactctcgagggagagttgggtcagactacacccgaggaccattcgggaaaccacaagaacagtctcaagtcgccagccatcccagagggtaaggagacgctgagcaaagtattggaaacagaggcggtagaccagccagatgtcgtgcagagaagccacacggtcccttaccctgacataactaacttcctgtcagtagactgcaggacaaggtcctatggatctaggtatagtgagagcaattttagcgttgatgaccaagacctttctaggacagagtttgattcctgtgatcagtactctatggcagcagaaaaggactcgggcaggtccgacgtgtcagacattgggtcggacaactgttcactagccgatgaagagcagacaccccgggactgcctaggccaccggtccctgcgaactgccgccctgtctctaaaactgctgaagaaccaggaggcggatcagcacagcgccaggctgttcatacagtccctggaaggcctcctccctcggctcctgtctctctccaatgtagaggaggtggacaccgctctgcagaactttgcctctactttctgctcaggcatgatgcactctcctggctttgacgggaatagcagcctcagcttccagatgctgatgaacgcagacagcctctacacagctgcacactgcgccctgctcctcaacctgaagctctcccacggtgactactacaggaagcggccgaccctggcgccaggcgtgatgaaggacttcatgaagcaggtgcagaccagcggcgtgctgatggtcttctctcaggcctggattgaggagctctaccatcaggtgctcgacaggaacatgcttggagaggctggctattggggcagcccagaagataacagccttcccctcatcacaatgctgaccgatattgacggcttagagagcagtgccattggtggccagctgatggcctcggctgctacagagtctcctttcgcccagagcaggagaattgatgactccacagtggcaggcgtggcatttgctcgctatattctggtgggctgctggaagaacttgatcgatactttatcaaccccactgactggtcgaatggcggggagctccaaagggctggccttcattctgggagctgaaggcatcaaagagcagaaccagaaggagcgggacgccatctgcatgagcctcgacgggctgcggaaagccgcacggctgagctgcgctctaggcgttgctgctaactgcgcctcagcccttgcccagatggcagctgcctcctgtgtccaagaagaaaaagaagagagggaggcccaagaacccagtgatgccatcacacaagtgaaactaaaagtggagcagaaactggagcagattgggaaggtgcagggggtgtggctgcacactgcccacgtcttgtgcatggaggccatcctcagcgtaggcctggagatgggaagccacaacccggactgctggccacacgtgttcagggtgtgtgaatacgtgggcaccctggagcacaaccacttcagcgatggtgcctcgcagccccctctgaccatcagccagccccagaaggccactggaagcgctggcctccttggggaccccgagtgtgagggctcgccccccgagcacagcccggagcaggggcgctccctgagcacggcccctgtcgtccagcccctgtccatccaggacctcgtccgggaaggcagccggggtcgggcctccgacttccgcggcgggagcctcatgagcgggagcagcgcggccaaggtggtgctcaccctctccacgcaagccgacaggctctttgaagatgctacggataagttgaacctcatggccttgggaggttttctttaccagctgaagaaagcatcgcagtctcagcttttccattctgttacagatacagttgattactctctggcaatgccaggagaagttaaatccactcaagaccgaaaaagcgccctccacctgttccgcctggggaatgccatgctgaggattgtgcggagcaaagcacggcccctgctccacgtgatgcgctgctggagccttgtggccccacacctggtggaggctgcttgccataaggaaagacatgtgtctcagaaggctgtttccttcatccatgacatactgacagaagtcctcactgactggaatgagccacctcattttcacttcaatgaagcactcttccgacctttcgagcgcattatgcagctggaattgtgtgatgaggacgtccaagaccaggttgtcacatccattggtgagctggttgaagtgtgttccacgcagatccagtcgggatggagacccttgttcagtgccctggaaacagtgcatggcgggaacaagtcagagatgaaggagtacctggttggtgactactccatgggaaaaggccaagctccagtgtttgatgtatttgaagcttttctcaatactgacaacatccaggtctttgctaatgcagccactagctacatcatgtgccttatgaagtttgtcaaaggactgggggaggtggactgtaaagagattggagactgtgccccagcacccggagccccgtccacagacctgtgcctcccggccctggattacctcaggcgctgctctcagttattggccaaaatctacaaaatgcccttgaagccaatattccttagtgggagacttgccggcttgcctcgaagacttcaggaacagtcagccagcagtgaggatggaattgaatcagtcctgtctgattttgatgatgacaccggtctgatagaagtctggataatcctgctggagcagctgacagcggctgtgtccaattgtccacggcagcaccaaccaccaactctggatttactctttgagctgttgagagatgtgacgaaaacaccaggaccagggtttggtatctatgcagtggttcacctcctccttcctgtgatgtccgtttggctccgccggagccataaagaccattcctactgggatatggcctctgccaatttcaagcacgctattggtctgtcctgtgagctggtggtggagcacattcaaagctttctacattcagatatcaggtacgagagcatgatcaataccatgctgaaggacctctttgagttgctggtcgcctgtgtggccaagcccactgaaaccatctccagagtgggctgctcctgtattagatacgtccttgtgacagcgggccctgtgttcactgaggagatgtggaggcttgcctgctgtgccctgcaagatgcgttctctgccacactcaagccagtgaaggacctgctgggctgcttccacagcggcacggagagcttcagcggggaaggctgccaggtgcgagtggcggccccgtcctcctccccaagtgccgaggccgagtactggcgcatccgagccatggcccagcaggtgtttatgctggacacccagtgctcaccaaagacaccaaacaactttgaccacgctcagtcctgccagctcattattgagctgcctcctgatgaaaaaccaaatggacacaccaagaaaagcgtgtctttcagggaaattgtggtgagcctgctgtctcatcaggtgttactccagaacttatatgacatcttgttagaagagtttgtcaaaggcccctctcctggagaggaaaagacgatacaagtgccagaagccaagctggctggcttcctcagatacatctctatgcagaacttggcagtcatattcgacctgctgctggactcttataggactgccagggagtttgacaccagccccgggctgaagtgcctgctgaagaaagtgtctggcatcgggggcgccgccaacctctaccgccagtctgcgatgagctttaacatttatttccacgccctggtgtgtgctgttctcaccaatcaagaaaccatcacggccgagcaagtgaagaaggtcctttttgaggacgacgagagaagcacggattcttcccagcagtgttcatctgaggatgaagacatctttgaggaaaccgcccaggtcagccccccgagaggcaaggagaagagacagtggcgggcacggatgcccttgctcagcgtccagcctgtcagcaacgcagattgggtgtggctggtcaagaggctgcacaagctgtgcatggaactgtgcaacaactacatccagatgcacttggacctggagaactgtatggaggagcctcccatcttcaagggcgacccgttcttcatcctgccctccttccagtccgagtcatccaccccatccaccgggggcttctctgggaaagaaaccccttccgaggatgacagaagccagtcccgggagcacatgggcgagtccctgagcctgaaggccggtggtggggacctgctgctgccccccagccccaaagtggagaagaaggatcccagccggaagaaggagtggtgggagaatgcggggaacaaaatctacaccatggcagccgacaagaccatttcaaagttgatgaccgaatacaaaaagaggaaacagcagcacaacctgtccgcgttccccaaagaggtcaaagtggagaagaaaggagagccactgggtcccaggggccaggactccccgctgcttcagcgtccccagcacttgatggaccaagggcaaatgcggcattccttcagcgcaggccccgagctgctgcgacaggacaagaggccccgctcaggctccaccgggagctccctcagtgtctcggtgagagacgcagaagcacagatccaggcatggaccaacatggtgctaacagttctcaatcagattcagattctcccagaccagaccttcacggccctccagcccgcagtgttcccgtgcatcagtcagctgacctgtcacgtgaccgacatcagagttcgccaggctgtgagggagtggctgggcagggtgggccgtgtctatgacatcattgtgtagccgactcctgttctactctcccaccaaataacagtagtgagggttagagtcctgccaatacagctgttgcattttccccaccactagccccacttaaactactactactgtctcagagaacagtgtttcctaatgtaaaaagcctttccaaccactgatcagcattggggccatactaaggtttgtatctagatgacacaaacgatattctgattttgcacattattatagaagaatctataatccttgatatgtttctaactcttgaagtatatttcccagtgcttttgcttacagtgttgtccccaaatgggtcattttcaaggattactcatttgaaaacactatattgatccatttgatccatcatttaaaaaataaatacaattcctaaggcaatatctgctggtaagtcaagctgataaacactcagacatctagtaccagggattattaattggaggaagatttatggttatgggtctggctgggaagaagacaactataaatacatattcttgggtgtcataatcaagaaagaggtgacttctgttgtaaaataatccagaacacttcaaaattattcctaaatcattaagattttcaggtattcaccaatttccccatgtaaggtactgtgttgtacctttatttctgtatttctaaaagaagaaagttctttcctagcagggtttgaagtctgtggcttatcagcctgtgacacagagtacccagtgaaagtggctggtacgtagattgtcaagagacataagaccgaccagccaccctggctgttcttgtggtgtttgtttccatccccaaggcaaacaaggaaaggaaaggaaagaagaaaaggtgccttagtcctttgttgcacttccatttccatgccccacaattgtctgaacataaggtatagcatttggtttttaagaaaacaaaacattaagacgcaactcattttatatcaacacgcttggaggaaagggactcagggaagggagcagggagtgtggggtggggatggattatgatgaaatcattttcaatcttaaaatataatacaacaatcttgcaaaattatggtgtcagttacacaagctctagtctcaaaatgaaagtaatggagaaagacactgaaatttagaaaattttgtcgatttaaaatatttctcctatctaccaagtaaagttaccctatgtttgatgtctttgcattcagaccaatatttcaggtggatatttctaagtattactagaaaatacgtttgaaagctttatcttattatttacagtatttttatatttcttacattatcctaatgattgaaaactcctcaatcaagcttacttacacacattctacagagttatttaaggcatacattataatctcccagccccattcataatgaataagtcaccctttaaatataagacacaaattctacagtattgaaataaggatttaaaggggtatttgtaaactttgccctccttgagaaatatggaactaccttagaggttaagaggaaggcagtgttctgacttctttaggtgatctgaaaaaaacacccttatcatccagtgtaccatctagagatcaccacagaatccatttttttcccagttccacaaaacactctgtttgccttcagtttttactcactagacaataattcaagtttagaaacaggtaatcagctatttgatcttaaaaggcaatgaattgttgggatatcagtgaactatgttgtatacttttgaatttttacattttataaatggaattgaaagttggataactgctttttttaaattttccaacagaagtaacaccacagttgctttgtttctttttatagcttacctgaggttcagttcttctttgtgaacctgtgagtactccacagtttactgggggaaaaggcttcagtaaagcagaggctagaattacagtatttatacatagcaacttttcataaagtagaaaaattcaaaggaagctgtctcaatttgagaataccagctgggcacggtggctcacgcctgtaatcccagcacttactttgggaggccaaggtgggcagataacctgcggtcaggagtttgagaccaggctggacaacatggtgaaacctcgtctctactaaaaatacaaaaattagccaggtgtggtaggatgcacctgtaatcccagctacttaggaggccgagacaggagaatcgctcgaacccaggaggcggacgttgcagtgagccaagattgcaccattgcactccagactgggtgacaagagtgaaactccatctaaaaaaaaaaaaaaaaaaaagtgaatactgtatcccaaagtatgttagttgtttgtttggaaatcagcattctccccgatgctctattatgggatccaaaattcttgaacataagtttaccctgtactgtgtccaaacactgttctagttctagcctgattatgggtcccaagaataaaaggatgagtaggtgtacagagctcttgacctacaattttttaagagtgttttggtaccttcccattgtcttctctataactcagtcctaacatactctgcactcgagttaccagccatccacactgacatcagatttcaaccagaaccatcactgagtgacagcagtacttctcagaggtatttgcagcttgatgcaaagtagtctctaatgagtaggcattcaggtggttcttcccagcaggtggagaagaaagggaggagatgaagaacactgagaggggagtggcaccttcccaggctgcccagctcagtctcttgccctgttcctgtgactcagctgcccactcccccaactttgtttccctccctcccagtctctgaaagtgtcaggtgtttctctcctcacagtctcttttgcagcaacagtaagacaaaattcaaggcagccttttaaagttacgaacagttattagcatgtatttacagacctaagcagaatgagagtttatacattgtttttagttgcctgtatttatagccaaaagtatattaccttaaagttgagatctttctcttcttttcctaaattttggtaaagtgtgcttcatgaaacaaacatctggaaaactccaagtataagagaccctggactgatgatggcccagccaagtatatggagggacagagttctctctgtcattaatgaggacatcggttttcacaattgaacctcatgcactgtccacagcatctcacctagctcctgtatctcctgatctgcttttaaaaatagttagttaggctgcctttttacaccaccttctctctctccccttgtggtaattttccagccttccccatagatataaaactagaacacctttatgatttggggtctatgtaatgactgaccgataagaacccaggcagatgctaacatacttaacagctcgcattaaaatactttaaatcaggcgtgatggctcattcctgtaatctcaagcactttgggaggctaaggtgggtggatctcttgaggtcaggagttcgagaccaacctggccaacgtggtgaaaccccgtctctactaaaaatacaaaattagccgggcatggtggcagctgcctgtaatcccagctactcgggaagctgaggcaggagaattgcttgaacctgggaggtggggattgcagtcagccaagattgttctgcagcatgggtgacaaagtgagacttcgtctcaagtaaataaaactaaaatttttaaatcaaacatgacaaaaatgttaatataattcagaagtaccttgaaattgaaacatatttgtgcaatgatcattaggctttttgtccttgttgttttaaaatgaggcttatacagagtgagttgagagtcaagtagccttcgctgtgagacggtaatgcagttatataatagatacccttgactttgccagattcatcacaatactgcttatacaggaaagttttctcagaaaggaaaatccattagtatcagtcccatcaagccaaacagaatgaagacctttgatagtaatagcaagaggttacaaatagcagggaggaggcgagtagtgaatgtcactgtgattgcaaacccttacctgtattatcacacgtagtcctcacaacaaccttgtgagacaagtgttgtgttcctcattttttcagaggggaacacagacccagagaggttaagaaatttgcccaagataacaagtaaaaggcaaagttggttgcaaaagaggtgtttctgaattcaagggccatactctctctctgacaacatgctctaagtccatagagtaagcactctagtatgaaaaaaagtttcaaggaacgaggccatgaaaatgagactatttgacatctcagatctgtctgggatgttatggaggtttttaaaaataaagttgaaaaaagaaaatgaatcatgtttatacataaaaaaatcacatgtaacacatttcaagtgtttgaaaataaaaccaaaatctaaactttagtcttcaagcagacattcagtgttactttagaaaactcactgaattaggtggaaatgatggaataatactattcatggccagctattaacacagaagaacatggcagtgtgtgtctggaacggcatgcacaatttgtaaacctttttcaaatatcatttaatcaactcagaataaagtgccctgtagccaacagtgcctctttacttgcttctctgggaaatacatggtactaaattagtagcacaaagtttgggaatatgcaaaataatggataaccatttttcaaaatgtacattctctgaagaggaagcagctggttggacaggatttcttgaagagccaggtgctaagggcatcaggtcgacatccatagtaaccatgtgccataacatctacacatttccacttgttttacagacaaggtaacaggcagaaggaaaatccagagtcttgcagtaagcagatgacaaaacttcaatatgcttgggcaccacttaggtgaccccagggagatttagtgtggccttaggaaagcaaaagagcactttttattggaaatatgagcttgtcactgggaaagatttgtaaaattgatcaagaacttgatttataattatgcctcaaaaaaaaaagttctcatttagtagtggagcaatctagaaaacataccttttttgtttgtttggaagatcctctttccctggctgtattgtagtgtttgctatttgatgtggaaataactaataacttaagattttggaacagaacaccctttagatttccaaaacacaattcttatttcagggaagacagaccaaaaatatctcctgagatcattggtttctttataaattgtggtaccactccatcattgaagagaaaccactaccacaccactagcaccatacagaaccttttctctgtatctttgtacaatactacaaaggggtaccagggaggagagagtggctgaccactttagtgacaaaacagcactccactgctggtgaatcccatctaattatggtccttccacccttttcaaccaccaacaactgttcgtactgttaattcctatcctgaaggtttaaccagtggttgtctagtatcttctgtctttagaacagtggttctcaaactttagtacacatcagcatcacctggagggcctttttttaaaataagacacagattgctgggctcatggtcagagttcccagttaagtaaatcaggaaatttgtatttctaacaagtttataggtgaggccaatactgctgttttgggaactatgctttgagaaccactgccttgaaaaaatttccaacttctacctttaagatcagcctgacttatcaaacgctagagaaaaactgaatctacccttgggcagatgacttgggattggattctatacagcagtcttgctcaatcttcccagtttccagttttattataccaacaattggtttttacaagctagaagacaatgaatgtataagttctatggaacagtgagataaatctaagcttcttgtctttgtatttagaaacattgattctatggatgatcatttgtatcatgttgaccctttgacttgtactgaaggtgattttaaatttaagtatgtagtgtttgaatttcttccatccatgtcgttttaatgagatgtttccatgtcagctcctttacagccttggctcctggcttacagatttttgaatagttgtttgcttgccagttgttttacatctttcattggccaccaaaatattagccatttgagatgagatgagactacttgttgtaccttcatctttcatttaattttctggcgtaaattaacattttaatttcatatatatctgtaaagagtctacccaaaggcttcacggaaatttgcaaaatgaactaattcccttttaagcagcaggtgtgcctgtttttgacttttcagtaaatatgttgtttgtgcacatatctacatggtggagaccatattcattatttcatcttccaaataatgggaaaaatataaaagtgaatcagtgtgctttgggaattcagtgaaatcatgttaactcatatagagggggccttagtttatctcttctttactgaattaattagttttggaaattcttttaccattaaaaaaaattaaggaccatacagagaatgatttaagaaaaaacaagtcacttaaaaatcatcacctatttataaactgtattaattacacataatgcttattgattcaatgaggtttctctaaagacttctgcttaataaatatgctgacttcatttaaattagtttagactattgtaggaatggaaggaaatgattatatttactagaattagtgagatcagaaagcatatcagaatgttgatgatatcaaggagacaatctacagagtttttgcctctgtggatggaaataagggtgtttttttttggttttttttttactttagtttcccataatttttggaaattatgtgtgcatttagttcttttagtaacactgattttaaaattaaatttcaaaagtcaatctctaagagtaatttatttttgttttaccaaccagtgccaaaaaggagaggagggaatccaaaagccaatcttttgaaccaatgtgtaaaagattatgttttttcttaaagttagggaggctcgggccctgacactgccagccccagtgagcatccctggctacctcgggattatgtgcaagctgctttgtcctacatttctttcatctggttcttattgggagtgcttctctctaataaaaattgatttcccacaaaataggcaaagctgaacaaagatgaatgcttttgataagttgggtttcacttcagttgaaacaatgtgatagaatatccaggtgtggcatgatggggcaggaggaggtgcctagagggaaaagttatttttgtttcttagtgttgtgttgtggggatgggacagataagaataagatgtttattgccctaatcatgctaagagactattattcaatatgcttttcccgcttttctaagaggaataaacttagacaaattacattataaacagttcccctactactatctcccactctagataaagccagtgggtggtatgggtccttttattccttatagtattatgccaaagaatcaacttattttcattgaagattataaataaatgaagcttgttatagccataatgatttgagtcagtataccattttacctataaaatgcaaaattcatccttgcaaccccattcaccaggagccttgaagcattttgtttactccaaaggccttgtcaaggaagcataattttttgttttgccttcttatttagtcagtttggtcatatttacttaaaaaaacaaactgaaaatcacactcctttatatgttgatataactgattttatagaatctgtctgttctttgtttaacaggtctctgtaagcaagcttgcaagtgtattttgtgtacattttatctgaggtggaaatgaaaattctaaagagaaaatattttaaaagatattgtatttatgttgcttgtgttgtagaataaagattcaaatgcattaaaaatctggtacatgaaacaattgtgtttactgaataaatatatataaata

SEQ ID NO: 108624 - DNA, 1468 bp, Homo sapiens
  Payload ID: 1339
  Gene Symbol: ARG1
  Gene Name: arginase 1
  Uniprot ID: P05089
  ENST ID: ENST00000356962
  CDS Start-End: 59-1051
tgtcactgagggttgactgactggagagctcaagtgcagcaaagagaagtgtcagagcatgagcgccaagtccagaaccatagggattattggagctcctttctcaaagggacagccacgaggaggggtggaagaaggccctacagtattgagaaaggctggtctgcttgagaaacttaaagaacaagtaactcaaaactttttaattttagagtgtgatgtgaaggattatggggacctgccctttgctgacatccctaatgacagtccctttcaaattgtgaagaatccaaggtctgtgggaaaagcaagcgagcagctggctggcaaggtggcagaagtcaagaagaacggaagaatcagcctggtgctgggcggagaccacagtttggcaattggaagcatctctggccatgccagggtccaccctgatcttggagtcatctgggtggatgctcacactgatatcaacactccactgacaaccacaagtggaaacttgcatggacaacctgtatctttcctcctgaaggaactaaaaggaaagattcccgatgtgccaggattctcctgggtgactccctgtatatctgccaaggatattgtgtatattggcttgagagacgtggaccctggggaacactacattttgaaaactctaggcattaaatacttttcaatgactgaagtggacagactaggaattggcaaggtgatggaagaaacactcagctatctactaggaagaaagaaaaggccaattcatctaagttttgatgttgacggactggacccatctttcacaccagctactggcacaccagtcgtgggaggtctgacatacagagaaggtctctacatcacagaagaaatctacaaaacagggctactctcaggattagatataatggaagtgaacccatccctggggaagacaccagaagaagtaactcgaacagtgaacacagcagttgcaataaccttggcttgtttcggacttgctcgggagggtaatcacaagcctattgactaccttaacccacctaagtaaatgtggaaacatccgatataaatctcatagttaatggcataattagaaagctaatcattttcttaagcatagagttatccttctaaagacttgttctttcagaaaaatgtttttccaattagtataaactctacaaattccctcttggtgtaaaattcaagatgtggaaattctaacttttttgaaatttaaaagcttatattttctaacttggcaaaagacttatccttagaaagagaagtgtacattgatttccaattaaaaatttgctggcattaaaaataagcacacttacataagcccccatacatagagtgggactcttggaatcaggagacaaagctaccacatgtggaaaggtactatgtgtccatgtcattcaaaaaatgtgattttttataataaactctttataac

SEQ ID NO: 108625 - DNA, 1532 bp, Homo sapiens
  Payload ID: 1339
  Gene Symbol: ARG1
  Gene Name: arginase 1
  Uniprot ID: P05089
  ENST ID: ENST00000368087
  CDS Start-End: 140-1108
agtgggtggagccagctgtcctcattagataaaggttgtttattcaacccaagtataaatggaaaaaaaagatgcgccctctgtcactgagggttgactgactggagagctcaagtgcagcaaagagaagtgtcagagcatgagcgccaagtccagaaccatagggattattggagctcctttctcaaagggacagccacgaggaggggtggaagaaggccctacagtattgagaaaggctggtctgcttgagaaacttaaagaacaagagtgtgatgtgaaggattatggggacctgccctttgctgacatccctaatgacagtccctttcaaattgtgaagaatccaaggtctgtgggaaaagcaagcgagcagctggctggcaaggtggcagaagtcaagaagaacggaagaatcagcctggtgctgggcggagaccacagtttggcaattggaagcatctctggccatgccagggtccaccctgatcttggagtcatctgggtggatgctcacactgatatcaacactccactgacaaccacaagtggaaacttgcatggacaacctgtatctttcctcctgaaggaactaaaaggaaagattcccgatgtgccaggattctcctgggtgactccctgtatatctgccaaggatattgtgtatattggcttgagagacgtggaccctggggaacactacattttgaaaactctaggcattaaatacttttcaatgactgaagtggacagactaggaattggcaaggtgatggaagaaacactcagctatctactaggaagaaagaaaaggccaattcatctaagttttgatgttgacggactggacccatctttcacaccagctactggcacaccagtcgtgggaggtctgacatacagagaaggtctctacatcacagaagaaatctacaaaacagggctactctcaggattagatataatggaagtgaacccatccctggggaagacaccagaagaagtaactcgaacagtgaacacagcagttgcaataaccttggcttgtttcggacttgctcgggagggtaatcacaagcctattgactaccttaacccacctaagtaaatgtggaaacatccgatataaatctcatagttaatggcataattagaaagctaatcattttcttaagcatagagttatccttctaaagacttgttctttcagaaaaatgtttttccaattagtataaactctacaaattccctcttggtgtaaaattcaagatgtggaaattctaacttttttgaaatttaaaagcttatattttctaacttggcaaaagacttatccttagaaagagaagtgtacattgatttccaattaaaaatttgctggcattaaaaataagcacacttacataagcccccatacatagagtgggactcttggaatcaggagacaaagctaccacatgtggaaaggtactatgtgtccatgtcattcaaaaaatgtgattttttataataaactctttataacaagatta

SEQ ID NO: 108626 - DNA, 2045 bp, Homo sapiens
  Payload ID: 1340
  Gene Symbol: ARG2
  Gene Name: arginase 2
  Uniprot ID: P78540
  ENST ID: ENST00000261783
  CDS Start-End: 181-1245
gcgaagaaggtgtgccgggggctggttggaggcgcgggcggcggggccaatgtggcggtgacgtcacggggcgggcggacgctggcgcgggtaggtaagagcagcggcgggcggtggcgctcactcccggcttccaaccgcgcggagcctctgccttggagattctcagtgctgcggatcatgtccctaaggggcagcctctcgcgtctcctccagacgcgagtgcattccatcctgaagaaatccgtccactccgtggctgtgataggagccccgttctcacaagggcagaaaagaaaaggagtggagcatggtcccgctgccataagagaagctggcttgatgaaaaggctctccagtttgggctgccacctaaaagactttggagatttgagttttactccagtccccaaagatgatctctacaacaacctgatagtgaatccacgctcagtgggtcttgccaaccaggaactggctgaggtggttagcagagctgtgtcagatggctacagctgtgtcacactgggaggagaccacagcctggcaatcggtaccattagtggccatgcccgacactgcccagacctttgtgttgtctgggttgatgcccatgctgacatcaacacaccccttaccacttcatcaggaaatctccatggacagccagtttcatttctcctcagagaactacaggataaggtaccacaactcccaggattttcctggatcaaaccttgtatctcttctgcaagtattgtgtatattggtctgagagacgtggaccctcctgaacattttattttaaagaactatgatatccagtatttttccatgagagatattgatcgacttggtatccagaaggtcatggaacgaacatttgatctgctgattggcaagagacaaagaccaatccatttgagttttgatattgatgcatttgaccctacactggctccagccacaggaactcctgttgtcgggggactaacctatcgagaaggcatgtatattgctgaggaaatacacaatacagggttgctatcagcactggatcttgttgaagtcaatcctcagttggccacctcagaggaagaggcgaagactacagctaacctggcagtagatgtgattgcttcaagctttggtcagacaagagaaggagggcatattgtctatgaccaacttcctactcccagttcaccagatgaatcagaaaatcaagcacgtgtgagaatttaggagacactgtgcactgacatgtttcacaacaggcattccagaattatgaggcattgaggggatagatgaatactaaatggttgtctgggtcaatactgccttaatgagaacatttacacattctcacaattgtaaagtttcccctctattttggtgaccaatactactgtaaatgtatttggttttttgcagttcacagggtattaatatgctacagtactatgtaaatttaaagaagtcataaacagcatttattaccttggtatatcatactggtcttgttgctgttgttccttcacatttaagtggtttttcatctttcctccctcctcccacagcctggctatacagtgcatccttgaactgtcagcccacagcagcaatatgcttattctatccacatccctaacatcatgcattcacaaggtcaaagttctggtccacaaacccttccctatagaagttcaatggctgcgaaagaatttgtagtaaaccaggcctcccaggatggcgagctccagtaagatgataatggaaagcagcagcttgttggttgtcactctacaaagagaagcaaagtggggagtagtcagaagtttggataaccttccttctaaacattttggggttagacctgggaccacggctggatactctgaggctgtatgtttgatcacacagccacttagcaggaagtactcataaggttctttagctgtcacttagggataacactgtctacctcacagaaatgttaaactgagacaataaaaaccaaagcataaaaatggattctgaaa

SEQ ID NO: 108627 - DNA, 361 bp, Homo sapiens
  Payload ID: 1341
  Gene Symbol: ARGLU1
  Gene Name: arginine and glutamate rich 1
  ENST ID: ENST00000360629
  CDS Start-End: 156-361
gaagcgagaggaggaggagaagaaagcggagttcgagcggcagcgaaaaattcgacagcaagaaatagaagaaaaactcatcgaggaagaaacagcacgaagagtagaagaattggtagcaaaaagggtggaggaagaactggagaaaaggaaggatgaaattgaacgagaagttctccgaagggtggaggaagccaaacgcatcatggaaaagcagttgctcgaagaactcgagcgacagagacaagctgagcttgccgcacaaaaagctagagagaggaagctggcgcgtatggcagccgaggagcacactctgcaggacactggacaagacagaggaagaacgtgcaaaacgtgagga

SEQ ID NO: 108628 - DNA, 821 bp, Homo sapiens
  Payload ID: 1341
  Gene Symbol: ARGLU1
  Gene Name: arginine and glutamate rich 1
  ENST ID: ENST00000375926
  CDS Start-End: 225-653
gactccttagcagcggagcagcccacggcctgcctgtactgcctgttacatgggccctctggtttgatgtcatcagtggaaatagaagcagggaactgacattctgatttggcatttgcttcgacagcaagaaatagaagaaaaactcatcgaggaagaaacagcacgaagagtagaagaattggtagcaaaaagggtggaggaagaactggagaaaaggaaggatgaaattgaacgagaagttctccgaagggtggaggaagccaaacgcatcatggaaaagcagttgctcgaagaactcgagcgacagagacaagctgagcttgccgcacaaaaagctagagagaggaagctggcgcgtatggcagccgaggagcacactctgcaggacactggacaagacagaggaagaacgtgcaaaacgtgaggagctagagcgaatactggaagagaataaccgaaaaattgcagaagcacaagccaaactggccgaagaacagttgagaattgttgaagaacaaagaaagattcatgaggaaaggatgaaactagaacaagaacgacaacgtcaacaaaaagaagaacaaaaaattatcctgggcaaggggaagtccaggccaaaactgtccttctcattaaaaacccaggattaaattgcaaactctgaactttttacaaagaaaaatggaaaaactttgtatggtagcttcatgttgaagtggttttttgtttttgtttttgtttttttaatttgtaaaatctggaaagttagcttgttctaataggggctatgctctgcaattcccttttttttttttttt

SEQ ID NO: 108629 - DNA, 3390 bp, Homo sapiens
  Payload ID: 1341
  Gene Symbol: ARGLU1
  Gene Name: arginine and glutamate rich 1
  Uniprot ID: Q9NWB6
  ENST ID: ENST00000400198
  CDS Start-End: 246-1067
attgtgggaagggcggccggtgcagccgcagctgccatcttaggggcgcctggcgctacgggtttctcgttggaggcggccttcgtggcagctgtagacgccgggaaaaggcataaagtccgttggccgacacctttctttcctccggcctcggtagaaccgccagcccgcgtccgaaggcggaggcgaggggaactggccgcgtgaggggcctgaggcgagcggttagagcgtctcccggaaggatgggccggtctcggagccggagctcgtcccgctccaagcacaccaagagcagcaagcacaacaagaagcgcagccggtcccggtcgcgatcccgggacaaggagcgcgtgcggaagcgttccaaatctcgggaaagtaaacggaaccggcggcgggagtcgcggtcccgttcgcgctccaccaacacggccgtgtcccggcgcgagcgggaccgggagcgcgcctcgtccccgcccgaccgcatcgacatcttcgggcgcacggtgagcaagcgcagcagcctggacgagaagcagaagcgagaggaggaggagaagaaagcggagttcgagcggcagcgaaaaattcgacagcaagaaatagaagaaaaactcatcgaggaagaaacagcacgaagagtagaagaattggtagcaaaaagggtggaggaagaactggagaaaaggaaggatgaaattgaacgagaagttctccgaagggtggaggaagccaaacgcatcatggaaaagcagttgctcgaagaactcgagcgacagagacaagctgagcttgccgcacaaaaagctagagaggaggaagaacgtgcaaaacgtgaggagctagagcgaatactggaagagaataaccgaaaaattgcagaagcacaagccaaactggccgaagaacagttgagaattgttgaagaacaaagaaagattcatgaggaaaggatgaaactagaacaagaacgacaacgtcaacaaaaagaagaacaaaaaattatcctgggcaaggggaagtccaggccaaaactgtccttctcattaaaaacccaggattaaattgcaaactctgaactttttacaaagaaaaatggaaaaactttgtatggtagcttcatgttgaagtggttttttgtttttgtttttgtttttttaatttgtaaaatctggaaagttagcttgttctaataggggctatgctctgcaattccctttttttttttttttttccttccactaagtcaaatccttatcagatcattgttgtattctaaggagtgacgtatttttcacctgtttggattctatattagtggtctgaggaagagcagatcacattgtaaaactatggatggtctgataaggcttttactgaccccactgacttcagagttatactctgtttgctacatcataatgctggttttgctgactttttgtttttttatatatttataaaaaaagaaaaagttggtgattgcattgggaaattcccagggtattactggacctatgtggtgtattgttaaaccagtgtccttgtgatactgttgctcttgatgttcctgatacaggtaaggaaacagttggtcaactctgatacaaagtatatatacagttcagtattgtctctgttcattttgtttttatttcattgacaaaatcaaaccagcattccccattgtgtaaataaatgattttgctgaataaagtaaagtcttaaattcatatgttgaagcaattttttttaatgttatgttaagtcttaaagagggtggttcactttttgatggtcaaccatttagaagtcttagaactatatttcctcttgtttatacttttaacatagggtttatatgtacattaaatatacttgtgaattagtatttaatggctatttttacaaatatcaactttatgctgatagagcaaatggcatcagtgttacctttaagaaagactaacaacatccagaagatttaaattctcaaacctgtgcctctgttttaggatataagtattatcacaaagtatacttaataaaggctagaaaaatgcttttaaattatggaatctgagatcgttttcagagtgggccatcagaaagaacttagctttatactgtcaaaaaaaggctaagatggtcgagtcattttcattgtgtagtgtacttgcacgtttatttttaggacaaacacatttgaactttatgaattttttttttttttttgcatgtgaaatcttatgaatggctttcattttatacactagaatctgcctcatttactcttaacatatgtttaagtatactggtattaaaacattcaagaaaaggatattgatctaaaatgctacctgagatgcataaacatgtcatcaagtagagaaaatatttttatttttgcccaatattttttagacagtttgattattcttaaaaattgaaaacataagctaaagagatgactaaatggtagattattttgtgtgtgcatgctaggaaaaatgctgttgctttagttttgagctcttcaatgagtctaattgtggtaaggaacaatataaaatcagtttaaagatctttaaaggtagaattttaaataggcatgaaatatagtgagaacttttagtaaacatactacttactctaaaatcaaacattttattttcctaaagaatataggttgccaaaaaatattttatctctaaatataggttagctgtaattatttcatgaatttttttttttttcaatgtaactttttttggtgaagattcatggttcctaagttctgtattcaagtttttggaaatgtttatttaaaaactgttctatacaagtgttcaaaacattgtatctaaagagagtagcctggacttaaaatatttgaaatcagcttatgcgtgccttttaattttttttttaagtttcttactgccacatatggtgtgaagtgacagtaagttgcttaatgacatcctgcagtatctgcttgcttttggagactccagtgagatgttgaaattgttcctgtgcttggtaactactttcctctgccaggctatgggaaagaggatgtaattgtgaataatatacaccatccagtctttaatgtgctgcaacaatgtagtaatttgtttttttcatttgttcccactgcctttgtgtacatagaaaacttaaaaatttcccccagtctattagaagttaagatgttccctaatttattaaatatgcctttattcacaatttgtttttttaggttattcttaatgcattatagaattaagtatgactttgtttatttttattacagtatgtagttattgacatattgtggtttgcagaattatcaattgtataaactaaacctttaaatta

SEQ ID NO: 108630 - DNA, 619 bp, Homo sapiens
  Payload ID: 1342
  Gene Symbol: AVP
  Gene Name: arginine vasopressin
  Uniprot ID: P01185
  ENST ID: ENST00000380293
  CDS Start-End: 51-545
acagagccaccaagcagtgctgcatacggggtccacctgtgtgcaccaggatgcctgacaccatgctgcccgcctgcttcctcggcctactggccttctcctccgcgtgctacttccagaactgcccgaggggcggcaagagggccatgtccgacctggagctgagacagtgcctcccctgcggccccgggggcaaaggccgctgcttcgggcccagcatctgctgcgcggacgagctgggctgcttcgtgggcacggctgaggcgctgcgctgccaggaggagaactacctgccgtcgccctgccagtccggccagaaggcgtgcgggagcgggggccgctgcgccgccttcggcgtttgctgcaacgacgagagctgcgtgaccgagcccgagtgccgcgagggctttcaccgccgcgcccgcgccagcgaccggagcaacgccacgcagctggacgggccggccggggccttgctgctgcggctggtgcagctggccggggcgcccgagcccttcgagcccgcccagcccgacgcctactgagccccgcgctcgccccaccggcgcgctcttcgcgcccgcccctgcagcacggacaataaacctccgccaatgca

SEQ ID NO: 108631 - DNA, 5963 bp, Homo sapiens
  Payload ID: 1343
  Gene Symbol: AVPR1A
  Gene Name: arginine vasopressin receptor 1A
  Uniprot ID: P37288
  ENST ID: ENST00000299178
  CDS Start-End: 107-1363
agaccctgcgcttcggacgaggagcccaagtcctccgagacggggagggagcggcccgcgagggctggagctccgaagagggccgagtaggagctgcatggacagcatgcgtctctccgccggtcccgacgcggggccctcgggcaactccagcccatggtggcctctggccaccggcgctggcaacacaagccgggaggccgaagccctcggggagggcaacggcccaccgagggacgtgcgcaacgaggagctggccaaactggagatcgccgtgctggcggtgactttcgcggtggccgtgctgggcaacagcagcgtactgctggctctgcaccggacgccgcgcaagacgtcccgcatgcacctcttcatccgacacctcagcctggccgacctggccgtggcattcttccaggtgctgccgcaaatgtgctgggacatcacctaccgcttccgcggccccgactggctgtgccgcgtggtgaagcacctgcaggtgttcggcatgtttgcgtcggcctacatgctggtagtcatgacagccgaccgctacatcgcggtgtgccacccgctcaagactctgcaacagcccgcgcgccgctcgcgcctcatgatcgcggccgcctgggtgctgagcttcgtgctgagcacgccgcagtacttcgtcttctccatgatcgaggtgaacaatgtcaccaaggcccgcgactgctgggccaccttcatccagccctggggttctcgtgcctacgtgacctggatgacgggcggcatctttgtggcgcccgtggtcatcttgggtacctgctacggcttcatctgctacaacatctggtgcaacgtccgcgggaagacggcgtcgcgccagagcaagggtgcagagcaagcgggtgtggccttccaaaaggggttcctgctcgcaccctgtgtcagcagcgtgaagtccatttcccgggccaagatccgcacggtgaagatgacttttgtgatcgtgacggcttacatcgtctgctgggcgcctttcttcatcatccagatgtggtctgtctgggatcccatgtccgtctggaccgaatcggaaaaccctaccatcaccatcactgcattactgggttccttgaatagctgctgtaatccctggatatacatgttttttagtggccatctccttcaagactgtgttcaaagcttcccatgctgccaaaacatgaaggaaaaattcaacaaagaagatactgacagtatgagcagaagacagactttttattctaacaatcgaagcccaacaaacagtacgggtatgtggaaggactcgcctaaatcttccaagtccatcaaattcattcctgtttcaacttgagccttgcattcatgcaacttgattcttgtgattgactttttggctcattagctgaattgagctagaaatcacaagaacaaatacactttattaatataaccataaatcaattcattgtgtatgagactgtgtttctagttgcattttcatattgctaccaaaaactagacattattttgtatggaatattaatggaaacatgctgtactaaaatatgcaggtctgattcccagaaatacaacagaagttatatttttaaaggaaaaatcataaccaccctagctttatattttgttgttagtttcttttattttcatttctaacataagtaagacttgattggtttaaaagtcacataaaatgcggcactatttctgaacaaagagagctcatcatcagtcttaatattcagagaaaacttcagagaaattatgttttcatccattaaaattaatttgtgcatcagaaaatgcagccttaaacagtgtccaggagatgggatggtacctcctaggagtacaagtgcctggggtgtaatgagctcctgctcattgtggccagtttagagttctattagaagctatcaatcaccttgcatttcaaaatggtaactttacaactggcagtggcctccttttggttcctcacatattattggtcaagaaaagcatgaaaactgagatgctgaaggtgagaggaaatgttgactggccaaaaatatcttttttcccccactgcgaggttgttttaaagtcagatttgtataaggaaagccaaattttattaaaagagtagaaaaggattgcttaaggtactctggactttctcttggacattgtaaacgtattttgatcagtgttacaagggtatcctgtgctatgctggacattaacaagatcattatcttcatgtttggggaattcagattcataatatgagtatcctaaagagtgactcaggatataaagtgtcccaacatgtttaattaaaaatagctttgtctttccaatctctcactcatctaacaattgcaaagcagagatgagacagggttgggacatgggtgacagatggaaagagaactgctctgtgcccagactggcttccttcattattaaatccacaactttaggcaagtttcttaaacacatataaagcctctgtttccttgacttaccgtggggttgataacacttacctcacagggttgttgtaaggactaaatgaaatcaaatatgttaaaagagcttcagaaatagtaaagtactatacacatgctagcagttgcttttattatagccttgggatctccaaaattgcacagatgttttccagtttatttttcattaactagaattggttcatttcatggctgggatataaaatcctaaaatttaaatatagatcgctgattcattggacaacatttccagtgactgctcagcttgacttctcctgcctgactaaagttttccaatttaaagacagaacttgcttttctttgaatgcaggtagatcaaagccacccacaagcatcaattttttccatttttaaacggagaccaattacactactttgctgttattacatttttcattaatggaactcagtgatttttttcctagctattttgtctggctgcttcttcttcttagagatcatgcaatgatttgaggatacatcataaatattttgcatccttaagaggaagtaatagttgctttttttttttttgaaacagagtcttgctcttttgccaggctggagtgcagtggcgtgatctcggctcactgcaacctccgcttcctgggttcaagcgattctcctgcctcagcctcccgagtagctgggactatatgcatgtgccaccacacccagctaatttttatatttttagtagagatggggtttcaccatgttggccagcatggttttaatagtattattgagtttctttttttacctttgtagataagaaaatgagaactggatagcactgtgagaacccggaagcgataacttcactcctcttcattcttctgccttttgaaattctcagcccttaggctccttgtattgataggcctaaaaacatgtttccaaatgctttatagagattataaacctagggactccctaggttttcaaattcttctttctaaaaataacaaatatgtctcttaaagggtactgtccaatataagccataactaaattaattaattcattatttgagttagagtagcatctcagtaacccagcactcgaagactgtcagtccttttaacaactctttgatagttcaaaaactaaagctttttggtttggaactaagatgaacccatttttttctaaatccatttccaaagtaagaacctcagaacctatagatcttgcttcaaaatgttgatatgtacccccaagcaaaacaattcaatttgaatgttatttctgagaacagctcacaaaaaaaagtgcatatcaccctacccagttgtattttctccttttaaatgtattgggagatgagacagtagaaaatgggctggggaaacatgagatctgggtgctagttctgcactaggcaaatacatggtcttattctctgcggtttaggctgagaagtttcatctgtctggttgctaaattttctcaatgttatgtacccagaaatggacgccacatatctcaaaacaatatttcagattggaaggaatctacctgcctgtctgtttcagaagaagagaaactgaaaaagtattccgggaagggaagttttccttttcttgactaaagagaagacctgagatattatgccaaataacagcttacagtcaagaaaaaaatgtgttgcagcaccttattttatttttcacagttaacagtgggaagatcctgcaagtacacaattttaatgcctctatatgggtattaggaatgtgatatataaaaaatgtccagtagggagaaactaatcagttgggcatttgatgaatattaactgatgatggtaaataaacaatttagagtgcattattaagtgcttaatgggttaattttggagcatgtattctaaagtgtaaaactacttggcttttattttgaaatttcatttggaacacaattgtgaaggaaatcagtgaaattcttgggttaattatatacttgttttacatatagaatttctatcatcatcaaacaagtcttatgccatgatttcgggaagggtatggttttagagaaaaaaatactaagcagtcttaatgatacacaggaccctgccaagcttattacagtttctagaatggacaactactaatgattaagaaacaactttcatctgttattacacaagaaacccgattaggttaaagtttgatgttttcagactctaaagcctatgtttttgtaacttaattggactttcagagtgttaaattatggcttcagagtttggctctacctaaaatttagttagatgccaaccagggagaaattaaacctaatccttcaccccaaatatcagaggttagacaaacccatgttaattggagccttatggttattcatattggaggcaatagctttatttagaggaagcccaggacagggccgtctgggatgctagttctggaaatgcagaagcagccactgtatccctgcccaccccctccatccagcccttttggtactactcagtattgttgacaacatttggaatcataagtaacataggacagtaagtattagagaatgattctccgttagaattggacctcagccgatttgagccaaaatttaggaactattcagaagacagtttctttcttttgagtgcttaagacagtgtaaatggttcgaatcacacacattttaagattccattgtatacataagcattttaagaatattgttttaacataattattaggcatactaagttatcatgaatgaaaatgtacatgtgacctgtagtatgttatatattattatggctaaatgttaaatgccatttttttgctttttagttttatgtatttttgtatgtatatacccacatttttacattgatttatgttctaaataataattaaaacaaagtattataaaatgaatgaaatatttttgtgttccatggtcaaattattaataaattcaggaaagaaaatctgatgataaatctgatataaataccagaataattattattaatataaaataatattttcacatatgaaggtatgtcttcatactacaggatttctgacttgaatatattctataatgctttaattcattaccataacaaatgtactaagaattaatgttgcatctttagtattccattttttggaactgtttttcaaatgttctatatcctctagcttattatgctatctaaaataatttcagtgtgttttttcctggggcaactgaatgattcttgttttgaatgagtgataaaatgttttgtgatagtatctaatatttggtcctttacagaaaaaatggcttgtggtactatattgaaaaaactattgtatttcctcaattttactgtgtgttgtcttgtttctataaacaaaaataagttttgga

SEQ ID NO: 108632 - DNA, 691 bp, Homo sapiens
  Payload ID: 1343
  Gene Symbol: AVPR1A
  Gene Name: arginine vasopressin receptor 1A
  ENST ID: ENST00000550940
  CDS Start-End: 1-561
atgacgggcggcatctttgtggcgcccgtggtcatcttgggtacctgctacggcttcatctgctacaacatctggtgcaacgtccgcgggaagacggcgtcgcgccagagcaagggtgcagagcaagcgggtgtggccttccaaaaggggttcctgctcgcaccctgtgtcagcagcgtgaagtccatttcccgggccaagatccgcacggtgaagatgacttttgtgatcgtgacggcttacatcgtctgctgggcgcctttcttcatcatccagatgtggtctgtctgggatcccatgtccgtctggaccgaatcggaaaaccctaccatcaccatcactgcattactgggttccttgaatagctgctgtaatccctggatatacatgttttttagtggccatctccttcaagactgtgttcaaagcttcccatgctgccaaaacatgaaggaaaaattcaacaaagaagatactgacagtatgagcagaagacagactttttattctaacaatcgaagcccaacaaacagtacggataagaaaatgagaactggatagcactgtgagaacccggaagcgataacttcactcctcttcattcttctgccttttgaaattctcagcccttaggctccttgtattgataggcctaaaaacatgtttccaaatgctttatagagattataaa

SEQ ID NO: 108633 - DNA, 2237 bp, Homo sapiens
  Payload ID: 1344
  Gene Symbol: AVPR1B
  Gene Name: arginine vasopressin receptor 1B
  Uniprot ID: P47901
  ENST ID: ENST00000367126
  CDS Start-End: 466-1740
ggcttggctggggcttcctgccctgagcgcgacaccgactgccccggaccgcgcctccaagcaggctgaagggcttccgctcttggcttccagaaaagtttggagaaagagaatttgaggcggattggagggtggtagcccctccccagccttctttccctcccagaagcctcactctgcacagcgtcccccattcttcccgtcctgattccccatcttcctgacccctccttctccctctcctgggtcgatcccagtcacattttctccttccgaatctcatcctccctcctcctctctatcccagtcctctgaacgatttccgcctatttgcaagccttctccctgtcattctcaacgcttctcctttctctccacctcccctgccactccattttatccatcaaacctctccacttgcatccacaccctcccttcatccttccctcccagcaaaccttgctcatggattctgggcctctgtgggatgccaaccccacccctcggggcaccctctctgcccccaatgccacaacaccctggctgggccgggatgaggagctggccaaggtggagatcggagtcctggccactgtcctggtgctggcgaccgggggcaacctggctgtgctgctgaccctgggccagctgggccgcaagcgctcccgcatgcacctgttcgtgctgcacttagccctgacagacctggccgtggcgctcttccaggtgctgccacagctgctgtgggacatcacctaccgcttccagggccccgacctcctgtgcagggccgtcaagtacctgcaggtgctcagcatgtttgcctccacctacatgctgctggccatgacgctggaccgctacctggctgtctgtcaccccctgcgcagcctccagcagccaggccagtccacctacctgctcatcgctgctccctggctgctggccgccatcttcagcctccctcaagtcttcattttttccctgcgggaggtgatccagggctcaggggtgctggactgctgggcagacttcggcttcccttgggggccacgggcctacctcacctggaccaccctggctatcttcgttctgccggtgaccatgctcacggcctgctacagcctcatctgccatgagatctgtaaaaacctaaaagtcaagacacaggcctggcgggtgggaggagggggctggaggacttgggacaggccctcaccttccaccttagctgccaccactcgggggctgccatctcgggtcagcagcatcaacaccatctcacgggccaagatccgaacagtgaagatgacctttgtcatcgtgctggcctacatcgcttgctgggctcccttcttcagtgtccagatgtggtccgtgtgggacaagaatgcccctgatgaagattccaccaatgtggctttcaccatctctatgcttttgggcaacctcaacagctgctgcaacccctggatctacatgggcttcaacagccacctgttaccgcggcccctgcgtcaccttgcctgctgtgggggtccccagcccaggatgcgccggcggctctccgacggcagcctctcgagccgccacaccacgctgctgacccgctccagctgcccggccaccctcagcctcagcctcagcctaaccctcagtgggaggcccaggcctgaagagtcaccaagggacttggagctggcagatggggaaggcaccgctgagaccatcatcttttaggaaagactcgctggggtctggtactgcccccaggactagtggaggttctctgcccacctcgggcactggaaatgagagctgggagggtaagggttggagttagaggagccctgtctaaagcggagcgaaaaggccagaatgggtcccctaccctggtgtcacagctgcccctagtgtgagggctgcctcataagctcccaatctcagacactggcagtcagggagaatcaaactgcctgtctccctggtcctgccatattcatagggtgtccatgcacacatggtgtcccagatctaggcaggcctaggatggtgctgtctaggggtccacgggtggcaggaattcagaggctggccttgtgccctggctacctgtctccattctaacctgactggcacatctcagcctaaccaggagaggggagaagtgaaaaaccgtgaggaggactctatttggatcctggatttgttgttgttgttgttgttgttagagagaa

SEQ ID NO: 108634 - DNA, 1622 bp, Homo sapiens
  Payload ID: 1345
  Gene Symbol: AVPR2
  Gene Name: arginine vasopressin receptor 2
  Uniprot ID: P30518
  ENST ID: ENST00000337474
  CDS Start-End: 72-1187
cttgctcctcaggcagaggctgagtccgcacatcacctccaggccctcagaacacctgccccagccccaccatgctcatggcgtccaccacttccgctgtgcctgggcatccctctctgcccagcctgcccagcaacagcagccaggagaggccactggacacccgggacccgctgctagcccgggcggagctggcgctgctctccatagtctttgtggctgtggccctgagcaatggcctggtgctggcggccctagctcggcggggccggcggggccactgggcacccatacacgtcttcattggccacttgtgcctggccgacctggccgtggctctgttccaagtgctgccccagctggcctggaaggccaccgaccgcttccgtgggccagatgccctgtgtcgggccgtgaagtatctgcagatggtgggcatgtatgcctcctcctacatgatcctggccatgacgctggaccgccaccgtgccatctgccgtcccatgctggcgtaccgccatggaagtggggctcactggaaccggccggtgctagtggcttgggccttctcgctccttctcagcctgccccagctcttcatcttcgcccagcgcaacgtggaaggtggcagcggggtcactgactgctgggcctgctttgcggagccctggggccgtcgcacctatgtcacctggattgccctgatggtgttcgtggcacctaccctgggtatcgccgcctgccaggtgctcatcttccgggagattcatgccagtctggtgccagggccatcagagaggcctggggggcgccgcaggggacgccggacaggcagccccggtgagggagcccacgtgtcagcagctgtggccaagactgtgaggatgacgctagtgattgtggtcgtctatgtgctgtgctgggcacccttcttcctggtgcagctgtgggccgcgtgggacccggaggcacctctggaaggggcgccctttgtgctactcatgttgctggccagcctcaacagctgcaccaacccctggatctatgcatctttcagcagcagcgtgtcctcagagctgcgaagcttgctctgctgtgcccggggacgcaccccacccagcctgggtccccaagatgagtcctgcaccaccgccagctcctccctggccaaggacacttcatcgtgaggagctgttgggtgtcttgcctctagaggctttgagaagctcagctgccttcctggggctggtcctgggagccactgggagggggacccgtggagaattggccagagcctgtggccccgaggctgggacactgtgtggccctggacaagccacagcccctgcctgggtctccacatccccagctgtatgaggagagcttcaggccccaggactgtgggggcccctcaggtcagctcactgagctgggtgtaggaggggctgcagcagaggcctgaggagtggcaggaaagagggagcaggtgcccccaggtgagacagcggtcccaggggcctgaaaaggaaggaccaggctggggccaggggaccttcctgtctccgcctttctaatccctccctcctcattctctccctaataaaaattggagctcattttcc

SEQ ID NO: 108635 - DNA, 1763 bp, Homo sapiens
  Payload ID: 1345
  Gene Symbol: AVPR2
  Gene Name: arginine vasopressin receptor 2
  Uniprot ID: P30518
  ENST ID: ENST00000358927
  CDS Start-End: 210-1325
ttcacgccaccgcccagctgcccaggagcccagccaggactggccatactgccaccgacacgtgcacacacgccaacaggcatctgccatgctggcatctctataagggctccagtccagagaccctgggccattgaacttgctcctcaggcagaggctgagtccgcacatcacctccaggccctcagaacacctgccccagccccaccatgctcatggcgtccaccacttccgctgtgcctgggcatccctctctgcccagcctgcccagcaacagcagccaggagaggccactggacacccgggacccgctgctagcccgggcggagctggcgctgctctccatagtctttgtggctgtggccctgagcaatggcctggtgctggcggccctagctcggcggggccggcggggccactgggcacccatacacgtcttcattggccacttgtgcctggccgacctggccgtggctctgttccaagtgctgccccagctggcctggaaggccaccgaccgcttccgtgggccagatgccctgtgtcgggccgtgaagtatctgcagatggtgggcatgtatgcctcctcctacatgatcctggccatgacgctggaccgccaccgtgccatctgccgtcccatgctggcgtaccgccatggaagtggggctcactggaaccggccggtgctagtggcttgggccttctcgctccttctcagcctgccccagctcttcatcttcgcccagcgcaacgtggaaggtggcagcggggtcactgactgctgggcctgctttgcggagccctggggccgtcgcacctatgtcacctggattgccctgatggtgttcgtggcacctaccctgggtatcgccgcctgccaggtgctcatcttccgggagattcatgccagtctggtgccagggccatcagagaggcctggggggcgccgcaggggacgccggacaggcagccccggtgagggagcccacgtgtcagcagctgtggccaagactgtgaggatgacgctagtgattgtggtcgtctatgtgctgtgctgggcacccttcttcctggtgcagctgtgggccgcgtgggacccggaggcacctctggaaggggcgccctttgtgctactcatgttgctggccagcctcaacagctgcaccaacccctggatctatgcatctttcagcagcagcgtgtcctcagagctgcgaagcttgctctgctgtgcccggggacgcaccccacccagcctgggtccccaagatgagtcctgcaccaccgccagctcctccctggccaaggacacttcatcgtgaggagctgttgggtgtcttgcctctagaggctttgagaagctcagctgccttcctggggctggtcctgggagccactgggagggggacccgtggagaattggccagagcctgtggccccgaggctgggacactgtgtggccctggacaagccacagcccctgcctgggtctccacatccccagctgtatgaggagagcttcaggccccaggactgtgggggcccctcaggtcagctcactgagctgggtgtaggaggggctgcagcagaggcctgaggagtggcaggaaagagggagcaggtgcccccaggtgagacagcggtcccaggggcctgaaaaggaaggaccaggctggggccaggggaccttcctgtctccgcctttctaatccctccctcctcattctctccctaataaaaattggagctcattttccaca

SEQ ID NO: 108636 - DNA, 1307 bp, Homo sapiens
  Payload ID: 1345
  Gene Symbol: AVPR2
  Gene Name: arginine vasopressin receptor 2
  Uniprot ID: P30518
  ENST ID: ENST00000370049
  CDS Start-End: 33-962
caggccctcagaacacctgccccagccccaccatgctcatggcgtccaccacttccgctgtgcctgggcatccctctctgcccagcctgcccagcaacagcagccaggagaggccactggacacccgggacccgctgctagcccgggcggagctggcgctgctctccatagtctttgtggctgtggccctgagcaatggcctggtgctggcggccctagctcggcggggccggcggggccactgggcacccatacacgtcttcattggccacttgtgcctggccgacctggccgtggctctgttccaagtgctgccccagctggcctggaaggccaccgaccgcttccgtgggccagatgccctgtgtcgggccgtgaagtatctgcagatggtgggcatgtatgcctcctcctacatgatcctggccatgacgctggaccgccaccgtgccatctgccgtcccatgctggcgtaccgccatggaagtggggctcactggaaccggccggtgctagtggcttgggccttctcgctccttctcagcctgccccagctcttcatcttcgcccagcgcaacgtggaaggtggcagcggggtcactgactgctgggcctgctttgcggagccctggggccgtcgcacctatgtcacctggattgccctgatggtgttcgtggcacctaccctgggtatcgccgcctgccaggtgctcatcttccgggagattcatgccagtctggtgccagggccatcagagaggcctggggggcgccgcaggggacgccggacaggcagccccggtgagggagcccacgtgtcagcagctgtggccaagactgtgaggatgacgctagtgattgtggtcgtctatgtgctgtgctgggcacccttcttcctggtgcagctgtgggccgcgtgggacccggaggcacctctggaaggtgggtgtagccgtggctagggctgacggggccacttgggcttggccgcatgcccctgtgccccaccagccatcctgaacccaacctagatcctccacctccacaggggcgccctttgtgctactcatgttgctggccagcctcaacagctgcaccaacccctggatctatgcatctttcagcagcagcgtgtcctcagagctgcgaagcttgctctgctgtgcccggggacgcaccccacccagcctgggtccccaagatgagtcctgcaccaccgccagctcctccctggccaaggacacttcatcgtgaggagctgttgggtgtcttgcctctagaggctttgagaagctcagctgccttcc

SEQ ID NO: 108637 - DNA, 1600 bp, Homo sapiens
  Payload ID: 1345
  Gene Symbol: AVPR2
  Gene Name: arginine vasopressin receptor 2
  ENST ID: ENST00000434679
  CDS Start-End: 535-681
ctgcccagccccatctttcttggcccccgaggggtggctgcccagggcctctctcctggcacagttccatgtagtgcctgcccatgtggctcccagttcctccccggggtcctggctgagcagaatggcactggatcctgatctggcttcttgcatcccagaggagaccgccatgcgggcccttcctccagattcttccctagtttaacaacaggaagcgaggagtccaggggggcagagattgccacgggcctggccacattgctaggggaggtcccaacctgctgctgagatccggcactgcacagcctcgttcaggcagagaaactgataaggagatggttgtctgctcaccccaaaaggactggccatactgccaccgacacgtgcacacacgccaacaggcatctgccatgctggcatctctataagggctccagtccagagaccctgggccattgaacttgctcctcaggcagaggctgagtccgcacatcacctccaggccctcagaacacctgccccagccccaccatgctcatggcgtccaccacttccgcctgccccagctcttcatcttcgcccagcgcaacgtggaaggtggcagcggggtcactgactgctgggcctgctttgcggagccctggggccgtcgcacctatgtcacctggattgccctgatggtgttcgtggcacctaccctgggtatcgccgcctgccaggtgctcatcttccgggagattcatgccagtctggtgccagggccatcagagaggcctggggggcgccgcaggggacgccggacaggcagccccggtgagggagcccacgtgtcagcagctgtggccaagactgtgaggatgacgctagtgattgtggtcgtctatgtgctgtgctgggcacccttcttcctggtgcagctgtgggccgcgtgggacccggaggcacctctggaaggggcgccctttgtgctactcatgttgctggccagcctcaacagctgcaccaacccctggatctatgcatctttcagcagcagcgtgtcctcagagctgcgaagcttgctctgctgtgcccggggacgcaccccacccagcctgggtccccaagatgagtcctgcaccaccgccagctcctccctggccaaggacacttcatcgtgaggagctgttgggtgtcttgcctctagaggctttgagaagctcagctgccttcctggggctggtcctgggagccactgggagggggacccgtggagaattggccagagcctgtggccccgaggctgggacactgtgtggccctggacaagccacagcccctgcctgggtctccacatccccagctgtatgaggagagcttcaggccccaggactgtgggggcccctcaggtcagctcactgagctgggtgtaggaggggctgcagcagaggcctgaggagtggcaggaaagagggagcaggtgcccccaggtgagacagcggtcccaggggcctgaaaaggaaggaccaggctggggccaggggaccttcctgtctccgcctttctaatccctccctcctcattctctccctaataaaaattggagctcattttccac

SEQ ID NO: 108638 - DNA, 1261 bp, Homo sapiens
  Payload ID: 1345
  Gene Symbol: AVPR2
  Gene Name: arginine vasopressin receptor 2
  ENST ID: ENST00000430697
  CDS Start-End: 146-1261
cacacacgccaacaggcatctgccatgctggcatctctataagggctccagtccagagaccctgggccattgaacttgctcctcaggcagaggctgagtccgcacatcacctccaggccctcagaacacctgccccagccccaccatgctcatggcgtccaccacttccgctgtgcctgggcatccctctctgcccagcctgcccagcaacagcagccaggagaggccactggacacccgggacccgctgctagcccgggcggagctggcgctgctctccatagtctttgtggctgtggccctgagcaatggcctggtgctggcggccctagctcggcggggccggcggggccactgggcacccatacacgtcttcattggccacttgtgcctggccgacctggccgtggctctgttccaagtgctgccccagctggcctggaaggccaccgaccgcttccgtgggccagatgccctgtgtcgggccgtgaagtatctgcagatggtgggcatgtatgcctcctcctacatgatcctggccatgacgctggaccgccaccgtgccatctgccgtcccatgctggcgtaccgccatggaagtggggctcactggaaccggccggtgctagtggcttgggccttctcgctccttctcagcctgccccagctcttcatcttcgcccagcgcaacgtggaaggtggcagcggggtcactgactgctgggcctgctttgcggagccctggggccgtcgcacctatgtcacctggattgccctgatggtgttcgtggcacctaccctgggtatcgccgcctgccaggtgctcatcttccgggagattcatgccagtctggtgccagggccatcagagaggcctggggggcgccgcaggggacgccggacaggcagccccggtgagggagcccacgtgtcagcagctgtggccaagactgtgaggatgacgctagggcgccctttgtgctactcatgttgctggccagcctcaacagctgcaccaacccctggatctatgcatctttcagcagcagcgtgtcctcagagctgcgaagcttgctctgctgtgcccggggacgcaccccacccagcctgggtccccaagatgagtcctgcaccaccgccagctcctccctggccaaggacacttcatcgtgaggagctgttgggtgtcttgcctctagaggctttgagaagctcagctgccttcctggggctggtcctgggagccactgggagggggacc

SEQ ID NO: 108639 - DNA, 1457 bp, Homo sapiens
  Payload ID: 1346
  Gene Symbol: AVPI1
  Gene Name: arginine vasopressin-induced 1
  Uniprot ID: Q5T686
  ENST ID: ENST00000370626
  CDS Start-End: 569-1012
tggacacgccccctccctgtctcccaccgatgattggcgcacggaactccgccttgggtttggaaggctcgcctgggagctcatacctggctagggccgaggattggctgttccggggctagggagcgctttctcccgggaaccgcggctgtgacccaagtggcccggaccagtttggggctgcgtgcggcctgcctcaagcaaccaggtacgtaggtcggcggcccagctcggcgctgcggtgggagccggagggcgacagtcagagccggggtgccagcgggacgcgaccgccagatccacttaggaccccgtcgttctgcgaagcggccacgtctgagtcccggggcctcctcgtgctgcagatgtcgccttaggacctcggccaggataccctctgccatgctcttgtgctgcccgtgatcaccgactggcccttgtaagcaccttcgcagagctgcgcctgccctttctgaaggctgtggaagaggttggagtgggcgcatcttagcttgccccatccccatttgaggtctgtcggagctgcccttcagtgtgagcatccacaatgggtaccccagcctcggtggtcagtgagccacccccttggcaggccccgattgaggcccggggccgcaagcaggcctcggccaacatcttccaggacgccgagctgctgcagatccaagccctgtttcaacgcagcggggaccagctggccgaggaacgggcacagatcatctgggaatgtgcaggggaccaccgtgtggctgaggccctcaagaggctgcgcaggaagaggcccccaaggcagaaacccctgggccactcgctacaccactgcagccgcctcagaatcctggagccccactctgcactggccaacccacagagtgccacagagacagcctccagtgagcagtatctgcactctaggaagaaaagtgccaggatccgccggaactggaggaagtcaggccccacaagctacctccaccagatcagacactgatccagggaaagagccaggaatggcagtgtcttccctcttgccaaaaggcctggggaggtgaaggaagagagactttaggcaagcagcccaaaggggtaaatgaaagcaagaggctgctgccactgacctgctccattcagaacaagactggatgcttctgttgagctctccattatgtgggacccattcctcaccaaaatgaggagagacagtgactgttcctgccacagtccttcccagtctaacactattcctgggctgcatgatattcccctgggagcaaagtgacaggcacttagatgcagcatttcaccactcatgctactaatcatctacctgctactactgtaaaccatggttccagcagcctgttccacacccccacaccatcaggatagcacagggaaactgtagtttaagtggcaaataaaaacatttgcatcaa

SEQ ID NO: 108640 - DNA, 1727 bp, Homo sapiens
  Payload ID: 1347
  Gene Symbol: RSRC1
  Gene Name: arginine/serine-rich coiled-coil 1
  Uniprot ID: Q96IZ7
  ENST ID: ENST00000295930
  CDS Start-End: 163-1167
gatgcactcgatatctcggctgaagctgcctggcgctagaaccaggaaggcgctgagcttaaactgaagcaagttcggtggacgccggcggcgccctgatctaaagaaacgactcagggactgcggcgcttgcacgtcaacgggaggtgtgagcccaaagaaatgggacgtcggtcatcagatactgaagaagaaagcagaagcaagagaaaaaagaaacaccgtagacggtcctcctcgagcagttcttcagatagtagaacatacagccgaaagaaaggaggaaggaaatcaagatcaaagtcaagatcttggtccagagatcttcagcctcgttcacattcttatgatagaagacgcaggcatcgatcaagcagtagctcttcttatggctccagaaggaaacgaagtcgaagtcgttcaaggggtcgagggaaatcctatagagttcagaggtctaggtcaaaaagcagaacaagaaggtccaggtcaagacctcgtctccgttctcatagtcgtagcagtgaaaggtccagtcacagaagaacgcgtagtcggtctcgggatagagaacgacgtaagggcagagataaagagaaaagagaaaaggagaaggataaagggaaggacaaggaattacataacatcaaacgtggggaatctggaaacatcaaagctggattagaacatctgccaccagctgaacaggccaaagccagactacagctggttcttgaagctgctgcaaaagctgatgaagcattgaaagccaaagaaagaaatgaggaagaagcaaagagaagaaaggaggaagaccaagccaccctggtagaacaagtaaaaagagtaaaagaaattgaagctattgaaagtgattcttttgttcagcagacattcagatcaagtaaagaagtcaaaaagtcagtggaacctagtgaagtgaaacaagcaacttcaacatcaggaccagcatcagcagttgctgatccacccagtactgaaaaagaaatagatcctaccagcatccctactgctatcaagtaccaagatgacaattccctggcccatccaaatttatttatcgagaaagctgatgctgaggaaaaatggttcaagagattaattgctctccgacaagaaagactaatgggcagtcctgtggcctaagtaatatacatatagttggattggattgtcagcagtaacattggaaatttaggtttttaaatcccaatattaactttttactcttaaaaagaattttgctgattatatataaaggtagtctcatttcatttgtctctcatgtaggcttgaatatttgttaatttgaattaaatcaaacattgtaaaaattaaaacaaaatttaagattgcatgaaaatgttatactgttaataaagctaaacataaataagtctgttaaaatgaatggtagacactagtgtttcttagtgcaattcaaaaaatgtcaagatgtcatttaaagacacaattttgattaattatgcatacatgagaattgaattacatgctataaatatgagatttcatcttccgtatggtattcaaccatttttaaatattttatttcaccatattgcaaatttttaggcacaataaaaagcaccctaaacaatgtaagcagaatgtgcatgttaaagaacatatttatggaaaaaaaatttttgaaacttaaataaattggtgattttgcttagagatca

SEQ ID NO: 108641 - DNA, 1443 bp, Homo sapiens
  Payload ID: 1347
  Gene Symbol: RSRC1
  Gene Name: arginine/serine-rich coiled-coil 1
  Uniprot ID: Q96IZ7
  ENST ID: ENST00000312179
  CDS Start-End: 95-925
gagcttaaactgaagcaagttcggtggacgccggcggcgccctgatctaaagaaacgactcagggactgcggcgcttgcacgtcaacgggagaaatgggacgtcggtcatcagatactgaagaagaaagcagaagcaagagaaaaaagaaacaccgtagacggtcctcctcgagcagttcttcagatagtagaacatacagccgaaagaaaggaggaaggaaatcaagatcaaagtcaagatcttggtccagagatcttcagcctcgttcacattcttatgatagaagacgcaggcatcgatcaagcagtagctcttcttatggctccagaaggaaacgaagtcgaagtcgttcaaggggtcgagggaaatcctatagagttcagaggtctaggtcaaaaagcagaacaagaagggaatctggaaacatcaaagctggattagaacatctgccaccagctgaacaggccaaagccagactacagctggttcttgaagctgctgcaaaagctgatgaagcattgaaagccaaagaaagaaatgaggaagaagcaaagagaagaaaggaggaagaccaagccaccctggtagaacaagtaaaaagagtaaaagaaattgaagctattgaaagtgattcttttgttcagcagacattcagatcaagtaaagaagtcaaaaagtcagtggaacctagtgaagtgaaacaagcaacttcaacatcaggaccagcatcagcagttgctgatccacccagtactgaaaaagaaatagatcctaccagcatccctactgctatcaagtaccaagatgacaattccctggcccatccaaatttatttatcgagaaagctgatgctgaggaaaaatggttcaagagattaattgctctccgacaagaaagactaatgggcagtcctgtggcctaagtaatatacatatagttggattggattgtcagcagtaacattggaaatttaggtttttaaatcccaatattaactttttactcttaaaaagaattttgctgattatatataaaggtagtctcatttcatttgtctctcatgtaggcttgaatatttgttaatttgaattaaatcaaacattgtaaaaattaaaacaaaatttaagattgcatgaaaatgttatactgttaataaagctaaacataaataagtctgttaaaatgaatggtagacactagtgtttcttagtgcaattcaaaaaatgtcaagatgtcatttaaagacacaattttgattaattatgcatacatgagaattgaattacatgctataaatatgagatttcatcttccgtatggtattcaaccatttttaaatattttatttcaccatattgcaaatttttaggcacaataaaaagcaccctaaacaatgtaagcagaatgtgcatgttaaagaacatatttatggaaaaaaaa

SEQ ID NO: 108642 - DNA, 769 bp, Homo sapiens
  Payload ID: 1347
  Gene Symbol: RSRC1
  Gene Name: arginine/serine-rich coiled-coil 1
  ENST ID: ENST00000471994
  CDS Start-End: 159-769
cggctgaagctgcctggcgctagaaccaggaaggcgctgagcttaaactgaagcaagttcggtggacgccggcggcgccctgatctaaagaaacgactcagggactgcggcgcttgcacgtcaacgggaggtgtgagcccaaaggtctggacccagaaatgggacgtcggtcatcagatactgaagaagaaagcagaagcaagagaaaaaagaaacaccgtagacggtcctcctcgagcagttcttcagatagtagaacatacagccgaaagaaaggaggaaggaaatcaagatcaaagtcaagatcttggtccagagatcttcagcctcgttcacattcttatgatagaagacgcaggcatcgatcaagcagtagctcttcttatggctccagaaggaaacgaagtcgaagtcgttcaaggggtcgagggaaatcctatagagttcagaggtctaggtcaaaaagcagaacaagaaggtccaggtcaagacctcgtctccgttctcatagtcgtagcagtgaaaggtccagtcacagaagaacgcgtagtcggtctcgggatagagaacgacgtaagggcagagataaagagaaaagagaaaaggagaaggataaagggaaggacaaggaattacataacatcaaacgtggggaatctggaaacatcaaagctggattagaacatctgccaccagctgaacaggccaaagccagactacagctggttcttgaagctgctgcaaaagctgatgaagcattgaaagccaa

SEQ ID NO: 108643 - DNA, 679 bp, Homo sapiens
  Payload ID: 1347
  Gene Symbol: RSRC1
  Gene Name: arginine/serine-rich coiled-coil 1
  ENST ID: ENST00000494002
  CDS Start-End: 186-679
tttgtctgtattgtgccggacagggcttgctgtgagaagtgtggctatgcaaatacatactcacaaaagaatatttacatatgatgttatatttaagtgtgtaaacaaatatacctctaagtgtggcttaggggacattttcaagtactctgaatattaatgcagactttctggaagttaaagaaatgggacgtcggtcatcagatactgaagaagaaagcagaagcaagagaaaaaagaaacaccgtagacggtcctcctcgagcagttcttcagatagtagaacatacagccgaaagaaaggaggaaggaaatcaagatcaaagtcaagatcttggtccagagatcttcagcctcgttcacattcttatgatagaagacgcaggcatcgatcaagcagtagctcttcttatggctccagaaggaaacgaagtcgaagtcgttcaaggggtcgagggaaatcctatagagttcagaggtctaggtcaaaaagcagaacaagaaggtccaggtcaagacctcgtctccgttctcatagtcgtagcagtgaaaggtccagtcacagaagaacgcgtagtcggtctcgggatagagaacgacgtaagggcagagataaagagaaaagagaaaaggagaaggataaagggaaggacaaggaattacataacatcaaacgtgg

SEQ ID NO: 108644 - DNA, 1195 bp, Homo sapiens
  Payload ID: 1347
  Gene Symbol: RSRC1
  Gene Name: arginine/serine-rich coiled-coil 1
  ENST ID: ENST00000475278
  CDS Start-End: 94-945
agcttaaactgaagcaagttcggtggacgccggcggcgccctgatctaaagaaacgactcagggactgcggcgcttgcacgtcaacgggagaaatgggacgtcggtcatcagatactgaagaagaaagcagaagcaagagaaaaaagaaacaccgtagacggtcctcctcgagcagttcttcagatagtagaacatacagccgaaagaaaggaggaaggaaatcaagatcaaagtcaagatcttggtccagagatcttcagcctcgttcacattcttatgatagaagacgcaggcatcgatcaagcagtagctcttcttatggctccagaaggaaacgaagtcgaagtcgttcaaggggtcgagggaaatcctatagagttcagaggtctaggtcaaaaagcagaacaagaaggtccaggtcaagacctcgtctccgttctcatagtcgtagcagtgaaaggtccagtcacagaagaacgcgtagtcggtctcgggatagagaacgacgtaagggcagagataaagagaaaagagaaaaggagaaggataaagggaaggacaaggaattacataacatcaaacgtggggaatctggaaacatcaaagctggattagaacatctgccaccagctgaacaggccaaagccagactacagctggttcttgaagctgctgcaaaagctgatgaagcattgaaagccaaagaaagaaatgaggaagaagcaaagagaagaaaggaggaagaccaagccaccctggtagaacaagtaaaaagagtaaaagaaattgaagctattgaaagtgattcttttgttcagcagacattcagatcaagtaaagaagtcaaaaagttatttatcgagaaagctgatgctgaggaaaaatggttcaagagattaattgctctccgacaagaaagactaatgggcagtcctgtggcctaagtaatatacatatagttggattggattgtcagcagtaacattggaaatttaggtttttaaatcccaatattaactttttactcttaaaaagaattttgctgattatatataaaggtagtctcatttcatttgtctctcatgtaggcttgaatatttgttaatttgaattaaatcaaacattgtaaaaattaaaacaaaatttaagattgcatgaaaatgttatactgttaataaagctaaacataaataa

SEQ ID NO: 108645 - DNA, 755 bp, Homo sapiens
  Payload ID: 1347
  Gene Symbol: RSRC1
  Gene Name: arginine/serine-rich coiled-coil 1
  ENST ID: ENST00000477788
  CDS Start-End: 1-338
aaaagaaacaccgtagacggtcctcctcgagcagttcttcagatagtagaacatacagccgaaagaaaggaggaaggaaatcaagatcaaagtcaagatcttggtccagagatcttcagcctcgttcacattcttatgatagaagacgcaggcatcgatcaagcagtagctcttcttatggctccagaaggaaacgaagtcgaagtcgttcaaggggtcgagggaaatcctatagagttcagaggtctaggtcaaaaagcagaacaagaaggtatcctcctacctcaacctcctgggtagctgggactacaggtacacaccgccacacccaactatgatttttgtatttttggcggagatggggtttcaccatgttgcccaggctggtctcaaattcctgagctcaagcgatccccctgccttggcctcactaagtgcagggattacaggtccaggtcaagacctcgtctccgttctcatagtcgtagcagtgaaaggtccagtcacagaagaacgcgtagtcggtctcgggatagagaacgacgtaagggcagagataaagagaaaagagaaaaggagaaggataaagggaaggacaaggaattacataacatcaaacgtggggaatctggaaacatcaaagctggattagaacatctgccaccagctgaacaggccaaagccagactacagctggttcttgaagctgctggtaagtgttgataattaacttttattaaatgaagaagtgacga

SEQ ID NO: 108646 - DNA, 788 bp, Homo sapiens
  Payload ID: 1347
  Gene Symbol: RSRC1
  Gene Name: arginine/serine-rich coiled-coil 1
  ENST ID: ENST00000476899
  CDS Start-End: 206-788
ggctccggactccttgggtcaaggctggtggctgtagggtgggtgggtggccgcaggcctcaagcttggccttctgtcttgaggacatgtcggagagttcgccgactcctcccctcgccccacgttcctggttcttcatagctgcttttgggtttcctggctcatcttgcaatataagcctggcgcttcctcactagctctagaaatgggacgtcggtcatcagatactgaagaagaaagcagaagcaagagaaaaaagaaacaccgtagacggtcctcctcgagcagttcttcagatagtagaacatacagccgaaagaaaggaggaaggaaatcaagatcaaagtcaagatcttggtccagagatcttcagcctcgttcacattcttatgatagaagacgcaggcatcgatcaagcagtagctcttcttatggctccagaaggaaacgaagtcgaagtcgttcaaggggtcgagggaaatcctatagagttcagaggtctaggtcaaaaagcagaacaagaaggtccaggtcaagacctcgtctccgttctcatagtcgtagcagtgaaaggtccagtcacagaagaacgcgtagtcggtctcgggatagagaacgacgtaagggcagagataaagagaaaagagaaaaggagaaggataaagggaaggacaaggaattacataacatcaaacgtggggaatctggaaacatcaaagctggattagaacatctgccaccagctgaacaggccaaagccagactacagctggttcttgaagctgctg

SEQ ID NO: 108647 - DNA, 2411 bp, Homo sapiens
  Payload ID: 1347
  Gene Symbol: RSRC1
  Gene Name: arginine/serine-rich coiled-coil 1
  Uniprot ID: Q96IZ7
  ENST ID: ENST00000464171
  CDS Start-End: 126-956
agaaccaggaaggcgctgagcttaaactgaagcaagttcggtggacgccggcggcgccctgatctaaagaaacgactcagggactgcggcgcttgcacgtcaacgggaggtgtgagcccaaagaaatgggacgtcggtcatcagatactgaagaagaaagcagaagcaagagaaaaaagaaacaccgtagacggtcctcctcgagcagttcttcagatagtagaacatacagccgaaagaaaggaggaaggaaatcaagatcaaagtcaagatcttggtccagagatcttcagcctcgttcacattcttatgatagaagacgcaggcatcgatcaagcagtagctcttcttatggctccagaaggaaacgaagtcgaagtcgttcaaggggtcgagggaaatcctatagagttcagaggtctaggtcaaaaagcagaacaagaagggaatctggaaacatcaaagctggattagaacatctgccaccagctgaacaggccaaagccagactacagctggttcttgaagctgctgcaaaagctgatgaagcattgaaagccaaagaaagaaatgaggaagaagcaaagagaagaaaggaggaagaccaagccaccctggtagaacaagtaaaaagagtaaaagaaattgaagctattgaaagtgattcttttgttcagcagacattcagatcaagtaaagaagtcaaaaagtcagtggaacctagtgaagtgaaacaagcaacttcaacatcaggaccagcatcagcagttgctgatccacccagtactgaaaaagaaatagatcctaccagcatccctactgctatcaagtaccaagatgacaattccctggcccatccaaatttatttatcgagaaagctgatgctgaggaaaaatggttcaagagattaattgctctccgacaagaaagactaatgggcagtcctgtggcctaagtaatatacatatagttggattggattgtcagcagtaacattggaaatttaggtttttaaatcccaatattaactttttactcttaaaaagaattttgctgattatatataaaggtagtctcatttcatttgtctctcatgtaggcttgaatatttgttaatttgaattaaatcaaacattgtaaaaattaaaacaaaatttaagattgcatgaaaatgttatactgttaataaagctaaacataaataagtctgttaaaatgaatggtagacactagtgtttcttagtgcaattcaaaaaatgtcaagatgtcatttaaagacacaattttgattaattatgcatacatgagaattgaattacatgctataaatatgagatttcatcttccgtatggtattcaaccatttttaaatattttatttcaccatattgcaaatttttaggcacaataaaaagcaccctaaacaatgtaagcagaatgtgcatgttaaagaacatatttatggaaaaaaaatttttgaaacttaaataaattggtgattttgcttagagatcagcttctactagatgctcctttacaacatgttagcagatctcagctcattgttttagaaatcacatgttcatgctagacctaaccagttggccaaatacctatgatggagaaatcatttctgagaaaactgataagagctctcacttcagtcttacttaccccactgctattccctgtggagaaagccggctaattgttttgataaggctatctgccattgtagaatacctttctctagtagctgaatgacaatcaactatacgttccatactaaacatgccagagataggacttttaggccttgctttacaaaactggtttttaacagctgacatgaatatttcccgtttctattttcttttttttttttttttttttttttttgagacggagtctcgctctatcccccatgctggagtgcagtggcgcgatctcagctcactgcaagctccgcctcccaggttcacgccattttcttgcctcagcctcccgagtagctgggactacaggcacccgctaacatgcccagctaattttttgtgtttttagtagagatggggtttcaccattttagccaggatggtctattttcttctgttgtccagtcactaatttagtctctgcgaagactgtagctcagaacaaaagataagcaaaaaaagtcttcagggtaggactgccaacatataggacattttaatgccatcttctttatatttctgggacattaaaattcaaatctctgttgaaaatgaaaaatgtaaaacttagttgcaaacagtatagaaaataagtgatgatgaaatatttgttttcatacaaacatgctttcccattctaaatagatgctagttttcttttttccttggctgtaaataaaagtgccccaaatgaa

SEQ ID NO: 108648 - DNA, 1335 bp, Homo sapiens
  Payload ID: 1347
  Gene Symbol: RSRC1
  Gene Name: arginine/serine-rich coiled-coil 1
  ENST ID: ENST00000480119
  CDS Start-End: 86-685
gtggacgccggcggcgccctgatctaaagaaacgactcagggactgcggcgcttgcacgtcaacgggaggtgtgagcccaaagaaatgggacgtcggtcatcagatactgaagaagaaagcagaagcaagagaaaaaagaaacaccgtagacggtcctcctcgagcagttcttcagatagtagaacatacagccgaaagaaaggaggaaggaaatcaagatcaaagtcaagatcttggtccagagatcttcagcctcgttcacattcttatgatagaagacgcaggcatcgatcaagcagtagctcttcttatggctccagaaggaaacgaagtcgaagtcgttcaaggggtcgagggaaatcctatagagttcagaggtctaggtcaaaaagcagaacaagaaggtccaggtcaagacctcgtctccgttctcatagtcgtagcagtgaaaggtccagtcacagaagaacgcgtagtcggtctcgggatagagaacgacgtaagggcagagataaagagaaaagagaaaaggagaaggataaagggaaggacaaggaattacataacatcaaacgtggatttcaccaaaagaattgtgagaggaaaaagaaacttacatctaacaggaagagaaaagttttaggaagaccaaattggaatctggaaacatcaaagctggattagaacatctgccaccagctgaacaggccaaagccagactacagctggttcttgaagctgctgcaaaagctgatgaagcattgaaagccaaagaaagaaatgaggaagaagcaaagagaagaaaggaggaagaccaagccaccctggtagaacaagtaaaaagagtaaaagaaattgaagctattgaaagtgattcttttgttcagcagacattcagatcaagtaaagaagtcaaaaagtcagtggaacctagtgaagtgaaacaagcaacttcaacatcaggaccagcatcagcagttgctgatccacccagtactgaaaaagaaatagatcctaccagcatccctactgctatcaagtaccaagatgacaattccctggcccatccaaatttatttatcgagaaagctgatgctgaggaaaaatggttcaagagattaattgctctccgacaagaaagactaatgggcagtcctgtggcctaagtaatatacatatagttggattggattgtcagcagtaacattggaaatttaggtttttaaatcccaatattaactttttactcttaaaaagaattttgctgattatatataaaggtagtctcatttcatttgtctctcatgtaggcttgaatatttgttaatttgaat

SEQ ID NO: 108649 - DNA, 1410 bp, Homo sapiens
  Payload ID: 1347
  Gene Symbol: RSRC1
  Gene Name: arginine/serine-rich coiled-coil 1
  Uniprot ID: Q96IZ7
  ENST ID: ENST00000480820
  CDS Start-End: 159-1163
cggactgccgggctgctgcggtcgtcgcggcccgcctcggtgcagccggtcggctccttggccccgcgcagcggcccgctctccagcacctcccggtacgtgatcgcctccttcttctccttcactttctggtcaaaagacttggagacgaacgccaaatgggacgtcggtcatcagatactgaagaagaaagcagaagcaagagaaaaaagaaacaccgtagacggtcctcctcgagcagttcttcagatagtagaacatacagccgaaagaaaggaggaaggaaatcaagatcaaagtcaagatcttggtccagagatcttcagcctcgttcacattcttatgatagaagacgcaggcatcgatcaagcagtagctcttcttatggctccagaaggaaacgaagtcgaagtcgttcaaggggtcgagggaaatcctatagagttcagaggtctaggtcaaaaagcagaacaagaaggtccaggtcaagacctcgtctccgttctcatagtcgtagcagtgaaaggtccagtcacagaagaacgcgtagtcggtctcgggatagagaacgacgtaagggcagagataaagagaaaagagaaaaggagaaggataaagggaaggacaaggaattacataacatcaaacgtggggaatctggaaacatcaaagctggattagaacatctgccaccagctgaacaggccaaagccagactacagctggttcttgaagctgctgcaaaagctgatgaagcattgaaagccaaagaaagaaatgaggaagaagcaaagagaagaaaggaggaagaccaagccaccctggtagaacaagtaaaaagagtaaaagaaattgaagctattgaaagtgattcttttgttcagcagacattcagatcaagtaaagaagtcaaaaagtcagtggaacctagtgaagtgaaacaagcaacttcaacatcaggaccagcatcagcagttgctgatccacccagtactgaaaaagaaatagatcctaccagcatccctactgctatcaagtaccaagatgacaattccctggcccatccaaatttatttatcgagaaagctgatgctgaggaaaaatggttcaagagattaattgctctccgacaagaaagactaatgggcagtcctgtggcctaagtaatatacatatagttggattggattgtcagcagtaacattggaaatttaggtttttaaatcccaatattaactttttactcttaaaaagaattttgctgattatatataaaggtagtctcatttcatttgtctctcatgtaggcttgaatatttgttaatttgaattaaatcaaacattgtaaaaattaaaacaaaatttaagattgcatgaaaatgttatactgttaataaagctaaacataaa

SEQ ID NO: 108650 - DNA, 792 bp, Homo sapiens
  Payload ID: 1347
  Gene Symbol: RSRC1
  Gene Name: arginine/serine-rich coiled-coil 1
  ENST ID: ENST00000482822
  CDS Start-End: 1-625
gtccaggtcaagacctcgtctccgttctcatagtcgtagcagtgaaaggtccagtcacagaagaacgcgtagtcggtctcgggatagagaacgacgtaagggcagagataaagagaaaagagaaaaggagaaggataaagggaaggacaaggaattacataacatcaaacgtggggaatctggaaacatcaaagctggattagaacatctgccaccagctgaacaggccaaagccagactacagctggttcttgaagctgctgcaaaagctgatgaagcattgaaagccaaagaaagaaatgaggaagaagcaaagagaagaaaggaggaagaccaagccaccctggtagaacaagtaaaaagagtaaaagaaattgaagctattgaaagtgattcttttgttcagcagacattcagatcaagtaaagaagtcaaaaagtcagtggaacctagtgaagtgaaacaagcaacttcaacatcaggaccagcatcagcagttgctgatccacccagtactgaaaaagaaatagatcctaccagcatccctactgctatcaagtaccaagatgacaattccctggcccatccaaatgtaatatccttaaactttacgaatgtcagttgaagtctaatttactgaaattatttcaatctgttatccttttgtgctaacaccaaggagaccattggaggaaacaggttcatattcccttgctaaaaataggcatctggcccccaggcctttagaactgttatctatatttgaatacagtagggtccaactcatgttgc

SEQ ID NO: 108651 - DNA, 1738 bp, Homo sapiens
  Payload ID: 1347
  Gene Symbol: RSRC1
  Gene Name: arginine/serine-rich coiled-coil 1
  Uniprot ID: Q96IZ7
  ENST ID: ENST00000611884
  CDS Start-End: 175-1179
gatgcactcgatatctcggctgaagctgcctggcgctagaaccaggaaggcgctgagcttaaactgaagcaagttcggtggacgccggcggcgccctgatctaaagaaacgactcagggactgcggcgcttgcacgtcaacgggaggtgtgagcccaaaggtctggacccagaaatgggacgtcggtcatcagatactgaagaagaaagcagaagcaagagaaaaaagaaacaccgtagacggtcctcctcgagcagttcttcagatagtagaacatacagccgaaagaaaggaggaaggaaatcaagatcaaagtcaagatcttggtccagagatcttcagcctcgttcacattcttatgatagaagacgcaggcatcgatcaagcagtagctcttcttatggctccagaaggaaacgaagtcgaagtcgttcaaggggtcgagggaaatcctatagagttcagaggtctaggtcaaaaagcagaacaagaaggtccaggtcaagacctcgtctccgttctcatagtcgtagcagtgaaaggtccagtcacagaagaacgcgtagtcggtctcgggatagagaacgacgtaagggcagagataaagagaaaagagaaaaggagaaggataaagggaaggacaaggaattacataacatcaaacgtggggaatctggaaacatcaaagctggattagaacatctgccaccagctgaacaggccaaagccagactacagctggttcttgaagctgctgcaaaagctgatgaagcattgaaagccaaagaaagaaatgaggaagaagcaaagagaagaaaggaggaagaccaagccaccctggtagaacaagtaaaaagagtaaaagaaattgaagctattgaaagtgattcttttgttcagcagacattcagatcaagtaaagaagtcaaaaagtcagtggaacctagtgaagtgaaacaagcaacttcaacatcaggaccagcatcagcagttgctgatccacccagtactgaaaaagaaatagatcctaccagcatccctactgctatcaagtaccaagatgacaattccctggcccatccaaatttatttatcgagaaagctgatgctgaggaaaaatggttcaagagattaattgctctccgacaagaaagactaatgggcagtcctgtggcctaagtaatatacatatagttggattggattgtcagcagtaacattggaaatttaggtttttaaatcccaatattaactttttactcttaaaaagaattttgctgattatatataaaggtagtctcatttcatttgtctctcatgtaggcttgaatatttgttaatttgaattaaatcaaacattgtaaaaattaaaacaaaatttaagattgcatgaaaatgttatactgttaataaagctaaacataaataagtctgttaaaatgaatggtagacactagtgtttcttagtgcaattcaaaaaatgtcaagatgtcatttaaagacacaattttgattaattatgcatacatgagaattgaattacatgctataaatatgagatttcatcttccgtatggtattcaaccatttttaaatattttatttcaccatattgcaaatttttaggcacaataaaaagcaccctaaacaatgtaagcagaatgtgcatgttaaagaacatatttatggaaaaaaaatttttgaaacttaaataaattggtgattttgcttagagatc

SEQ ID NO: 108652 - DNA, 3520 bp, Homo sapiens
  Payload ID: 1348
  Gene Symbol: RSRC2
  Gene Name: arginine/serine-rich coiled-coil 2
  Uniprot ID: Q7L4I2
  ENST ID: ENST00000331738
  CDS Start-End: 147-1451
agctgtgcgacgcgccgggcctcctcgcctttgtgccatccgggtctctcgcgcgagcgatttagtctgaggcgaagcttcggagcggccggtactgttgaaagcgacaagtggaggcgccgctctagcggccgggactctgaactatggcggctagtgatacagagcgagatggactagccccagaaaagacatcaccagatagagataagaaaaaagagcagtcagaagtatctgtttctcctagagcttcaaaacatcattattcaagatcacgatcaaggtcaagagaaagaaaacgaaagtcagataatgaaggaagaaaacacaggagccggagcagaagcaaagagggaagaagacatgaatccaaagataaatcctctaagaaacataagtctgaggaacataatgacaaagaacattcttctgataaaggaagagagcgactaaattcatctgaaaatggtgaggacaggcacaaacgcaaagaaagaaagtcatcaagaggcagaagtcactcaagatctaggtctcgtgaaagacgccatcgtagtagaagcagggagcggaagaagtctcgatccaggagtagggagcggaagaaatcgagatccagaagcagagagaggaagaaatcgagatccagaagcagggaaagaaaacggcggatcaggtctcgttcccgctcaagatcaagacacaggcataggactagaagcaggagtaggacaaggagtaggagtcgagatagaaagaagagaattgaaaagccgagaagatttagcagaagtttaagccggactccaagtccacctcccttcagaggcagaaacacagcaatggatgcacaggaagctttagctagaaggttggaaagggcaaagaaattacaagaacagcgagaaaaggaaatggttgaaaaacaaaaacaacaagaaatagctgcagctgcagctactggaggttctgttctcaatgttgctgccctgttggcatcaggaacacaagtaacacctcagatagccatggcagctcagatggcagccctgcaagctaaagctttggcagagacaggaatagctgttcctagctactataacccagccgctgttaatccaatgaaatttgctgaacaagagaaaaaaaggaaaatgctttggcagggcaagaaagaaggggacaaatcccaatctgctgaaatatgggaaaaattgaattttggaaacaaggaccaaaatgtcaaatttaggaaattgatgggtattaagagtgaagatgaagctggatgtagctcagttgatgaagaaagttacaagactctgaagcagcaggaagaagtatttcgaaatttagatgctcagtatgaaatggcaagatcacaaacccacacacaaagaggaatgggtttgggtttcacatcttcaatgcgaggaatggatgcagtttgaaaatgatcacacttgtaaagtttgggacttatagacttcttgttctgatgtcacgtccttgttcaccaaacagctagcactctagcttgcatgggtgttgcattgactttaatttattgaaaaatacaaatttttgtaaatatcagatcagtgatactggtgttagtgttgtaatcaggttaaacccacttccattaaacttgacaggactatagaaggataatattttttagttcatgaattctacttttcaaatatataaaagctgcaggtggggataaaatctcatacatggattttttcgtgtccgctgtcttgtgtacttttgtacttaaccttgtacagttattttcatctcttgaaacatgaaagaaatgttatgtagatgttctttagaagatctggccatttggtacataatccagcacagataagctgggtggtaatgataataaaaatggttttctcaaaactggtgttaatttaagttacctgggatgtttctttgaatttgttttatagtttctgtagcatttggcaattgctgttagaaaacactagctagaaatcccctccccaccaccctttttaaggccagttaactatactacagtcaataccgtggtgagcaaaaatgtaaaaggtggaaggagaaaacttactaaaatagtatgttttcctattataagggacagacttggtattcagtatttgtcaaatattacatgtgttattcaggagatagattaatgcattaaagggatgtaagcacttttattttaataaagtgccttataacaagttctttgcatgctttttgctcattatccctttgaagtcttctccagcatagactataaaatattaaaatattagaaattttttttgtttgtttttttgagacaggatcttgctctgttgcctaaactgggtgcagtggcacaatctcggctcactgccagagcctctgccccccaggttcaagcaattctcccacctccacctcccatgtaactgggattacaggcgtaccaccgcacccagctaatttttgtatttttagtagaggtggggttttaccatgttggccaggctggtcctgaactcctgacctcaggtgatccaccctcctcagcctcccaaagtgccgggattataggcgtgagccactgcagccagcctagaaaatgttttgttactagattgaacataaatctggagccaaggggtggggggggcctgcaaaacttgaagttaatttacttcagttacagcaaagtaataaggtttggctttcctttgaaaaatcctttggaaaacatcacagaatgagagcacattacaatcagggaagactacaggaataagattgacagccttattttaaaagctggaattaagtcttgccaacttgctcattaggtattttttttatacatgaaaatgaagtaatggggtgttttctttttttttgctttctgtcctaggctggagtgcagtgcattgcagcaggctcccccaggctcaagcagtcctcccacctcagcctcttgagtacctgggaccacaggtgctcaccaacacacctagcttgtttttaattttttataaagacaaggtcttgttacgttgcccaggttggtcttgaattcctggcctcaagcaatcctcccacctcagggctcccaaagtgatggggttacaggtgtgatccacttcacctagccagattgtaagatttttaatgtactttaataaacctttcattttcccagagcacagaaattctatggcaaaatggcttttcaccgtgtttcagtgacaaatctaagccttctaaggaaatgacactatggatccttcatttcgtgatcatcaacatttttcaattaagctctgcctttttaaatcaatcttattaaaaatgttcatgaccttctaaggcagtgtggacgcaaaagcttcctgtgtgtctacagttattttaggagctgaccatacatgatgagtgatacagcctgtactttgctcatctagagcagcactgtccaataaaatatgtgtgtata

SEQ ID NO: 108653 - DNA, 936 bp, Homo sapiens
  Payload ID: 1348
  Gene Symbol: RSRC2
  Gene Name: arginine/serine-rich coiled-coil 2
  ENST ID: ENST00000344591
  CDS Start-End: 228-936
ccgggtctctcgcgcgagcgatttagtctgaggcgaagcttcggagcggccggtactgttgaaagcgacaagtggaggcgccgctctagcggccgggactctgaactatggcgataatgaaggaagaaaacacaggagccggagcagaagcaaagagcgtgcttatgcgcgaagagactgaactgaagacgctgcagactcagatagcaaaataataagcctacttcatgataagaaccaacttcttcttaaaacagggaagaagacatgaatccaaagataaatcctctaagaaacataagtctgaggaacataatgacaaagaacattcttctgataaaggaagagagcgactaaattcatctgaaaatggtgaggacaggcacaaacgcaaagaaagaaagtcatcaagaggcagaagtcactcaagatctaggtctcgtgaaagacgccatcgtagtagaagcagggagcggaagaagtctcgatccaggagtagggagcggaagaaatcgagatccagaagcagagagaggaagaaatcgagatccagaagcagggaaagaaaacggcggatcaggtctcgttcccgctcaagatcaagacacaggcataggactagaagcaggagtaggacaaggagtaggagtcgagatagaaagaagagaattgaaaagccgagaagatttagcagaagtttaagccggactccaagtccacctcccttcagaggcagaaacacagcaatggatgcacaggaagctttagctagaaggttggaaagggcaaagaaattacaagaacagcgagaaaaggaaatggttgaaaaacaaaaacaacaagaaatagctgcagctgcagctactggaggttctgttctcaatgttgctgccctgttggcatcaggaacacaagtaacacctcagatagccatgg

SEQ ID NO: 108654 - DNA, 1956 bp, Homo sapiens
  Payload ID: 1348
  Gene Symbol: RSRC2
  Gene Name: arginine/serine-rich coiled-coil 2
  ENST ID: ENST00000433877
  CDS Start-End: 84-314
agtctgaggcgaagcttcggagcggccggtactgttgaaagcgacaagtggaggcgccgctctagcggccgggactctgaactatggcggctagtgatacagagcgagatggactagccccagaaaagacatcaccagatagagataagaaaaaagagcagtcagaagtatctgtttctcctagagcttcaaaacatcattattcaagatcacgatcaaggtcaagagaaagaaaacgaaagtcagataatgaaggaagaaaacacaggagccggagcagaagcaaagagcgtgcttatgcgcgaagagactgaactgaagacgctgcagactcagatagcaaaataataagcctacttcatgataagaaccaacttcttcttaaaacagggaagaagacatgaatccaaagataaatcctctaagaaacataagtctgaggaacataatgacaaagaacattcttctgataaaggaagagagcgactaaattcatctgaaaatggtgaggacaggcacaaacgcaaagaaagaaagtcatcaagaggcagaagtcactcaagatctaggtctcgtgaaagacgccatcgtagtagaagcagggagcggaagaagtctcgatccaggagtagggagcggaagaaatcgagatccagaagcagagagaggaagaaatcgagatccagaagcagggaaagaaaacggcggatcaggtctcgttcccgctcaagatcaagacacaggcataggactagaagcaggagtaggacaaggagtaggagtcgagatagaaagaagagaattgaaaagccgagaagatttagcagaagtttaagccggactccaagtccacctcccttcagaggcagaaacacagcaatggatgcacaggaagctttagctagaaggttggaaagggcaaagaaattacaagaacagcgagaaaaggaaatggttgaaaaacaaaaacaacaagaaatagctgcagctgcagctactggaggttctgttctcaatgttgctgccctgttggcatcaggaacacaagtaacacctcagatagccatggcagctcagatggcagccctgcaagctaaagctttggcagagacaggaatagctgttcctagctactataacccagccgctgttaatccaatgaaatttgctgaacaagagaaaaaaaggaaaatgctttggcagggcaagaaagaaggggacaaatcccaatctgctgaaatatgggaaaaattgaattttggaaacaaggaccaaaatgtcaaatttaggaaattgatgggtattaagagtgaagatgaagctggatgtagctcagttgatgaagaaagttacaagactctgaagcagcaggaagaagtatttcgaaatttagatgctcagtatgaaatggcaagatcacaaacccacacacaaagaggaatgggtttgggtttcacatcttcaatgcgaggaatggatgcagtttgaaaatgatcacacttgtaaagtttgggacttatagacttcttgttctgatgtcacgtccttgttcaccaaacagctagcactctagcttgcatgggtgttgcattgactttaatttattgaaaaatacaaatttttgtaaatatcagatcagtgatactggtgttagtgttgtaatcaggttaaacccacttccattaaacttgacaggactatagaaggataatattttttagttcatgaattctacttttcaaatatataaaagctgcaggtggggataaaatctcatacatggattttttcgtgtccgctgtcttgtgtacttttgtacttaaccttgtacagttattttcatctcttgaaacatgaaagaaatgttatgtagatgttctttagaagatctggccatttggtacataatccagcacagataagctgggtggtaatgataataaaaatggttttctc

SEQ ID NO: 108655 - DNA, 1041 bp, Homo sapiens
  Payload ID: 1348
  Gene Symbol: RSRC2
  Gene Name: arginine/serine-rich coiled-coil 2
  ENST ID: ENST00000527399
  CDS Start-End: 143-373
gtgcgacgcgccgggcctcctcgcctttgtgccatccgggtctctcgcgcgagcgatttagtctgaggcgaagcttcggagcggccggtactgttgaaagcgacaagtggaggcgccgctctagcggccgggactctgaactatggcggctagtgatacagagcgagatggactagccccagaaaagacatcaccagatagagataagaaaaaagagcagtcagaagtatctgtttctcctagagcttcaaaacatcattattcaagatcacgatcaaggtcaagagaaagaaaacgaaagtcagataatgaaggaagaaaacacaggagccggagcagaagcaaagagcgtgcttatgcgcgaagagactgaactgaagacgctgcagactcagatagcaaaataataagcctacttcatgataagaaccaacttcttcttaaaacagggaagaagacatgaatccaaagataaatcctctaagaaacataagtctgaggaacataatgacaaagaacattcttctgataaaggaagagagcgactaaattcatctgaaaatggtgaggacaggcacaaacgcaaagaaagaaagtcatcaagaggcagaagtcactcaagatctaggtctcgtgaaagacgccatcgtagtagaagcagggagcggaagaagtctcgatccaggagtagggagcggaagaaatcgagatccagaagcagagagaggaagaaatcgagatccagaagcagggaaagaaaacggcggatcaggtctcgttcccgctcaagatcaagacacaggcataggactagaagcaggagtaggacaaggagtaggaagatagaaagaagagaattgaaaagccgagaagatttagcagaagtttaagccggactccaagtccacctcccttcagaggcagaaacacagcaatggatgcacaggaagctttagctagaaggttggaaagggcaaagaaattacaagaacagcgagaaaaggaaatggttgaaaaacaaaaacaacaagaaatagctgc

SEQ ID NO: 108656 - DNA, 2001 bp, Homo sapiens
  Payload ID: 1348
  Gene Symbol: RSRC2
  Gene Name: arginine/serine-rich coiled-coil 2
  ENST ID: ENST00000532695
  CDS Start-End: 148-378
aagctgtgcgacgcgccgggcctcctcgcctttgtgccatccgggtctctcgcgcgagcgatttagtctgaggcgaagcttcggagcggccggtactgttgaaagcgacaagtggaggcgccgctctagcggccgggactctgaactatggcggctagtgatacagagcgagatggactagccccagaaaagacatcaccagatagagataagaaaaaagagcagtcagaagtatctgtttctcctagagcttcaaaacatcattattcaagatcacgatcaaggtcaagagaaagaaaacgaaagtcagataatgaaggaagaaaacacaggagccggagcagaagcaaagagcgtgcttatgcgcgaagagactgaactgaagacgctgcagactcagatagcaaaataataagcctacttcatgataagggaagaagacatgaatccaaagataaatcctctaagaaacataagtctgaggaacataatgacaaagaacattcttctgataaaggaagagagcgactaaattcatctgaaaatggtgaggacaggcacaaacgcaaagaaagaaagtcatcaagaggcagaagtcactcaagatctaggtctcgtgaaagacgccatcgtagtagaagcagggagcggaagaagtctcgatccaggagtagggagcggaagaaatcgagatccagaagcagagagaggaagaaatcgagatccagaagcagggaaagaaaacggcggatcaggtctcgttcccgctcaagatcaagacacaggcataggactagaagcaggagtaggacaaggagtaggagtcgagatagaaagaagagaattgaaaagccgagaagatttagcagaagtttaagccggactccaagtccacctcccttcagaggcagaaacacagcaatggatgcacaggaagctttagctagaaggttggaaagggcaaagaaattacaagaacagcgagaaaaggaaatggttgaaaaacaaaaacaacaagaaatagctgcagcagctgcagctactggaggttctgttctcaatgttgctgccctgttggcatcaggaacacaagtaacacctcagatagccatggcagctcagatggcagccctgcaagctaaagctttggcagagacaggaatagctgttcctagctactataacccagccgctgttaatccaatgaaatttgctgaacaagagaaaaaaaggaaaatgctttggcagggcaagaaagaaggggacaaatcccaatctgctgaaatatgggaaaaattgaattttggaaacaaggaccaaaatgtcaaatttaggaaattgatgggtattaagagtgaagatgaagctggatgtagctcagttgatgaagaaagttacaagactctgaagcagcaggaagaagtatttcgaaatttagatgctcagtatgaaatggcaagatcacaaacccacacacaaagaggaatgggtttgggtttcacatcttcaatgcgaggaatggatgcagtttgaaaatgatcacacttgtaaagtttgggacttatagacttcttgttctgatgtcacgtccttgttcaccaaacagctagcactctagcttgcatgggtgttgcattgactttaatttattgaaaaatacaaatttttgtaaatatcagatcagtgatactggtgttagtgttgtaatcaggttaaacccacttccattaaacttgacaggactatagaaggataatattttttagttcatgaattctacttttcaaatatataaaagctgcaggtggggataaaatctcatacatggattttttcgtgtccgctgtcttgtgtacttttgtacttaaccttgtacagttattttcatctcttgaaacatgaaagaaatgttatgtagatgttctttagaagatctggccatttggtacataatccagcacagataagctgggtggtaatgataataaaaatggttttctc

SEQ ID NO: 108657 - DNA, 792 bp, Homo sapiens
  Payload ID: 1348
  Gene Symbol: RSRC2
  Gene Name: arginine/serine-rich coiled-coil 2
  ENST ID: ENST00000528263
  CDS Start-End: 1-530
gaagaagacatgaatccaaagataaatcctctaagaaacataagtctgaggaacataatgacaaagaacattcttctgataaaggaagagagcgactaaattcatctgaaaatggtgaggacaggcacaaacgcaaagaaagaaagtcatcaagaggcagaagtcactcaagatctaggtctcgtgaaagacgccatcgtagtagaagcagggagcggaagaagtctcgatccaggagtagggagcggaagaaatcgagatccagaagcagagagaggaagaaatcgagatccagaagcagggaaagaaaacggcggatcaggtctcgttcccgctcaagatcaagacacaggcataggactagaagcaggagtaggacaaggagtaggagtcgagatagaaagaagagaattgaaaagccgagaagatttagcagaagtttaagccggactccaagtccacctcccttcagaggcagaaacacagcaatggatgcacaggaagctttagctagaagacaaaatacctgaaacaagaagacggggtctccctatgttgcccaggctggtaacacagtgtaacctgatgtgcttccctgggaacccagcctgacagaaactgcagctgaacagcagcaaaagtgttggaaagggcaaagaaattacaagaacagcgagaaaaggaaatggttgaaaaacaaaaacaacaagaaatagctgcagctgcagctactggaggttctgttctcaatgttgctgccctgttggcatcaggaacacaagtaacacctca

SEQ ID NO: 108658 - DNA, 562 bp, Homo sapiens
  Payload ID: 1348
  Gene Symbol: RSRC2
  Gene Name: arginine/serine-rich coiled-coil 2
  ENST ID: ENST00000528279
  CDS Start-End: 486-562
atttagtctgaggcgaagcttcggagcggccggtactgttgaaagcgacaagtggaggcgccgctctagcggccgggactctgaactatggcggaaggtattgctgaaagggagtgaaaattcaacttaaaaggttgtggaactaccaattctgactgatgcgcggtttccgaagtggcccgtgatgtaatcaatttgaagtccgagaagcgttacacccagagcacatgtgaggagaggcagaccatattttgcagcagcactgtgccaaggggctgttttcattaaagagggttaatgacattaagatgaggttctcacttaggctagtgatacagagcgagatggactagccccagaaaagacatcaccagatagagataagaaaaaagagcagtcagaagtatctgtttctcctagagcttcaaaacatcattattcaagatcacgatcaaggtcaagagaaagaaaacgaaagtcagataatgaaggaagaaaacacaggagccggagcagaagcaaagagcgtgcttatgcgcgaagagactgaactgaagacgct

SEQ ID NO: 108659 - DNA, 545 bp, Homo sapiens
  Payload ID: 1348
  Gene Symbol: RSRC2
  Gene Name: arginine/serine-rich coiled-coil 2
  ENST ID: ENST00000526560
  CDS Start-End: 272-545
atccgggtctctcgcgcgagcgatttagtctgaggcgaagcttcggagcggccggtactgttgaaagcgacaagtggaggcgccgctctagcggccgggactctgaactatggcgataatgaaggaagaaaacacaggagccggagcagaagcaaagagggaagaagacatgaatccaaagataaatcctctaagaaacataagtctgaggaacataatgacaaagaacattcttctgataaaggaagagagcgactaaattcatctgaaaatggtgaggacaggcacaaacgcaaagaaagaaagtcatcaagaggcagaagtcactcaagatctaggtctcgtgaaagacgccatcgtagtagaagcagggagcggaagaagtctcgatccaggagtagggagcggaagaaatcgagatccagaagcagagagaggaagaaatcgagatccagaagcagggaaagaaaacggcggatcaggtctcgttcccgctcaagatcaagacacaggcataggactagaagcaggagtaggacaaggag

SEQ ID NO: 108660 - DNA, 1502 bp, Homo sapiens
  Payload ID: 1349
  Gene Symbol: RSRP1
  Gene Name: arginine/serine-rich protein 1
  Uniprot ID: Q9BUV0
  ENST ID: ENST00000243189
  CDS Start-End: 278-1150
atctctgcgcatgcgccgggggccagcttctggtacttttgacgcgtctgctaacgtagtccctcagtgcgcatccggacgtaggaggtggaggttgtggaattcgccgttcgaaagcagggactaaaagccccacttcgtcttacgttccgaaaggaaggcgtctgttgagcctttctctcagtcgtgagggaggcgtcgacggcgtgcggaagtcctgagttgaggcttgcgggatcctttccggagaaagcgcaggctaaagccgcaggtgaagatgtccaactacgtgaacgacatgtggccgggctcgccgcaggagaaggattcgccctcgacctcgcggtcgggcgggtccagccggctgtcgtcgcggtctaggagccgctctttttccagaagctctcggtcccattcccgcgtctcgagccggttttcgtccaggagtcggaggagcaagtccaggtcccgttcccgaaggcgccaccagcggaagtacaggcgctactcgcggtcatactcgcggagccggtcgcgatcccgcagccgccgttaccgagagaggcgctacgggttcaccaggagatactaccggtctccttcgcggtaccggtcccggtcccgtagcaggtcgcgctctcggggaaggtcgtactgcggaagggcgtacgcgatcgcgcggggacagcgctactacggctttggtcgcacagtgtacccggaggagcacagcagatggagggacagatccaggacgaggtcgcggagcagaaccccctttcgcttaagtgaaaaagatcgaatggagctgttagaaatagcaaaaaccaatgcagcgaaagctctaggaacaaccaacattgacttgccagctagtctcagaactgttccttcagccaaagaaacaagccgtggaataggtgtatcaagtaatggtgcaaagcctgaactgtcggaaaaggtaacagaagatggaactcgaaatcccaatgaaaaacctacccagcaaagaagcatagcttttagctctaataattctgtagcaaagccaatacaaaaatcagctaaagctgccacagaagaggcatcttcaagatcaccaaaaatagatcagaaaaaaagtccatatggactgtggatacctatctaaaagaagaaaactgatggctaagtttgcatgaaaactgcactttattgcaagttagtgtttctagcattatcccatccctttgagccattcaggggtacttgtgcatttaaaaaccaacacaaaaagatgtaaatacttaacactcaaatattaacattttaggtttctcttgcagatatgagagatagcacagatggaccaaaggttatgcacaggtgggagtcttttgtatatagttgtaaatattgtcttggttatgtaaaaatgaaattttttagacacagtaattgaactgtattcctgttttgtatatttaataaatttcttgttttcattcttagtctttattgta

SEQ ID NO: 108661 - DNA, 1954 bp, Homo sapiens
  Payload ID: 1349
  Gene Symbol: RSRP1
  Gene Name: arginine/serine-rich protein 1
  Uniprot ID: Q9BUV0
  ENST ID: ENST00000431849
  CDS Start-End: 205-933
tccggacgtaggaggtggaggttgtggaattcgccgttcgaaagcagggactaaaagccccacttcgtcttacgttccgaaaggaaggcgtctgttgagcctttctctcagtcgtgagggaggcgtcgacggcgtgcggaagtcctgagttgaggcttgcgggatcctttccggagaaagcgcaggctaaagccgcaggtgaagatgtccaactacgtgaacgacatgtggccgggctcgccgcaggagaaggattcgccctcgacctcgcggtcgggcgggtccagccggctgtcgtcgcggtctaggagccgctctttttccagaagctctcggtcccattcccgcgtctcgagccggttttcgtccaggagtcggaggagcaagtccaggtcccgttcccgaaggcgccaccagcggaagtacaggcgctactcgcggtcatactcgcggagccggtcgcgatcccgcagccgccgttaccgagagaggcgctacgggttcaccaggagatactaccggtctccttcgcggtaccggtcccggtcccgtagcaggtcgcgctctcggggaaggtcgtactgcggaagggcgtacgcgatcgcgcggggacagcgctactacggctttggtcgcacagtgtacccggaggagcacagcagatggagggacagatccaggacgaggtcgcggagcagaaccccctttcgcttaagtgaaaaagatcgaatggagctgttagaaatagcaaaaaccaatgcagcgaaagctctaggaacaaccaacattgacttgccagctagtctcagaactgttccttcagccaaagaaacaagccgtggaataggtgtatcaagtaatggtgcaaagcctgaagtaagtattctaggtttgtcggaacaaaactttcagaaagccaactgtcaaatctgattagccacttatatcttagactatactttttgggaagtctagagatgtatataatgtgctaaattcaaagtagcaaatctgaagataggcaatgtcaaacccatgaaaatgggagattaatgagctttatttggccgtgcatggtgcctcatgcctgtaatgaggcagatggcttgagtccaggagttcaagactagcctgggcaatgtggcaaaaccgcgtgtttacaaaaaatacaaaaattagccaggcatggtggtgcatgcctgtagtcccagctgtttgggaggctgaggcaggaggatctttgagcctaggatgctaaggttgcagtgagccaagatggcaccattgcactctagcctgggcagcagagcgagaccctgtctcaaaaaatacatttatttttttcattttcagttaacagtgtactcttataacaccgttattagctggtactttggtgatttctattactagtttttctaagctatttacagagtgtttgtagctttcatttgcagcattatgttcccacaaattctgtactcagcatatacagtatagtttatctgctctatttctgtcttatagaaatcatgaatgtggtctgcagacattgatgaagaaaatctgttggtaattgatacatgggctaaagcatcagaggtttaatttgaagtttatgttcacacactgaaaacttagtttttttgttggtagatccatgtgcatgctagaatttgggacaggcactatttgcataaagtattaaagtcaatttttaaactaagcaaaggtacacgttgtaacggtggggcatctgtgaaaaagatgtccctttcataatatatgcaatatattccagatgttttgagagattacagaagaggaggcctgcttcacttgcagataagtttattataattctccagaaatgtgcaggatgtgcattagcaaattgcactgtacttttcactccagcctgggtgacagagcaagactcccgtctcgggggctt

SEQ ID NO: 108662 - DNA, 824 bp, Homo sapiens
  Payload ID: 1349
  Gene Symbol: RSRP1
  Gene Name: arginine/serine-rich protein 1
  ENST ID: ENST00000566395
  CDS Start-End: 1-253
tcgcacagtgtacccggaggagcacagcagatggagggacagatccaggacgaggtcgcggagcagaaccccctttcgcttaagtgaaaaagatcgaatggagctgttagaaatagcaaaaaccaatgcagcgaaagctctaggaacaaccaacattgacttgccagctagtctcagaactgttccttcagccaaagaaacaagccgtggaataggtgtatcaagtaatggtgcaaagcctgaaaaatcatgaatgtggtctgcagacattgatgaagaaaatctgttgctgtcggaaaaggtaacagaagatggaactcgaaatcccaatgaaaaacctacccagcaaagaagcatagcttttagctctaataattctgtagcaaagccaatacaaaaatcagctaaagctgccacagaagaggcatcttcaagatcaccaaaaatagatcagaaaaaaagtccatatggactgtggatacctatctaaaagaagaaaactgatggctaagtttgcatgaaaactgcactttattgcaagttagtgtttctagcattatcccatccctttgagccattcaggggtacttgtgcatttaaaaaccaacacaaaaagatgtaaatacttaacactcaaatattaacattttaggtttctcttgcagatatgagagatagcacagatggaccaaaggttatgcacaggtgggagtcttttgtatatagttgtaaatattgtcttggttatgtaaaaatgaaattttttagacacagtaattgaactgtattcctgttttgtatatttaataaatttcttgttttca

SEQ ID NO: 108663 - DNA, 629 bp, Homo sapiens
  Payload ID: 1349
  Gene Symbol: RSRP1
  Gene Name: arginine/serine-rich protein 1
  ENST ID: ENST00000568701
  CDS Start-End: 243-629
gtctgcgcatgcccgggcgctgggttcaggggctttccgccgctctgggttcacagctggacgtcgggagtgctagtttggagtacgccatttgagagtaggcgtgagaagttgctctgtgtgctgagcgttctaaaggaaggcgtccgttggccttcgtacccgtcttgattgaggaagtcctgagttgaggcttgcgggatcctttccggagaaagcgcaggctaaagccgcaggtgaagatgtccaactacgtgaacgacatgtggccgggctcgccgcaggagaaggattcgccctcgacctcgcggtcgggcgggtccagccggctgtcgtcgcggtctaggagccgctctttttccagaagctctcggtcccattcccgcgtctcgagccggttttcgtccaggagtcggaggagcaagtccaggtcccgttcccgaaggcgccaccagcggaagtacaggcgctactcgcggtcatactcgcggagccggtcgcgatcccgcagccgccgttaccgagagaggcgctacgggttcaccaggagatactaccggtctccttcgcggtaccggtcccggtcccgtagcaggtcgcgctctcggggaaggtcgtactgcggaagg

SEQ ID NO: 108664 - DNA, 772 bp, Homo sapiens
  Payload ID: 1349
  Gene Symbol: RSRP1
  Gene Name: arginine/serine-rich protein 1
  ENST ID: ENST00000565733
  CDS Start-End: 1-550
ttcgcggtaccggtcccggtcccgtagcaggtcgcgctctcggggaaggtcgtactgcggaagggcgtacgcgatcgcgcggggacagcgctactacggctttggtcgcacagtgtacccggaggagcacagcagatggagggacagatccaggacgaggtcgcggagcagaaccccctttcgcttaagtgaaaaagatcgaatggagctgttagaaatagcaaaaaccaatgcagcgaaagctctaggaacaaccaacattgacttgccagctagtctcagaactgttccttcagccaaagaaacaagccgtggaataggtgtatcaagtaatggtgcaaagcctgaactgtcggaaaaggtaacagaagatggaactcgaaatcccaatgaaaaacctacccagcaaagaagcatagcttttagctctaataattctgtagcaaagccaatacaaaaatcagctaaagctgccacagaagaggcatcttcaagatcaccaaaaatagatcagaaaaaaagtccatatggactgtggatacctatctaaaagaagaaaactgatggctaagtttgcatgaaaactgcactttattgcaagtttctcttgcagatatgagagatagcacagatggaccaaaggttatgcacaggtgggagtcttttgtatatagttgtaaatattgtcttggttatgtaaaaatgaaattttttagacacagtaattgaactgtattcctgttttgtatatttaataaatttcttgttttca

SEQ ID NO: 108665 - DNA, 477 bp, Homo sapiens
  Payload ID: 1349
  Gene Symbol: RSRP1
  Gene Name: arginine/serine-rich protein 1
  ENST ID: ENST00000561867
  CDS Start-End: 190-477
gtccgttggccttcgtacccgtcttgagtgaggtgacgagtgttttctagtactggggtcggccgcgcagccctctcaggggtgggtggcaggaagagtgccgggtcccgcgtggtgcaaaaggaagtcctgagttgaggcttgcgggatcctttccggagaaagcgcaggctaaagccgcaggtgaagatgtccaactacgtgaacgacatgtggccgggctcgccgcaggagaaggattcgccctcgacctcgcggtcgggcgggtccagccggctgtcgtcgcggtctaggagccgctctttttccagaagctctcggtcccattcccgcgtctcgagccggttttcgtccaggagtcggaggagcaagtccaggtcccgttcccgaaggcgccaccagcggaagtacaggcgctactcgcggtcatactcgcggagccggtcgcgatcccgcagccgccgttaccgagagagg

SEQ ID NO: 108666 - DNA, 2013 bp, Homo sapiens
  Payload ID: 1349
  Gene Symbol: RSRP1
  Gene Name: arginine/serine-rich protein 1
  ENST ID: ENST00000568254
  CDS Start-End: 216-896
ctcagtgcgcatccggacgtaggaggtggaggttgtggaattcgccgttcgaaagcagggactaaaagccccacttcgtcttacgttccgaaaggaaggcgtctgttgagcctttctctcagtcgtgagggaggcgtcgacggcgtgcggaagtcctgagttgaggcttgcgggatcctttccggagaaagcgcaggctaaagccgcaggtgaagatgtccaactacgtgaacgacatgtggccgggctcgccgcaggagaaggattcgccctcgacctcgcggtcgggcgggtccagccggctgtcgtcgcggtctaggagccgctctttttccagaagctctcggtcccattcccgcgtctcgagccggttttcgtccaggagtcggaggagcaagtccaggtcccgttcccgaaggcgccaccagcggaagtacaggcgctactcgcggtcatactcgcggagccggtcgcgatcccgcagccgccgttaccgagagaggcgctacgggttcaccaggagatactaccggtctccttcgcggtaccggtcccggtcccgtagcaggtcgcgctctcggggaaggtcgtactgcggaagggcgtacgcgatcgcgcggggacagcgctactacggctttggtcgcacagtgtacccggaggagcacagcagatggagggacagatccaggacgaggtcgcggagcagaaccccctttcgcttaagtgaaaaagatcgaatggagctgttagaaatagcaaaaaccaatgcagcgaaagctctaggaacaaccaacattgacttgccagctagtctcagaactgttccttcagccaaagaaacaagccgtggaataggtgtatcaagtaatggtgcaaagcctgaaatgttttgagagattacagaagaggaggcctgcttcacttgcagataagtttattataattctccagaaatgtgcaggatgtgcattagcaaattgcactgtacttttcactccagcctgggtgacagagcaagactcccgtctcgggggcttaaaaaaaaaaaatgctgtatctaaatgaatctgtgtaattgggcccagatgtgggtttgctcagtattagtagacaaggtctttgttcagacgattaggtgcctaactggcaaatgccttagtttcttaaaacgtattttctgatgtggctttacatttcaaaagtgaacttgattcaacctgagaaaactgattaaaaaattagtttaaatttgccagcagggaagtaaaataattatgggaagagtgtcttaagcctaatattaaatcagttttgttaaggggaaaactcaatagttctgttacttaggctgttagatccaagttgatttttgtgtctacagctaaattttgtttacaattaggctattttttaatataggatttagaaaccaagggtatgtgttttaaaattacactttttcttaacctgtctagctgtcggaaaaggtaacagaagatggaactcgaaatcccaatgaaaaacctacccagcaaagaagcatagcttttagctctaataattctgtagcaaagccaatacaaaaatcagctaaagctgccacagaagaggcatcttcaagatcaccaaaaatagatcagaaaaaaagtccatatggactgtggatacctatctaaaagaagaaaactgatggctaagtttgcatgaaaactgcactttattgcaagttagtgtttctagcattatcccatccctttgagccattcaggggtacttgtgcatttaaaaaccaacacaaaaagatgtaaatacttaacactcaaatattaacattttaggtttctcttgcagatatgagagatagcacagatggaccaaaggttatgcacaggtgggagtcttttgtatatagttgtaaatattgtcttggttatgtaaaaatgaaattttttagacacagtaattgaactgtattcctgttttgtatatttaataaatttcttgttttca

SEQ ID NO: 108667 - DNA, 3034 bp, Homo sapiens
  Payload ID: 1349
  Gene Symbol: RSRP1
  Gene Name: arginine/serine-rich protein 1
  Uniprot ID: Q9BUV0
  ENST ID: ENST00000473314
  CDS Start-End: 1193-1873
ggagtacgccatttgagagtaggcgtgagaagttgctctgtgtgctgagcgttctaaaggaaggcgtccgttggccttcgtacccgtcttgagtgaggtgacgagtgttttctagtactggggtcggccgcgcagccctctcaggggtgggtggcaggaagagtgccgggtcccgcgtggtgcaaaaggtgggttcaggtttgcggccacacagcgctactcaggactttttagtcttgtttattttctccgtgcctgttcccgccccccgcagctccacctctgggagaggggcgggttcagctccaggaggcggggacttcccggcttggcgtggctggggtgtcccgtggaccccagtctcggcgcggtgacccacttatgggacttggcctttctttgttgtttgtttaaggcagggtttctcagcctgggcactactgaggttttgggccggctaattctgtctgggttggggagggtgctgtcccgtgcttcgcaggttgtgtagctgcatcccccgcctctacccagtggatgcaagtagcagccccagtgaaccaaaaatgcccccagactttgccaaatatcccctcccggggaagatcgcctcgcttgagaaccactgttggaggagagcctgggttttcgggaggtaaccgtttacaaaggggagaacggtaagaagccggaagcaacgatgacttagctacgtgaaagacttgcggccgggctcgcccctcttctagaagccgtcagtttgggtctcgcgtctggaatcaccgtcaaggagtcagatccagccccggagagggagcagggtcgaggtctccttgcagaaggcgccaccgcaggaagcacaggcgcaacgtgcggtctccctagcggaggcgctcgcgatcctgcagccgccggtccgggaggtgctcggtagccctccttggtgcctgtccggtagctggtcactctcgggggaaggtcgtgtgcagaagggcacatgcgatcacacagagacggcgttgctgcggctttgacccgatggtgcacccgaaagaacacagagggtgaagggagagatccaggaagtggtcgcggagcagaaccccccttcacttcagttaaaaaggaagtcctgagttgaggcttgcgggatcctttccggagaaagcgcaggctaaagccgcaggtgaagatgtccaactacgtgaacgacatgtggccgggctcgccgcaggagaaggattcgccctcgacctcgcggtcgggcgggtccagccggctgtcgtcgcggtctaggagccgctctttttccagaagctctcggtcccattcccgcgtctcgagccggttttcgtccaggagtcggaggagcaagtccaggtcccgttcccgaaggcgccaccagcggaagtacaggcgctactcgcggtcatactcgcggagccggtcgcgatcccgcagccgccgttaccgagagaggcgctacgggttcaccaggagatactaccggtctccttcgcggtaccggtcccggtcccgtagcaggtcgcgctctcggggaaggtcgtactgcggaagggcgtacgcgatcgcgcggggacagcgctactacggctttggtcgcacagtgtacccggaggagcacagcagatggagggacagatccaggacgaggtcgcggagcagaaccccctttcgcttaagtgaaaaagatcgaatggagctgttagaaatagcaaaaaccaatgcagcgaaagctctaggaacaaccaacattgacttgccagctagtctcagaactgttccttcagccaaagaaacaagccgtggaataggtgtatcaagtaatggtgcaaagcctgaaaaatcatgaatgtggtctgcagacattgatgaagaaaatctgttgatgttttgagagattacagaagaggaggcctgcttcacttgcagataagtttattataattctccagaaatgtgcaggatgtgcattagcaaattgcactgtacttttcactccagcctgggtgacagagcaagactcccgtctcgggggcttaaaaaaaaaaaatgctgtatctaaatgaatctgtgtaattgggcccagatgtgggtttgctcagtattagtagacaaggtctttgttcagacgattaggtgcctaactggcaaatgccttagtttcttaaaacgtattttctgatgtggctttacatttcaaaagtgaacttgattcaacctgagaaaactgattaaaaaattagtttaaatttgccagcagggaagtaaaataattatgggaagagtgtcttaagcctaatattaaatcagttttgttaaggggaaaactcaatagttctgttacttaggctgttagatccaagttgatttttgtgtctacagctaaattttgtttacaattaggctattttttaatataggatttagaaaccaagggtatgtgttttaaaattacactttttcttaacctgtctagctgtcggaaaaggtaacagaagatggaactcgaaatcccaatgaaaaacctacccagcaaagaagcatagcttttagctctaataattctgtagcaaagccaatacaaaaatcagctaaagctgccacagaagaggcatcttcaagatcaccaaaaatagatcagaaaaaaagtccatatggactgtggatacctatctaaaagaagaaaactgatggctaagtttgcatgaaaactgcactttattgcaagttagtgtttctagcattatcccatccctttgagccattcaggggtacttgtgcatttaaaaaccaacacaaaaagatgtaaatacttaacactcaaatattaacattttaggtttctcttgcagatatgagagatagcacagatggaccaaaggttatgcacaggtgggagtcttttgtatatagttgtaaatattgtcttggttatgtaaaaatgaaattttttagacacagtaattgaactgtattcctgttttgtatatttaataaatttcttgttttc

SEQ ID NO: 108668 - DNA, 480 bp, Homo sapiens
  Payload ID: 1349
  Gene Symbol: RSRP1
  Gene Name: arginine/serine-rich protein 1
  ENST ID: ENST00000568996
  CDS Start-End: 212-480
gctttccgccgctctgggttcacagctggacgtcgggagtgctagtttggagtacgccatttgagagtaggcgtgagaagttgctctgtgtgctgagcgttctaaaggaaggcgtccgttggccttcgtacccgtcttgagtgaggaagtcctgagttgaggcttgcgggatcctttccggagaaagcgcaggctaaagccgcaggtgaagatgtccaactacgtgaacgacatgtggccgggctcgccgcaggagaaggattcgccctcgacctcgcggtcgggcgggtccagccggctgtcgtcgcggtctaggagccgctctttttccagaagctctcggtcccattcccgcgtctcgagccggttttcgtccaggagtcggaggagcaagtccaggtcccgttcccgaaggcgccaccagcggaagtacaggcgctactcgcggtcatactcgcggagccggtcgcgatcccgcag

SEQ ID NO: 108669 - DNA, 992 bp, Homo sapiens
  Payload ID: 1350
  Gene Symbol: ARGFX
  Gene Name: arginine-fifty homeobox
  Uniprot ID: A6NJG6
  ENST ID: ENST00000334384
  CDS Start-End: 11-958
ttcagaaaccatgaggaacagaatggccccagagaatccccagccagaccctttcatcaataggaattattccaacatgaaggtgataccaccacaggatccagctagtcccagtttcactctgttatccaagctggagtgcagtggcacggtctcggcttactgcagcctcaacctcccaggttcaactgatcctcccacctcagcctcccgagtagctgcgactacagcaatacggagaaggcataaagaacgtacttctttcacccaccaacagtatgaggagctagaagctctgtttagccagaccatgttcccagatagaaatcttcaggagaaactagctttgagactcgacctaccggagtcaacagtaaaggtttggttcaggaaccggcgattcaaattgaagaagcagcagcagcagcaatcagcaaagcaacgaaaccagatccttccatccaagaagaatgtgcccacctcccccagaacatcccccagtccttatgctttttctcctgtgatttcagatttctacagctcccttccatctcagcccttagacccttccaattgggcatggaactctaccttcactgagagttctaccagtgacttccaaatgcaagatactcagtgggagaggctggtggcctcggttcctgctttgtactctgatgcctatgacatattccaaatcatagaactgtacaatcttcctgatgagaatgagatatccagctcttctttccactgtctgtatcagtatctctcacccacaaagtaccaggtaggaggacagggttcctctctcagcatctttgctggtccagctgtaggcctatctcctgcacaaacctggcccaatatgacaagccaagcctttgaagcctacagtctaacagatagcctggaattccagaaaacctccaatatggtagacttgggatttctctgaccagagtactaataaatatagatcatttagaaaa

SEQ ID NO: 108670 - DNA, 8026 bp, Homo sapiens
  Payload ID: 1351
  Gene Symbol: RERE
  Gene Name: arginine-glutamic acid dipeptide (RE) repeats
  Uniprot ID: Q9P2R6
  ENST ID: ENST00000337907
  CDS Start-End: 636-5336
aaaatcaccatcatcctcagggagccccctcgccctcggaaaacaaaaccagacatgatcctgggctcctgcttctgaaagatctgcccgaccgaggaggagggagcctaggttcaagtcgcaggaaaggtcacggcagggaagccccctcagcccctccgcgtcgcctccccgcgggccgcccctctcggccctgcgccccgcggccccgcagcctccgcgcggcctcccgccccatccccgccactttccccggagctgggccgcgaacacctcactattgatggtgtagcgctttaggggaaggaggtgattgtctaggagtaactgtatgtgcgctcagcaccgggtcacaaccaccgtgggatccacttacagagaagatttgtggagagcttcagcctgtttatggtgttactgagaaaggaattgtggccatttgatataattctggatggaagacctcttatttgtattacattgaattagagcatttttgaaacgttggggttgttggagtggttggattttccctggaattgagtgagaaattcagaagactgaagcccaggcttactgtctacctttcacggaggcctagccgtgagaggacagaagaaggcacgtggcgaatcatgacagcggacaaagacaaagacaaagacaaagagaaggaccgggaccgagaccgggaccgagagagagagaaaagagacaaagcaagagagagtgagaattcaaggccacgccggagctgtaccttggaaggaggagccaaaaattatgctgagagtgatcacagtgaagacgaggacaatgacaacaatagtgccaccgcagaggagtccacgaagaagaataagaagaaaccaccgaaaaaaaagtctcgttatgaaaggacagataccggtgagataacatcctacatcactgaagatgatgtggtctacagaccaggagactgtgtgtatatcgagagtcggaggccaaacacaccgtatttcatctgtagcattcaagacttcaaactggtccacaactcccaggcctgttgcagatctccaactcctgctttgtgtgaccccccagcatgctctctgccggtggcatcacagccaccacagcatctttctgaagccgggagagggcctgtagggagtaagagggaccatctcctcatgaacgtcaaatggtactaccgtcaatctgaggttccagattctgtgtatcagcatttggttcaggatcgacataatgaaaatgactctggaagagaacttgtcattacagacccagttatcaagaaccgagagctcttcatttctgattacgttgacacttaccatgctgctgcccttagagggaagtgtaacatctcccatttttctgacatatttgctgctagagagtttaaagcccgagtggattcatttttctacatattaggatataaccctgagacaaggaggctgaacagtacccagggggagattcgtgtcggtcctagtcatcaggccaaacttccagatctgcaaccatttccttctccagatggtgatacagtgacccaacatgaggaactggtctggatgcctggagttaacgactgtgacctccttatgtacttgagggcagcaaggagcatggcggcatttgcaggaatgtgtgatggaggctctacagaggacggctgtgtcgcagcctctcgggatgacaccactctgaatgcactgaacacactgcatgaaagcggttacgatgctggcaaagccctgcagcgcctggtgaagaagcctgtgcccaagctcatcgagaagtgctggaccgaggacgaagtgaaacgcttcgttaagggactcaggcagtacgggaagaacttcttcagaattagaaaggagctgcttcccaataaggaaacaggggagctgatcaccttctattactattggaagaagacccccgaagcagccagctcccgagcccatcgtaggcaccgcaggcaggccgtgttcaggaggattaagactcgcaccgcgtccacacccgtcaacacaccctccagacccccgtccagtgaattcttggacctaagttcagccagtgaagatgacttcgacagtgaggacagtgagcaggagctgaaggggtacgcctgccgccactgcttcaccaccacctccaaagattggcaccacggaggccgggagaacatcctgctttgcaccgactgtcgcatccacttcaagaaatacggtgagctcccgcccattgagaagcccgtggacccgccaccgtttatgttcaaacccgtcaaggaagaggatgatgggctcagtgggaagcatagcatgaggacacggcggagtcggggctcgatgtcgacactacgcagtggtcggaagaagcagccagccagccctgatggtcgcacctcacccatcaatgaagacatccgctccagcggccggaactcccccagcgctgccagtacctccagcaatgacagtaaagcagagacagtgaagaagtcggccaagaaggtgaaggaggaagcctcttcccctcttaagagtaacaaacgccagcgggagaaggtggcctctgatacggaggaggctgacaggaccagctccaagaagacaaaaacgcaggagatcagcaggcccaactcgccatctgaaggtgagggagagagttcagacagtcgcagcgtcaacgatgagggtagcagtgaccccaaagacatcgaccaggacaatcgcagcacgtccccgagcatccccagcccccaggacaatgagagtgactcggactcgtcagcccagcagcagatgctgcaggcccagcccccagccttgcaggctcccactggggtcaccccagctccctcctcagctcctccagggacccctcagctgcccacgccagggcccacgccctctgccactgcagttcccccacagggctcccccacggcctcccaggcccctaaccagccacaggctcccacagcgcctgttccccacacccacatccaacaggcaccggccttgcacccccagcggccgccctcaccgcatcccccgccgcatccctcgccacatcccccgctgcagcctctgactgggtcggcgggccagccttctgcaccctctcatgcccagcccccactgcacggtcagggcccacccggccctcacagcctgcaggctgggcccctgctgcagcacccaggccccccacagccctttggcctccctccccaggcctcccaaggccaggcccctctggggacctccccagcagcagcgtaccctcacacctccctgcagctgccagcctctcagtcagcgctgcagtcccaacagcctccacgggagcagcccctgccaccagcgcccttggccatgccccacatcaagcccccgcctaccactcccatcccccagctgccggcgccacaggcccacaagcaccctccccacctctcggggccctcacccttctccatgaatgccaacctgcctccccctccagccctgaagcccctgagctccctgtccacacatcaccccccgtcggctcaccccccacccctgcaactcatgcctcagagccagccattgccctcctcgcccgcccagccccccgggctgacccagagccagaacctgcccccgccccctgcctcccacccccctacaggcctccaccaggtggccccccaacccccgtttgctcagcacccctttgtccctggaggccctcctcccatcacccctccgacctgcccctccacctctaccccaccggcgggacctggcacctcggcccagccaccctgctctggtgcggcggcttcaggaggcagcatagcgggggggtcgtcctgcccactccccaccgtccagatcaaggaggaggctctggacgacgctgaggagcctgagagcccccctcccccaccaaggagcccgtccccggagcccactgtggtggacacccccagtcacgccagccagtcagctaggttctacaaacacctggaccggggctacaactcgtgtgcccggacagacctgtacttcatgcctctggccgggtccaagctggccaagaagagggaggaggccattgagaaggccaagcgcgaggctgagcagaaagcccgagaggagcgagagcgggagaaggagaaggagaaggagcgggagcgggagcgagagcgggagcgcgaggcagagcgggcggctaaggcgtccagctcagcgcatgaaggtcgcctcagtgacccacagctcagtggtcctggccacatgcggccatccttcgagccaccaccaaccaccattgctgctgtgcccccctacatcgggcccgacacacctgcccttcggactctgagcgagtacgcccggccccacgtcatgtcgcccaccaaccgcaaccaccccttctacatgccccttaaccccacggaccccctgctggcctaccacatgcctggcctctacaacgtcgaccccaccatccgcgagcgggagctccgggagcgggagatccgagagcgggagatccgagagcgggagctgcgggagaggatgaagccgggcttcgaggtgaagcccccagagctggaccccctgcacccagccgccaaccccatggagcactttgcccggcacagcgccctcaccatccccccgaccgccgggccccacccttttgcttctttccacccgggcctgaaccccttggagagggagagactggccctggcgggcccccagctgcggcccgagatgagctaccctgacagactggcagccgagcgtatccacgcagagcgcatggcatcgctgaccagcgatcccctggcccgactgcagatgttcaacgtgactccgcaccatcaccagcactctcacattcactcccacctccacctccaccagcaggaccccctccaccaaggttcagcaggccccgttcacccgctggtcgaccccctgactgccggtccccacctggctcgcttcccctacccgcctggcactctccccaaccctctgcttggacagcccccacacgagcacgagatgcttcgccacccagttttcggcaccccctacccccgtgacctgcctggggccatcccaccccccatgtcagcagcccaccagctgcaggccatgcatgcccagtcggccgagctgcagagactggccatggagcagcagtggctgcatggacacccccacatgcatggtggccacctaccaagtcaggaagattattacagtcgactgaagaaagaaggtgacaagcagttataagttatttatttgttaacgctggctgtggaaaccccagttcttggggggagaaacaggactttttacataaaataggagctgcaaaagcaaaaagaatatcttctaaagatttctttatatatttaaaaacccacaactaaaaatgtatccacatagtagtgttcgtttgtcgagaggatttcctgagactggtttggatctccctgcatgacagtcccccagaaacttagtgagtcctggactggactgaacatccagaaagcttccctgcaatcttggggtttggctttagttttcttttccttgatttctcagtaggtgctagaatccagttcacacccttcactgtgcgtgcagacacactgacacactccgccacgagtgctccagagcccacgaggcttgcagatcgggggcataggaatttggaatccaagagctataatttttaaaaaaaaaaatcttttattttaatacattgtaggaaatcttcataattggagaaagttctgcagcatggctttttacgtctgtaaataaataattttagaacagcctttttttcttccataaactactattgtgatctattttttccagccatgtcactaattgtgaattcctaccaactattgacagaatacagagttgattttttaataaaaagttatatataattatccctttaattaaagggagcaaaggggcgttccacatggacagaggcttggaccgaggcctggtcacagcagcgagcatccagggtttgcagggacgatgttacagactctgttttctgcctggcgtttcacttgtgtctgctcctagcctgtgctctgccagcagcacagacatctgctccatcagacctcttccattttgcacagggagtgcaggaggtgaatgttcactttctgttctccagtgtcactgttctgtttccacgggatggaaagcgcatgggcctgtgtccattgtagatttccttctagatttctgtgtacacacacttgattgttctggatgaatgtcttttttaatactccgaaaatttcatcatctaagaaaatgattccatacaaataactcagcacacaagtgacccaggacatatgcctgccaaagggatgtgttagaaggctgccttctcatgcgcattgtcacttggatcttgtggtgaggacggccccatctttcttgccacagattgaggccacttttgagcaagggagatcctggagttaagacaggtgttgggggcagcctgtattttaccctaggggcaggtctgcatggtgaccccacattgcactggtaaaccatttgagtcccactcttcatcctggaagtgggaactggagtcccacccacagtgcattcagaaagcatgctgtgtgggggctgcttctcaggaggccaggcccttctgagcggaaccgtcctggagagagcctgccctcgtttccaggctgcagccgtaacgcactttctcccaggctgagggcgggtgttctggggtgtctgccctctgtcggccctgcttcctgccaggacgtggcctcttccgatccttttctctcagacactggaggtctcttctgccattgtgctggtcccatcccaagaattgtaggacagagaccacactgggtcggcggacacaaagtccatccaggacccaggccgcagagggagcaggaagagatgctgatagtttgatctagaaaccagcagctactggctcaaattcaggttctggcgtcaaatagcgacatttccagtttctcttaaaaaccgtgtttggtttcagttgggataggcttgttttgtctgttgaaaatgtttctagttttttttctttcatttttctctcattccatttctgccttaactttagtttgttcacagggaggcaaagctgacatgaaccttttgtcgtgggacttcaggccacattggcttgaaggcattcgtttccttctggggtggggacaggccctcatggcaggcttgttcccgtggctctgagcgaggcctcttcctgctgggctcccagactcctgcatccaggcccccaccttctcggcttctggtttttctttctttttggtagaacacaacatctaccattcagttaaaccttctttatctcctcctttggcatccatttttccaaagaagagtcgagtcctctgaggtctgtgcttgaaagccgtccgaaggcattcttgttagctttgcttttctccccatatcccaaggcgaagcgctgagattcttccatctaaaaaaccctcgacccgaaaccctcaccagataaactacagtttgtttaggaggccctgaccttcatggtgtctttgaagcccaaccactcggtttccttcggattttcctccctttgttcggggtttggtttggctcctctgtgtgtgtccgtatcttgttcggtgtcctcgaggttgagcttcactccactgcggcagaggcagcgtgcacactcggatttgctacgtttctatatatcttgaagctaaatgtatatatgagtagtttgccatgagataacacagtgtaaacagtagacacccagaaatcgtgacttctgtgttctctccatttgagtattttgtaatttttttgaaatatttgtggacataaataaaaccaagctacactacaacccttgg

SEQ ID NO: 108671 - DNA, 6733 bp, Homo sapiens
  Payload ID: 1351
  Gene Symbol: RERE
  Gene Name: arginine-glutamic acid dipeptide (RE) repeats
  ENST ID: ENST00000377464
  CDS Start-End: 156-4052
ggcttaggtcatagcacaagctcagtgaaagctctatgaggtctctgagactgcatgtgcctccattttgagttgttagtgtagaaaagggcagagttttagcagaaagtaaaggttcaggaatccagctagactcaccagagcccgtgttagtcatggatgatccattcagcccctgcaggaggctgaacagtacccagggggagattcgtgtcggtcctagtcatcaggccaaacttccagatctgcaaccatttccttctccagatggtgatacagtgacccaacatgaggaactggtctggatgcctggagttaacgactgtgacctccttatgtacttgagggcagcaaggagcatggcggcatttgcaggaatgtgtgatggaggctctacagaggacggctgtgtcgcagcctctcgggatgacaccactctgaatgcactgaacacactgcatgaaagcggttacgatgctggcaaagccctgcagcgcctggtgaagaagcctgtgcccaagctcatcgagaagtgctggaccgaggacgaagtgaaacgcttcgttaagggactcaggcagtacgggaagaacttcttcagaattagaaaggagctgcttcccaataaggaaacaggggagctgatcaccttctattactattggaagaagacccccgaagcagccagctcccgagcccatcgtaggcaccgcaggcaggccgtgttcaggaggattaagactcgcaccgcgtccacacccgtcaacacaccctccagacccccgtccagtgaattcttggacctaagttcagccagtgaagatgacttcgacagtgaggacagtgagcaggagctgaaggggtacgcctgccgccactgcttcaccaccacctccaaagattggcaccacggaggccgggagaacatcctgctttgcaccgactgtcgcatccacttcaagaaatacggtgagctcccgcccattgagaagcccgtggacccgccaccgtttatgttcaaacccgtcaaggaagaggatgatgggctcagtgggaagcatagcatgaggacacggcggagtcggggctcgatgtcgacactacgcagtggtcggaagaagcagccagccagccctgatggtcgcacctcacccatcaatgaagacatccgctccagcggccggaactcccccagcgctgccagtacctccagcaatgacagtaaagcagagacagtgaagaagtcggccaagaaggtgaaggaggaagcctcttcccctcttaagagtaacaaacgccagcgggagaaggtggcctctgatacggaggaggctgacaggaccagctccaagaagacaaaaacgcaggagatcagcaggcccaactcgccatctgaaggtgagggagagagttcagacagtcgcagcgtcaacgatgagggtagcagtgaccccaaagacatcgaccaggacaatcgcagcacgtccccgagcatccccagcccccaggacaatgagagtgactcggactcgtcagcccagcagcagatgctgcaggcccagcccccagccttgcaggctcccactggggtcaccccagctccctcctcagctcctccagggacccctcagctgcccacgccagggcccacgccctctgccactgcagttcccccacagggctcccccacggcctcccaggcccctaaccagccacaggctcccacagcgcctgttccccacacccacatccaacaggcaccggccttgcacccccagcggccgccctcaccgcatcccccgccgcatccctcgccacatcccccgctgcagcctctgactgggtcggcgggccagccttctgcaccctctcatgcccagcccccactgcacggtcagggcccacccggccctcacagcctgcaggctgggcccctgctgcagcacccaggccccccacagccctttggcctccctccccaggcctcccaaggccaggcccctctggggacctccccagcagcagcgtaccctcacacctccctgcagctgccagcctctcagtcagcgctgcagtcccaacagcctccacgggagcagcccctgccaccagcgcccttggccatgccccacatcaagcccccgcctaccactcccatcccccagctgccggcgccacaggcccacaagcaccctccccacctctcggggccctcacccttctccatgaatgccaacctgcctccccctccagccctgaagcccctgagctccctgtccacacatcaccccccgtcggctcaccccccacccctgcaactcatgcctcagagccagccattgccctcctcgcccgcccagccccccgggctgacccagagccagaacctgcccccgccccctgcctcccacccccctacaggcctccaccaggtggccccccaacccccgtttgctcagcacccctttgtccctggaggccctcctcccatcacccctccgacctgcccctccacctctaccccaccggcgggacctggcacctcggcccagccaccctgctctggtgcggcggcttcaggaggcagcatagcgggggggtcgtcctgcccactccccaccgtccagatcaaggaggaggctctggacgacgctgaggagcctgagagcccccctcccccaccaaggagcccgtccccggagcccactgtggtggacacccccagtcacgccagccagtcagctaggttctacaaacacctggaccggggctacaactcgtgtgcccggacagacctgtacttcatgcctctggccgggtccaagctggccaagaagagggaggaggccattgagaaggccaagcgcgaggctgagcagaaagcccgagaggagcgagagcgggagaaggagaaggagaaggagcgggagcgggagcgagagcgggagcgcgaggcagagcgggcggctaaggcgtccagctcagcgcatgaaggtcgcctcagtgacccacagctcagtggtcctggccacatgcggccatccttcgagccaccaccaaccaccattgctgctgtgcccccctacatcgggcccgacacacctgcccttcggactctgagcgagtacgcccggccccacgtcatgtcgcccaccaaccgcaaccaccccttctacatgccccttaaccccacggaccccctgctggcctaccacatgcctggcctctacaacgtcgaccccaccatccgcgagcgggagctccgggagcgggagatccgagagcgggagatccgagagcgggagctgcgggagaggatgaagccgggcttcgaggtgaagcccccagagctggaccccctgcacccagccgccaaccccatggagcactttgcccggcacagcgccctcaccatccccccgaccgccgggccccacccttttgcttctttccacccgggcctgaaccccttggagagggagagactggccctggcgggcccccagctgcggcccgagatgagctaccctgacagactggcagccgagcgtatccacgcagagcgcatggcatcgctgaccagcgatcccctggcccgactgcagatgttcaacgtgactccgcaccatcaccagcactctcacattcactcccacctccacctccaccagcaggaccccctccaccaaggttcagcaggccccgttcacccgctggtcgaccccctgactgccggtccccacctggctcgcttcccctacccgcctggcactctccccaaccctctgcttggacagcccccacacgagcacgagatgcttcgccacccagttttcggcaccccctacccccgtgacctgcctggggccatcccaccccccatgtcagcagcccaccagctgcaggccatgcatgcccagtcggccgagctgcagagactggccatggagcagcagtggctgcatggacacccccacatgcatggtggccacctaccaagtcaggaagattattacagtcgactgaagaaagaaggtgacaagcagttataagttatttatttgttaacgctggctgtggaaaccccagttcttggggggagaaacaggactttttacataaaataggagctgcaaaagcaaaaagaatatcttctaaagatttctttatatatttaaaaacccacaactaaaaatgtatccacatagtagtgttcgtttgtcgagaggatttcctgagactggtttggatctccctgcatgacagtcccccagaaacttagtgagtcctggactggactgaacatccagaaagcttccctgcaatcttggggtttggctttagttttcttttccttgatttctcagtaggtgctagaatccagttcacacccttcactgtgcgtgcagacacactgacacactccgccacgagtgctccagagcccacgaggcttgcagatcgggggcataggaatttggaatccaagagctataatttttaaaaaaaaaaatcttttattttaatacattgtaggaaatcttcataattggagaaagttctgcagcatggctttttacgtctgtaaataaataattttagaacagcctttttttcttccataaactactattgtgatctattttttccagccatgtcactaattgtgaattcctaccaactattgacagaatacagagttgattttttaataaaaagttatatataattatccctttaattaaagggagcaaaggggcgttccacatggacagaggcttggaccgaggcctggtcacagcagcgagcatccagggtttgcagggacgatgttacagactctgttttctgcctggcgtttcacttgtgtctgctcctagcctgtgctctgccagcagcacagacatctgctccatcagacctcttccattttgcacagggagtgcaggaggtgaatgttcactttctgttctccagtgtcactgttctgtttccacgggatggaaagcgcatgggcctgtgtccattgtagatttccttctagatttctgtgtacacacacttgattgttctggatgaatgtcttttttaatactccgaaaatttcatcatctaagaaaatgattccatacaaataactcagcacacaagtgacccaggacatatgcctgccaaagggatgtgttagaaggctgccttctcatgcgcattgtcacttggatcttgtggtgaggacggccccatctttcttgccacagattgaggccacttttgagcaagggagatcctggagttaagacaggtgttgggggcagcctgtattttaccctaggggcaggtctgcatggtgaccccacattgcactggtaaaccatttgagtcccactcttcatcctggaagtgggaactggagtcccacccacagtgcattcagaaagcatgctgtgtgggggctgcttctcaggaggccaggcccttctgagcggaaccgtcctggagagagcctgccctcgtttccaggctgcagccgtaacgcactttctcccaggctgagggcgggtgttctggggtgtctgccctctgtcggccctgcttcctgccaggacgtggcctcttccgatccttttctctcagacactggaggtctcttctgccattgtgctggtcccatcccaagaattgtaggacagagaccacactgggtcggcggacacaaagtccatccaggacccaggccgcagagggagcaggaagagatgctgatagtttgatctagaaaccagcagctactggctcaaattcaggttctggcgtcaaatagcgacatttccagtttctcttaaaaaccgtgtttggtttcagttgggataggcttgttttgtctgttgaaaatgtttctagttttttttctttcatttttctctcattccatttctgccttaactttagtttgttcacagggaggcaaagctgacatgaaccttttgtcgtgggacttcaggccacattggcttgaaggcattcgtttccttctggggtggggacaggccctcatggcaggcttgttcccgtggctctgagcgaggcctcttcctgctgggctcccagactcctgcatccaggcccccaccttctcggcttctggtttttctttctttttggtagaacacaacatctaccattcagttaaaccttctttatctcctcctttggcatccatttttccaaagaagagtcgagtcctctgaggtctgtgcttgaaagccgtccgaaggcattcttgttagctttgcttttctccccatatcccaaggcgaagcgctgagattcttccatctaaaaaaccctcgacccgaaaccctcaccagataaactacagtttgtttaggaggccctgaccttcatggtgtctttgaagcccaaccactcggtttccttcggattttcctccctttgttcggggtttggtttggctcctctgtgtgtgtccgtatcttgttcggtgtcctcgaggttgagcttcactccactgcggcagaggcagcgtgcacactcggatttgctacgtttctatatatcttgaagctaaatgtatatatgagtagtttgccatgagataacacagtgtaaacagtagacacccagaaatcgtgacttctgtgttctctccatttgagtattttgtaatttttttgaaatatttgtggacataaataaaaccaagctacactac

SEQ ID NO: 108672 - DNA, 2973 bp, Homo sapiens
  Payload ID: 1351
  Gene Symbol: RERE
  Gene Name: arginine-glutamic acid dipeptide (RE) repeats
  ENST ID: ENST00000400907
  CDS Start-End: 75-1829
tgaagcccaggcttactgtctacctttcacggaggcctagccgtgagaggacagaagaaggcacgtggcgaatcatgacagcggacaaagacaaagacaaagacaaagagaaggaccgggaccgagaccgggaccgagagagagagaaaagagacaaagcaagagagagtgagaattcaaggccacgccggagctgtaccttggaaggaggagccaaaaattatgctgagagtgatcacagtgaagacgaggacaatgacaacaatagtgccaccgcagaggagtccacgaagaagaataagaagaaaccaccgaaaaaaaagtctcgttatgaaaggacagataccggtgagataacatcctacatcactgaagatgatgtggtctacagaccaggagactgtgtgtatatcgagagtcggaggccaaacacaccgtatttcatctgtagcattcaagacttcaaactggtccacaactcccaggcctgttgcagatctccaactcctgctttgtgtgaccccccagcatgctctctgccggtggcatcacagccaccacagcatctttctgaagccgggagagggcctgtagggagtaagagggaccatctcctcatgaacgtcaaatggtactaccgtcaatctgaggttccagattctgtgtatcagcatttggttcaggatcgacataatgaaaatgactctggaagagaacttgtcattacagacccagttatcaagaaccgagagctcttcatttctgattacgttgacacttaccatgctgctgcccttagagggaagtgtaacatctcccatttttctgacatatttgctgctagagagtttaaagcccgagtggattcatttttctacatattaggatataaccctgagacaaggaggctgaacagtacccagggggagattcgtgtcggtcctagtcatcaggccaaacttccagatctgcaaccatttccttctccagatggtgatacagtgacccaacatgaggaactggtctggatgcctggagttaacgactgtgacctccttatgtacttgagggcagcaaggagcatggcggcatttgcaggaatgtgtgatggaggctctacagaggacggctgtgtcgcagcctctcgggatgacaccactctgaatgcactgaacacactgcatgaaagcggttacgatgctggcaaagccctgcagcgcctggtgaagaagcctgtgcccaagctcatcgagaagtgctggaccgaggacgaagtgaaacgcttcgttaagggactcaggcagtacgggaagaacttcttcagaattagaaaggagctgcttcccaataaggaaacaggggagctgatcaccttctattactattggaagaagacccccgaagcagccagctcccgagcccatcgtaggcaccgcaggcaggccgtgttcaggaggattaagactcgcaccgcgtccacacccgtcaacacaccctccagacccccgtccagtgaattcttggacctaagttcagccagtgaagatgacttcgacagtgaggacagtgagcaggagctgaaggggtacgcctgccgccactgcttcaccaccagcaccccctacccccgtgacctgcctggggccatcccaccccccatgtcagcagcccaccagctgcaggccatgcatgcccagtcggccgagctgcagagactggccatggagcagcagtggctgcatggacacccccacatgcatggtggccacctaccaagtcaggaagattattacagtcgactgaagaaagaaggtgacaagcagttataagttatttatttgttaacgctggctgtggaaaccccagttcttggggggagaaacaggactttttacataaaataggagctgcaaaagcaaaaagaatatcttctaaagatttctttatatatttaaaaacccacaactaaaaatgtatccacatagtagtgttcgtttgtcgagaggatttcctgagactggtttggatctccctgcatgacagtcccccagaaacttagtgagtcctggactggactgaacatccagaaagcttccctgcaatcttggggtttggctttagttttcttttccttgatttctcagtaggtgctagaatccagttcacacccttcactgtgcgtgcagacacactgacacactccgccacgagtgctccagagcccacgaggcttgcagatcgggggcataggaatttggaatccaagagctataatttttaaaaaaaaaaatcttttattttaatacattgtaggaaatcttcataattggagaaagttctgcagcatggctttttacgtctgtaaataaataattttagaacagcctttttttcttccataaactactattgtgatctattttttccagccatgtcactaattgtgaattcctaccaactattgacagaatacagagttgattttttaataaaaagttatatataattatccctttaattaaagggagcaaaggggcgttccacatggacagaggcttggaccgaggcctggtcacagcagcgagcatccagggtttgcagggacgatgttacagactctgttttctgcctggcgtttcacttgtgtctgctcctagcctgtgctctgccagcagcacagacatctgctccatcagacctcttccattttgcacagggagtgcaggaggtgaatgttcactttctgttctccagtgtcactgttctgtttccacgggatggaaagcgcatgggcctgtgtccattgtagatttccttctagatttctgtgtacacacacttgattgttctggatgaatgtcttttttaatactccgaaaatttcatcatctaagaaaatgattccatacaaataactcagcacacaagtgacccaggacatatgcctgccaaagggatgtgttagaaggctgc

SEQ ID NO: 108673 - DNA, 5790 bp, Homo sapiens
  Payload ID: 1351
  Gene Symbol: RERE
  Gene Name: arginine-glutamic acid dipeptide (RE) repeats
  Uniprot ID: Q9P2R6
  ENST ID: ENST00000400908
  CDS Start-End: 629-5329
cacagacgctcgcgagcaaccctccgcgctccggagcctcctcagcctcccgcacaccccgagacgctcgccccgctgggcctcggtccccgcctcctcccccgtccttttcccctctctcgctccccacattgtctctgcctcattttctctcctagttgaggattaaaaaaaaaaaaaaatcaccatcatcctcagggagccccctcgccctcggaaaacaaaaccagacatgatcctgggctcctgcttctgaaagatctgcccgaccgaggaggagggagcctaggttcaagtcgcaggaaaggtcacggcagggaagccccctcagcccctccgcgtcgcctccccgcgggccgcccctctcggccctgcgccccgcggccccgcagcctccgcgcggcctcccgccccatccccgccactttccccggagctgggccgcgaacacctcactattgatggtgtagcgctttaggggaagcatttttgaaacgttggggttgttggagtggttggattttccctggaattgagtgagaaattcagaagactgaagcccaggcttactgtctacctttcacggaggcctagccgtgagaggacagaagaaggcacgtggcgaatcatgacagcggacaaagacaaagacaaagacaaagagaaggaccgggaccgagaccgggaccgagagagagagaaaagagacaaagcaagagagagtgagaattcaaggccacgccggagctgtaccttggaaggaggagccaaaaattatgctgagagtgatcacagtgaagacgaggacaatgacaacaatagtgccaccgcagaggagtccacgaagaagaataagaagaaaccaccgaaaaaaaagtctcgttatgaaaggacagataccggtgagataacatcctacatcactgaagatgatgtggtctacagaccaggagactgtgtgtatatcgagagtcggaggccaaacacaccgtatttcatctgtagcattcaagacttcaaactggtccacaactcccaggcctgttgcagatctccaactcctgctttgtgtgaccccccagcatgctctctgccggtggcatcacagccaccacagcatctttctgaagccgggagagggcctgtagggagtaagagggaccatctcctcatgaacgtcaaatggtactaccgtcaatctgaggttccagattctgtgtatcagcatttggttcaggatcgacataatgaaaatgactctggaagagaacttgtcattacagacccagttatcaagaaccgagagctcttcatttctgattacgttgacacttaccatgctgctgcccttagagggaagtgtaacatctcccatttttctgacatatttgctgctagagagtttaaagcccgagtggattcatttttctacatattaggatataaccctgagacaaggaggctgaacagtacccagggggagattcgtgtcggtcctagtcatcaggccaaacttccagatctgcaaccatttccttctccagatggtgatacagtgacccaacatgaggaactggtctggatgcctggagttaacgactgtgacctccttatgtacttgagggcagcaaggagcatggcggcatttgcaggaatgtgtgatggaggctctacagaggacggctgtgtcgcagcctctcgggatgacaccactctgaatgcactgaacacactgcatgaaagcggttacgatgctggcaaagccctgcagcgcctggtgaagaagcctgtgcccaagctcatcgagaagtgctggaccgaggacgaagtgaaacgcttcgttaagggactcaggcagtacgggaagaacttcttcagaattagaaaggagctgcttcccaataaggaaacaggggagctgatcaccttctattactattggaagaagacccccgaagcagccagctcccgagcccatcgtaggcaccgcaggcaggccgtgttcaggaggattaagactcgcaccgcgtccacacccgtcaacacaccctccagacccccgtccagtgaattcttggacctaagttcagccagtgaagatgacttcgacagtgaggacagtgagcaggagctgaaggggtacgcctgccgccactgcttcaccaccacctccaaagattggcaccacggaggccgggagaacatcctgctttgcaccgactgtcgcatccacttcaagaaatacggtgagctcccgcccattgagaagcccgtggacccgccaccgtttatgttcaaacccgtcaaggaagaggatgatgggctcagtgggaagcatagcatgaggacacggcggagtcggggctcgatgtcgacactacgcagtggtcggaagaagcagccagccagccctgatggtcgcacctcacccatcaatgaagacatccgctccagcggccggaactcccccagcgctgccagtacctccagcaatgacagtaaagcagagacagtgaagaagtcggccaagaaggtgaaggaggaagcctcttcccctcttaagagtaacaaacgccagcgggagaaggtggcctctgatacggaggaggctgacaggaccagctccaagaagacaaaaacgcaggagatcagcaggcccaactcgccatctgaaggtgagggagagagttcagacagtcgcagcgtcaacgatgagggtagcagtgaccccaaagacatcgaccaggacaatcgcagcacgtccccgagcatccccagcccccaggacaatgagagtgactcggactcgtcagcccagcagcagatgctgcaggcccagcccccagccttgcaggctcccactggggtcaccccagctccctcctcagctcctccagggacccctcagctgcccacgccagggcccacgccctctgccactgcagttcccccacagggctcccccacggcctcccaggcccctaaccagccacaggctcccacagcgcctgttccccacacccacatccaacaggcaccggccttgcacccccagcggccgccctcaccgcatcccccgccgcatccctcgccacatcccccgctgcagcctctgactgggtcggcgggccagccttctgcaccctctcatgcccagcccccactgcacggtcagggcccacccggccctcacagcctgcaggctgggcccctgctgcagcacccaggccccccacagccctttggcctccctccccaggcctcccaaggccaggcccctctggggacctccccagcagcagcgtaccctcacacctccctgcagctgccagcctctcagtcagcgctgcagtcccaacagcctccacgggagcagcccctgccaccagcgcccttggccatgccccacatcaagcccccgcctaccactcccatcccccagctgccggcgccacaggcccacaagcaccctccccacctctcggggccctcacccttctccatgaatgccaacctgcctccccctccagccctgaagcccctgagctccctgtccacacatcaccccccgtcggctcaccccccacccctgcaactcatgcctcagagccagccattgccctcctcgcccgcccagccccccgggctgacccagagccagaacctgcccccgccccctgcctcccacccccctacaggcctccaccaggtggccccccaacccccgtttgctcagcacccctttgtccctggaggccctcctcccatcacccctccgacctgcccctccacctctaccccaccggcgggacctggcacctcggcccagccaccctgctctggtgcggcggcttcaggaggcagcatagcgggggggtcgtcctgcccactccccaccgtccagatcaaggaggaggctctggacgacgctgaggagcctgagagcccccctcccccaccaaggagcccgtccccggagcccactgtggtggacacccccagtcacgccagccagtcagctaggttctacaaacacctggaccggggctacaactcgtgtgcccggacagacctgtacttcatgcctctggccgggtccaagctggccaagaagagggaggaggccattgagaaggccaagcgcgaggctgagcagaaagcccgagaggagcgagagcgggagaaggagaaggagaaggagcgggagcgggagcgagagcgggagcgcgaggcagagcgggcggctaaggcgtccagctcagcgcatgaaggtcgcctcagtgacccacagctcagtggtcctggccacatgcggccatccttcgagccaccaccaaccaccattgctgctgtgcccccctacatcgggcccgacacacctgcccttcggactctgagcgagtacgcccggccccacgtcatgtcgcccaccaaccgcaaccaccccttctacatgccccttaaccccacggaccccctgctggcctaccacatgcctggcctctacaacgtcgaccccaccatccgcgagcgggagctccgggagcgggagatccgagagcgggagatccgagagcgggagctgcgggagaggatgaagccgggcttcgaggtgaagcccccagagctggaccccctgcacccagccgccaaccccatggagcactttgcccggcacagcgccctcaccatccccccgaccgccgggccccacccttttgcttctttccacccgggcctgaaccccttggagagggagagactggccctggcgggcccccagctgcggcccgagatgagctaccctgacagactggcagccgagcgtatccacgcagagcgcatggcatcgctgaccagcgatcccctggcccgactgcagatgttcaacgtgactccgcaccatcaccagcactctcacattcactcccacctccacctccaccagcaggaccccctccaccaaggttcagcaggccccgttcacccgctggtcgaccccctgactgccggtccccacctggctcgcttcccctacccgcctggcactctccccaaccctctgcttggacagcccccacacgagcacgagatgcttcgccacccagttttcggcaccccctacccccgtgacctgcctggggccatcccaccccccatgtcagcagcccaccagctgcaggccatgcatgcccagtcggccgagctgcagagactggccatggagcagcagtggctgcatggacacccccacatgcatggtggccacctaccaagtcaggaagattattacagtcgactgaagaaagaaggtgacaagcagttataagttatttatttgttaacgctggctgtggaaaccccagttcttggggggagaaacaggactttttacataaaataggagctgcaaaagcaaaaagaatatcttctaaagatttctttatatatttaaaaacccacaactaaaaatgtatccacatagtagtgttcgtttgtcgagaggatttcctgagactggtttggatctccctgcatgacagtcccccagaaacttagtgagtcctggactggactgaacatccagaaagcttccctgcaatcttggggtttggctttagttttcttttccttgatttctcagtaggtgctagaatccagttcacacccttcactgtgcgtgcagacacactgacacactccgccacgagtgctccagagcccacgaggcttgcagatcgggggcataggaatttggaatccaagagctataatttttaaaaaaaaaaa

SEQ ID NO: 108674 - DNA, 4598 bp, Homo sapiens
  Payload ID: 1351
  Gene Symbol: RERE
  Gene Name: arginine-glutamic acid dipeptide (RE) repeats
  Uniprot ID: Q9P2R6
  ENST ID: ENST00000476556
  CDS Start-End: 566-3604
gagccggagcccagtgacaggcgacggcctcttgccgccccggaccccgggcgcttacctgtggctgctggggtcggccgcccgggaccaggctgggagccccgagaaacgcttcgttaagggactcaggcagtacgggaagaacttcttcagaattagaaaggagctgcttcccaataaggaaacaggggagctgatcaccttctattactattggaagaagacccccgaagcagccagctcccgagcccatcgtaggcaccgcaggcaggccgtgttcaggaggattaagactcgcaccgcgtccacacccgtcaacacaccctccagacccccgtccagtgaattcttggacctaagttcagccagtgaagatgacttcgacagtgaggacagtgagcaggagctgaaggggtacgcctgccgccactgcttcaccaccacctccaaagattggcaccacggaggccgggagaacatcctgctttgcaccgactgtcgcatccacttcaagaaatacggtgagctcccgcccattgagaagcccgtggacccgccaccgtttatgttcaaacccgtcaaggaagaggatgatgggctcagtgggaagcatagcatgaggacacggcggagtcggggctcgatgtcgacactacgcagtggtcggaagaagcagccagccagccctgatggtcgcacctcacccatcaatgaagacatccgctccagcggccggaactcccccagcgctgccagtacctccagcaatgacagtaaagcagagacagtgaagaagtcggccaagaaggtgaaggaggaagcctcttcccctcttaagagtaacaaacgccagcgggagaaggtggcctctgatacggaggaggctgacaggaccagctccaagaagacaaaaacgcaggagatcagcaggcccaactcgccatctgaaggtgagggagagagttcagacagtcgcagcgtcaacgatgagggtagcagtgaccccaaagacatcgaccaggacaatcgcagcacgtccccgagcatccccagcccccaggacaatgagagtgactcggactcgtcagcccagcagcagatgctgcaggcccagcccccagccttgcaggctcccactggggtcaccccagctccctcctcagctcctccagggacccctcagctgcccacgccagggcccacgccctctgccactgcagttcccccacagggctcccccacggcctcccaggcccctaaccagccacaggctcccacagcgcctgttccccacacccacatccaacaggcaccggccttgcacccccagcggccgccctcaccgcatcccccgccgcatccctcgccacatcccccgctgcagcctctgactgggtcggcgggccagccttctgcaccctctcatgcccagcccccactgcacggtcagggcccacccggccctcacagcctgcaggctgggcccctgctgcagcacccaggccccccacagccctttggcctccctccccaggcctcccaaggccaggcccctctggggacctccccagcagcagcgtaccctcacacctccctgcagctgccagcctctcagtcagcgctgcagtcccaacagcctccacgggagcagcccctgccaccagcgcccttggccatgccccacatcaagcccccgcctaccactcccatcccccagctgccggcgccacaggcccacaagcaccctccccacctctcggggccctcacccttctccatgaatgccaacctgcctccccctccagccctgaagcccctgagctccctgtccacacatcaccccccgtcggctcaccccccacccctgcaactcatgcctcagagccagccattgccctcctcgcccgcccagccccccgggctgacccagagccagaacctgcccccgccccctgcctcccacccccctacaggcctccaccaggtggccccccaacccccgtttgctcagcacccctttgtccctggaggccctcctcccatcacccctccgacctgcccctccacctctaccccaccggcgggacctggcacctcggcccagccaccctgctctggtgcggcggcttcaggaggcagcatagcgggggggtcgtcctgcccactccccaccgtccagatcaaggaggaggctctggacgacgctgaggagcctgagagcccccctcccccaccaaggagcccgtccccggagcccactgtggtggacacccccagtcacgccagccagtcagctaggttctacaaacacctggaccggggctacaactcgtgtgcccggacagacctgtacttcatgcctctggccgggtccaagctggccaagaagagggaggaggccattgagaaggccaagcgcgaggctgagcagaaagcccgagaggagcgagagcgggagaaggagaaggagaaggagcgggagcgggagcgagagcgggagcgcgaggcagagcgggcggctaaggcgtccagctcagcgcatgaaggtcgcctcagtgacccacagctcagtggtcctggccacatgcggccatccttcgagccaccaccaaccaccattgctgctgtgcccccctacatcgggcccgacacacctgcccttcggactctgagcgagtacgcccggccccacgtcatgtcgcccaccaaccgcaaccaccccttctacatgccccttaaccccacggaccccctgctggcctaccacatgcctggcctctacaacgtcgaccccaccatccgcgagcgggagctccgggagcgggagatccgagagcgggagatccgagagcgggagctgcgggagaggatgaagccgggcttcgaggtgaagcccccagagctggaccccctgcacccagccgccaaccccatggagcactttgcccggcacagcgccctcaccatccccccgaccgccgggccccacccttttgcttctttccacccgggcctgaaccccttggagagggagagactggccctggcgggcccccagctgcggcccgagatgagctaccctgacagactggcagccgagcgtatccacgcagagcgcatggcatcgctgaccagcgatcccctggcccgactgcagatgttcaacgtgactccgcaccatcaccagcactctcacattcactcccacctccacctccaccagcaggaccccctccaccaaggttcagcaggccccgttcacccgctggtcgaccccctgactgccggtccccacctggctcgcttcccctacccgcctggcactctccccaaccctctgcttggacagcccccacacgagcacgagatgcttcgccacccagttttcggcaccccctacccccgtgacctgcctggggccatcccaccccccatgtcagcagcccaccagctgcaggccatgcatgcccagtcggccgagctgcagagactggccatggagcagcagtggctgcatggacacccccacatgcatggtggccacctaccaagtcaggaagattattacagtcgactgaagaaagaaggtgacaagcagttataagttatttatttgttaacgctggctgtggaaaccccagttcttggggggagaaacaggactttttacataaaataggagctgcaaaagcaaaaagaatatcttctaaagatttctttatatatttaaaaacccacaactaaaaatgtatccacatagtagtgttcgtttgtcgagaggatttcctgagactggtttggatctccctgcatgacagtcccccagaaacttagtgagtcctggactggactgaacatccagaaagcttccctgcaatcttggggtttggctttagttttcttttccttgatttctcagtaggtgctagaatccagttcacacccttcactgtgcgtgcagacacactgacacactccgccacgagtgctccagagcccacgaggcttgcagatcgggggcataggaatttggaatccaagagctataatttttaaaaaaaaaaatcttttattttaatacattgtaggaaatcttcataattggagaaagttctgcagcatggctttttacgtctgtaaataaataattttagaacagcctttttttcttccataaactactattgtgatctattttttccagccatgtcactaattgtgaattcctaccaactattgacagaatacagagttgattttttaataaaaagttatatataattatccctttaattaaagggagcaaaggggcgttccacatggacagaggcttggaccgaggcctggtcacagcagcgagcatccagggtttgcagggacgatgttacagactctgttttctgcctggcgtttcacttgtgtctgctcctagcctgtgctctgccagcagcacagacatctgctccatcagacctcttccattttgcacagggagtgcaggaggtgaatgttcactttctgttctccagtgtcactgttctgtttccacgggatggaaagcgcatgggcctgtgtccattgtagatttccttctagat

SEQ ID NO: 108675 - DNA, 273 bp, Homo sapiens
  Payload ID: 1351
  Gene Symbol: RERE
  Gene Name: arginine-glutamic acid dipeptide (RE) repeats
  ENST ID: ENST00000514428
  CDS Start-End: 1-273
actgtgtgtatatcgagagtcggaggccaaacacaccgtatttcatctgtagcattcaagacttcaaactgagtaagagggaccatctcctcatgaacgtcaaatggtactaccgtcaatctgaggttccagattctgtgtatcagcatttggttcaggatcgacataatgaaaatgactctggaagagaacttgtcattacagacccagttatcaagaaccgagagctcttcatttctgattacgttgacacttaccatgctgctgccctta

SEQ ID NO: 108676 - DNA, 533 bp, Homo sapiens
  Payload ID: 1351
  Gene Symbol: RERE
  Gene Name: arginine-glutamic acid dipeptide (RE) repeats
  ENST ID: ENST00000505225
  CDS Start-End: 1-533
atgtcgacactacgcagtggtcggaagaagcagccagccagccctgatggtcgcacctcacccatcaatgaagacatccgctccagcggccggaactcccccagcgctgccagtacctccagcaatgacagtaaagcagagacagtgaagaagtcggccaagaaggtgaaggaggaagcctcttcccctcttaagagtaacaaacgccagcgggagaaggtggcctctgatacggaggaggctgacaggaccagctccaagaagacaaaaacgcaggagatcagcaggcccaactcgccatctgaaggttcagcaggccccgttcacccgctggtcgaccccctgactgccggtccccacctggctcgcttcccctacccgcctggcactctccccaaccctctgcttggacagcccccacacgagcacgagatgcttcgccacccagttttcggcaccccctacccccgtgacctgcctggggccatcccaccccccatgtcagcagcccaccagctgcaggccatgcatgc

SEQ ID NO: 108677 - DNA, 743 bp, Homo sapiens
  Payload ID: 1351
  Gene Symbol: RERE
  Gene Name: arginine-glutamic acid dipeptide (RE) repeats
  ENST ID: ENST00000464972
  CDS Start-End: 477-743
cgtggagagacagtgtgtggatgagggagggtcacagcacatgctcagtcctgtcagagtgaggggaagtttctgcgttctgcgtgaaggcttaggtcatagcacaagctcagtgaaagctctatgaggtctctgagactgcatgtgcctccattttgagttgttagtgtagaaaagggcagagttttagcagaaagtaaaggttcaggaatccagctagactcaccagagcccgtgttagtcatggatgatccattcagcccctgcagtctagagggcaagacagccattcaaagaaataactacaaaaaataaatataaaatcctgactgtgatatgggtggaaggagaggaggctgaacagtacccagggggagattcgtgtcggtcctagtcatcaggccaaacttccagatctgcaaccatttccttctccagatggtgatacagtgacccaacatgaggaactggtctggatgcctggagttaacgactgtgacctccttatgtacttgagggcagcaaggagcatggcggcatttgcaggaatgtgtgatggaggctctacagaggacggctgtgtcgcagcctctcgggatgacaccactctgaatgcactgaacacactgcatgaaagcggttacgatgctggcaaagccctgcagcgcctggtgaagaagcctgtgcccaagctcatcgagaagtgctggaccgaggacgaagtgaaacgcttcgttaaggga

SEQ ID NO: 108678 - DNA, 962 bp, Homo sapiens
  Payload ID: 1351
  Gene Symbol: RERE
  Gene Name: arginine-glutamic acid dipeptide (RE) repeats
  ENST ID: ENST00000488215
  CDS Start-End: 885-962
tggattaagcggcaggaattctgattactgaggtggagtgtgccagtagttgaggtcctcatctcatacctgaactgtgtcagcagcctctttaactggtctgtccctaatctacacttaggccacactgccactggcacagtcctcatccagtcttttcatggaaagctccagcttcagcctttctgccagcctacaattaggaactcttccgtgcggcctgaagggctctctgcaaccggatccttgcctgcctctttcgtcttatctgctggcactccattctgcacaccctgtcctccttgcagttcccagaatgttccctgtgccttttcctggctgacttctgctggaagccctgctggagcccacctggcaggctcacactcttccttgtcacttcctctaagacatcagcaagcagaaaacgcttcgttaagggactcaggcagtacgggaagaacttcttcagaattagaaaggagctgcttcccaataaggaaacaggggagctgatcaccttctattactattggaagaagacccccgaagcagccagctcccgagcccatcgtaggcaccgcaggcaggccgtgttcaggaggattaagactcgcaccgcgtccacacccgtcaacacaccctccagacccccgtccagtgaattcttggacctaagttcagccagtgaagatgacttcgacagtgaggacagtgagcaggagctgaaggggtacgcctgccgccactgcttcaccaccacctccaaagattggcaccacggaggccgggagaacatcctgctttgcaccgactgtcgcatccacttcaagaaatacggtgagctcccgcccattgagaagcccgtggacccgccaccgtttatgttcaaacccgtcaaggaagaggatgatgggctcagtgggaagcatagcatgaggacacggcggagtcggggctcg

SEQ ID NO: 108679 - DNA, 639 bp, Homo sapiens
  Payload ID: 1351
  Gene Symbol: RERE
  Gene Name: arginine-glutamic acid dipeptide (RE) repeats
  ENST ID: ENST00000464367
  CDS Start-End: 1-639
tggacctaagttcagccagtgaagatgacttcgacagtgaggacagtgagcaggagctgaaggggtacgcctgccgccactgcttcaccaccacctccaaagattggcaccacggaggccgggagaacatcctgctttgcaccgactgtcgcatccacttcaagaaatacggtgagctcccgcccattgagaagcccgtggacccgccaccgtttatgttcaaacccgtcaaggaagaggatgatgggctcagtgggaagcatagcatgaggacacggcggagtcggggctcggtgagtcccctggggccatggggctcctggcaacttcttcagtttcctgggatgtgtgggggcttgagcctcccagggggaggaagcgaaagtcttgtttaccagacaaagtcctggaggggagctgctttgcccgaggcggtagcttgcctgtgggctgggaagagttctctgttctctccttcgaggggccccagggtggcatcctgctctgggttttgtagcaagctcttagcttctggctcagtgcaggctctccaaggcccctcttgctctccaaggctgctgcttgtggtgtcacttccattgtatcaaatctctgctattttaaacttgcaggctcttt

SEQ ID NO: 108680 - DNA, 414 bp, Homo sapiens
  Payload ID: 1351
  Gene Symbol: RERE
  Gene Name: arginine-glutamic acid dipeptide (RE) repeats
  ENST ID: ENST00000468247
  CDS Start-End: 310-414
cggccgctcaggcctccttttgttttagcaagtgcacttcactccccgggcccccacctgcccgcctgcgccgcccctttccgcgggtccggagttggcggggccctgcgccggaggaggaggaccaggcccgcgggctcagctctcgccgccagcgggccgcagcatttttgaaacgttggggttgttggagtggttggattttccctggaattgagtgagaaattcagaagactgaagcccaggcttactgtctacctttcacggaggcctagccgtgagaggacagaagaaggcacgtggcgaatcatgacagcggacaaagacaaagacaaagacaaagagaaggaccgggaccgagaccgggaccgagagagagagaaaagagacaaagcaagagagagtgagaattca

SEQ ID NO: 108681 - DNA, 2143 bp, Homo sapiens
  Payload ID: 1352
  Gene Symbol: ASL
  Gene Name: argininosuccinate lyase
  Uniprot ID: P04424
  ENST ID: ENST00000304874
  CDS Start-End: 103-1497
ccggccagaaaagccctggccagtggcgggcgcgacactatccgtgcggccaggcggagacccggaggaccgaagcttccggacgacgaggaaccgcccaacatggcctcggagagtgggaagctttggggtggccggtttgtgggtgcagtggaccccatcatggagaagttcaacgcgtccattgcctacgaccggcacctttgggaggtggatgttcaaggcagcaaagcctacagcaggggcctggagaaggcagggctcctcaccaaggccgagatggaccagatactccatggcctagacaaggtggctgaggagtgggcccagggcaccttcaaactgaactccaatgatgaggacatccacacagccaatgagcgccgcctgaaggagctcattggtgcaacggcagggaagctgcacacgggacggagccggaatgaccaggtggtcacagacctcaggctgtggatgcggcagacctgctccacgctctcgggcctcctctgggagctcattaggaccatggtggatcgggcagaggcggaacgtgatgttctcttcccggggtacacccatttgcagagggcccagcccatccgctggagccactggattctgagccacgccgtggcactgacccgagactctgagcggctgctggaggtgcggaagcggatcaatgtcctgcccctggggagtggggccattgcaggcaatcccctgggtgtggaccgagagctgctccgagcagaactcaactttggggccatcactctcaacagcatggatgccactagtgagcgggactttgtggccgagttcctgttctgggcttcgctgtgcatgacccatctcagcaggatggccgaggacctcatcctctactgcaccaaggaattcagcttcgtgcagctctcagatgcctacagcacgggaagcagcctgatgccccagaagaaaaaccccgacagtttggagctgatccggagcaaggctgggcgtgtgtttgggcggtgtgccgggctcctgatgaccctcaagggacttcccagcacctacaacaaagacttacaggaggacaaggaagctgtgtttgaagtgtcagacactatgagtgccgtgctccaggtggccactggcgtcatctctacgctgcagattcaccaagagaacatgggacaggctctcagccccgacatgctggccactgaccttgcctattacctggtccgcaaagggatgccattccgccaggcccacgaggcctccgggaaagctgtgttcatggccgagaccaagggggtcgccctcaaccagctgtcactgcaggagctgcagaccatcagccccctgttctcgggcgacgtgatctgcgtgtgggactacgggcacagtgtggagcagtatggtgccctgggcggcactgcgcgctccagcgtcgactggcagatccgccaggtgcgggcgctactgcaggcacagcaggcctaggtcctcccacacctgccccctaataaagtgggcgcgagaggaggctgctgtgtgtttcctgccccagcctggctccctcgttgctgggctttcggggctggccagtggggacagtcagggactggagaggcagggcagggtggcctgtaatcccagcactttggaagggcaaggtgcgaggatgcttgaggccaggagtttgacacagcctgggcaacacagggagacccccatctctactcaataataaaacaaatagcctggcgtggtggcccatgcatatagtcccagctacttgtaaggctgaggtgagaggacacttgtgcccaggagtggaggctgcagtgagctatgatcacgccactgcattccagcctggataacagagtgagaacctatctctaaaaataaataaataaacgaaaaataaatggaagcggagaaaactgggcaagggcaatgagagtcgtagacgggaagggaagagggggctcccatcatagcctctgctctgtccaggccccatccccttcagacagggtatcacagtgacctcctaggccaggagcgatggctcacgcctgtaatcctagcattttgggaggcctgggcaacaggaagactccaactaccatattaaaaaaaa

SEQ ID NO: 108682 - DNA, 928 bp, Homo sapiens
  Payload ID: 1352
  Gene Symbol: ASL
  Gene Name: argininosuccinate lyase
  ENST ID: ENST00000362000
  CDS Start-End: 203-928
gcgggacgggcgtggaggacgccgagcaccgtggcgcgcgctcacgtccgcgtccccaagggctgcgctccctcaagcgcagtgcccagaactcggagccagcccggcccgggggaccctgctggccaaggaggtcgtcagtccggtcttgtcttccagacccggaggaccgaagcttccggacgacgaggaaccgcccaacatggcctcggaggtggctgaggagtgggcccagggcaccttcaaactgaactccaatgatgaggacatccacacagccaatgagcgccgcctgaaggagctcattggtgcaacggcagggaagctgcacacgggacggagccggaatgaccaggtggtcacagacctcaggctgtggatgcggcagacctgctccacgctctcgggcctcctctgggagctcattaggaccatggtggatcgggcagaggcggaacgtgatgttctcttcccggggtacacccatttgcagagggcccagcccatccgctggagccactggattctgagccacgccgtggcactgacccgagactctgagcggctgctggaggtgcggaagcggatcaatgtcctgcccctggggagtggggccattgcaggcaatcccctgggtgtggaccgagagctgctccgagcagaactcaactttggggccatcactctcaacagcatggatgccactagtgagcgggactttgtggccgagttcctgttctgggcttcgctgtgcatgacccatctcagcaggatggccgaggacctcatcctctactgcaccaaggaattcagcttcgtgcagctctcagatgcctacagcacgggaagcagcctgatgccccagaagaaaaaccccgacagtttggagctgatccggagcaaggctgggcgtgtgtttgggcgggtg

SEQ ID NO: 108683 - DNA, 1765 bp, Homo sapiens
  Payload ID: 1352
  Gene Symbol: ASL
  Gene Name: argininosuccinate lyase
  Uniprot ID: P04424
  ENST ID: ENST00000380839
  CDS Start-End: 217-1533
cggcggccggatgggcgggacgggcgtggaggacgccgagcaccgtggcgcgcgctcacgtccgcgtccccaagggctgcgctccctcaagcgcagtgcccagaactcggagccagcccggcccgggggaccctgctggccaaggaggtcgtcagtccggtcttgtcttccagacccggaggaccgaagcttccggacgacgaggaaccgcccaacatggcctcggagagtgggaagctttggggtggccggtttgtgggtgcagtggaccccatcatggagaagttcaacgcgtccattgcctacgaccggcacctttgggaggtggatgttcaaggcagcaaagcctacagcaggggcctggagaaggcagggctcctcaccaaggccgagatggaccagatactccatggcctagacaaggtggctgaggagtgggcccagggcaccttcaaactgaactccaatgatgaggacatccacacagccaatgagcgccgcctgaaggagctcattggtgcaacggcagggaagctgcacacgggacggagccggaatgaccaggtggtcacagacctcaggctgtggatgcggcagacctgctccacgctctcgggcctcctctgggagctcattaggaccatggtggatcgggcagaggcggaacgtgatgttctcttcccggggtacacccatttgcagagggcccagcccatccgctggagccactggattctgagtggggccattgcaggcaatcccctgggtgtggaccgagagctgctccgagcagaactcaactttggggccatcactctcaacagcatggatgccactagtgagcgggactttgtggccgagttcctgttctgggcttcgctgtgcatgacccatctcagcaggatggccgaggacctcatcctctactgcaccaaggaattcagcttcgtgcagctctcagatgcctacagcacgggaagcagcctgatgccccagaagaaaaaccccgacagtttggagctgatccggagcaaggctgggcgtgtgtttgggcggtgtgccgggctcctgatgaccctcaagggacttcccagcacctacaacaaagacttacaggaggacaaggaagctgtgtttgaagtgtcagacactatgagtgccgtgctccaggtggccactggcgtcatctctacgctgcagattcaccaagagaacatgggacaggctctcagccccgacatgctggccactgaccttgcctattacctggtccgcaaagggatgccattccgccaggcccacgaggcctccgggaaagctgtgttcatggccgagaccaagggggtcgccctcaaccagctgtcactgcaggagctgcagaccatcagccccctgttctcgggcgacgtgatctgcgtgtgggactacgggcacagtgtggagcagtatggtgccctgggcggcactgcgcgctccagcgtcgactggcagatccgccaggtgcgggcgctactgcaggcacagcaggcctaggtcctcccacacctgccccctaataaagtgggcgcgagaggaggctgctgtgtgtttcctgccccagcctggctccctcgttgctgggctttcggggctggccagtggggacagtcagggactggagaggcagggcagggtggcctgtaatcccagcactttggaagggcaaggtgcgaggatgcttgaggccaggagtttgacacagcctgggcaacacagggagaccccc

SEQ ID NO: 108684 - DNA, 1538 bp, Homo sapiens
  Payload ID: 1352
  Gene Symbol: ASL
  Gene Name: argininosuccinate lyase
  Uniprot ID: P04424
  ENST ID: ENST00000395331
  CDS Start-End: 199-1533
gacgggcgtggaggacgccgagcaccgtggcgcgcgctcacgtccgcgtccccaagggctgcgctccctcaagcgcagtgcccagaactcggagccagcccggcccgggggaccctgctggccaaggaggtcgtcagtccggtcttgtcttccagacccggaggaccgaagcttccggacgacgaggaaccgcccaacatggcctcggagagtgggaagctttggggtggccggtttgtgggtgcagtggaccccatcatggagaagttcaacgcgtccattgcctacgaccggcacctttgggaggtggatgttcaaggcagcaaagcctacagcaggggcctggagaaggcagggctcctcaccaaggccgagatggaccagatactccatggcctagacaaggtggctgaggagtgggcccagggcaccttcaaactgaactccaatgatgaggacatccacacagccaatgagcgccgcctgaaggagctcattggtgcaacggcagggaagctgcacacgggacggagccggaatgaccaggtggtcacagacctcaggctgtggatgcggcagacctgctccacgctctcgggcctcctctgggagctcattaggaccatggtggatcgggcagaggcggaacgtgatgttctcttcccggggtacacccatttgcagagggcccagcccatccgctggagccactggattctgagccacgccgtggcactgacccgagactctgagcggctgctggaggtgcggaagcggatcaatgtcctgcccctggggagtggggccattgcaggcaatcccctgggtgtggaccgagagctgctccgagcagaactcaactttggggccatcactctcaacagcatggatgccactagtgagcgggactttgtggccgagttcctgttctgggcttcgctgtgcatgacccatctcagcaggatggccgaggacctcatcctctactgcaccaaggaattcagcttcgtgcagctctcagatgcctacagcacgggaagcagcctgatgccccagaagaaaaaccccgacagtttggagctgatccggagcaaggctgggcgtgtgtttgggcgggaggacaaggaagctgtgtttgaagtgtcagacactatgagtgccgtgctccaggtggccactggcgtcatctctacgctgcagattcaccaagagaacatgggacaggctctcagccccgacatgctggccactgaccttgcctattacctggtccgcaaagggatgccattccgccaggcccacgaggcctccgggaaagctgtgttcatggccgagaccaagggggtcgccctcaaccagctgtcactgcaggagctgcagaccatcagccccctgttctcgggcgacgtgatctgcgtgtgggactacgggcacagtgtggagcagtatggtgccctgggcggcactgcgcgctccagcgtcgactggcagatccgccaggtgcgggcgctactgcaggcacagcaggcctaggtcct

SEQ ID NO: 108685 - DNA, 1622 bp, Homo sapiens
  Payload ID: 1352
  Gene Symbol: ASL
  Gene Name: argininosuccinate lyase
  Uniprot ID: P04424
  ENST ID: ENST00000395332
  CDS Start-End: 209-1603
ggatgggcgggacgggcgtggaggacgccgagcaccgtggcgcgcgctcacgtccgcgtccccaagggctgcgctccctcaagcgcagtgcccagaactcggagccagcccggcccgggggaccctgctggccaaggaggtcgtcagtccggtcttgtcttccagacccggaggaccgaagcttccggacgacgaggaaccgcccaacatggcctcggagagtgggaagctttggggtggccggtttgtgggtgcagtggaccccatcatggagaagttcaacgcgtccattgcctacgaccggcacctttgggaggtggatgttcaaggcagcaaagcctacagcaggggcctggagaaggcagggctcctcaccaaggccgagatggaccagatactccatggcctagacaaggtggctgaggagtgggcccagggcaccttcaaactgaactccaatgatgaggacatccacacagccaatgagcgccgcctgaaggagctcattggtgcaacggcagggaagctgcacacgggacggagccggaatgaccaggtggtcacagacctcaggctgtggatgcggcagacctgctccacgctctcgggcctcctctgggagctcattaggaccatggtggatcgggcagaggcggaacgtgatgttctcttcccggggtacacccatttgcagagggcccagcccatccgctggagccactggattctgagccacgccgtggcactgacccgagactctgagcggctgctggaggtgcggaagcggatcaatgtcctgcccctggggagtggggccattgcaggcaatcccctgggtgtggaccgagagctgctccgagcagaactcaactttggggccatcactctcaacagcatggatgccactagtgagcgggactttgtggccgagttcctgttctgggcttcgctgtgcatgacccatctcagcaggatggccgaggacctcatcctctactgcaccaaggaattcagcttcgtgcagctctcagatgcctacagcacgggaagcagcctgatgccccagaagaaaaaccccgacagtttggagctgatccggagcaaggctgggcgtgtgtttgggcggtgtgccgggctcctgatgaccctcaagggacttcccagcacctacaacaaagacttacaggaggacaaggaagctgtgtttgaagtgtcagacactatgagtgccgtgctccaggtggccactggcgtcatctctacgctgcagattcaccaagagaacatgggacaggctctcagccccgacatgctggccactgaccttgcctattacctggtccgcaaagggatgccattccgccaggcccacgaggcctccgggaaagctgtgttcatggccgagaccaagggggtcgccctcaaccagctgtcactgcaggagctgcagaccatcagccccctgttctcgggcgacgtgatctgcgtgtgggactacgggcacagtgtggagcagtatggtgccctgggcggcactgcgcgctccagcgtcgactggcagatccgccaggtgcgggcgctactgcaggcacagcaggcctaggtcctcccacacctgcccc

SEQ ID NO: 108686 - DNA, 1564 bp, Homo sapiens
  Payload ID: 1353
  Gene Symbol: ASS1
  Gene Name: argininosuccinate synthase 1
  Uniprot ID: P00966
  ENST ID: ENST00000352480
  CDS Start-End: 73-1311
gcttataacctgggatgggcacccctgccagtcctgctctgccgcctgccaccgctgcccgagcccgacgctatgtccagcaaaggctccgtggttctggcctacagtggcggcctggacacctcgtgcatcctcgtgtggctgaaggaacaaggctatgacgtcattgcctatctggccaacattggccagaaggaagacttcgaggaagccaggaagaaggcactgaagcttggggccaaaaaggtgttcattgaggatgtcagcagggagtttgtggaggagttcatctggccggccatccagtccagcgcactgtatgaggaccgctacctcctgggcacctctcttgccaggccctgcatcgcccgcaaacaagtggaaatcgcccagcgggagggggccaagtatgtgtcccacggcgccacaggaaaggggaacgatcaggtccggtttgagctcagctgctactcactggccccccagataaaggtcattgctccctggaggatgcctgaattctacaaccggttcaagggccgcaatgacctgatggagtacgcaaagcaacacgggattcccatcccggtcactcccaagaacccgtggagcatggatgagaacctcatgcacatcagctacgaggctggaatcctggagaaccccaagaaccaagcgcctccaggtctctacacgaagacccaggacccagccaaagcccccaacacccctgacattctcgagatcgagttcaaaaaaggggtccctgtgaaggtgaccaacgtcaaggatggcaccacccaccagacctccttggagctcttcatgtacctgaacgaagtcgcgggcaagcatggcgtgggccgtattgacatcgtggagaaccgcttcattggaatgaagtcccgaggtatctacgagaccccagcaggcaccatcctttaccatgctcatttagacatcgaggccttcaccatggaccgggaagtgcgcaaaatcaaacaaggcctgggcttgaaatttgctgagctggtgtataccggtttctggcacagccctgagtgtgaatttgtccgccactgcatcgccaagtcccaggagcgagtggaagggaaagtgcaggtgtccgtcctcaagggccaggtgtacatcctcggccgggagtccccactgtctctctacaatgaggagctggtgagcatgaacgtgcagggtgattatgagccaactgatgccaccgggttcatcaacatcaattccctcaggctgaaggaatatcatcgtctccagagcaaggtcactgccaaatagacccgtgtacaatgaggagctggggcctcctcaatttgcagatcccccaagtacaggcgctaattgttgtgataatttgtaattgtgacttgttctccccggctggcagcgtagtggggctgccaggccccagctttgttccctggtccccctgaagcctgcaaacgttgtcatcgaagggaagggtggggggcagctgcggtggggagctataaaaatgacaattaaaagagacactagtcttttatttcta

SEQ ID NO: 108687 - DNA, 1548 bp, Homo sapiens
  Payload ID: 1353
  Gene Symbol: ASS1
  Gene Name: argininosuccinate synthase 1
  Uniprot ID: P00966
  ENST ID: ENST00000372393
  CDS Start-End: 76-1314
cgagcccgagtggttcactgcactgtgaaaacagattccagacgccgggaactcacgcctccaatcccagacgctatgtccagcaaaggctccgtggttctggcctacagtggcggcctggacacctcgtgcatcctcgtgtggctgaaggaacaaggctatgacgtcattgcctatctggccaacattggccagaaggaagacttcgaggaagccaggaagaaggcactgaagcttggggccaaaaaggtgttcattgaggatgtcagcagggagtttgtggaggagttcatctggccggccatccagtccagcgcactgtatgaggaccgctacctcctgggcacctctcttgccaggccctgcatcgcccgcaaacaagtggaaatcgcccagcgggagggggccaagtatgtgtcccacggcgccacaggaaaggggaacgatcaggtccggtttgagctcagctgctactcactggccccccagataaaggtcattgctccctggaggatgcctgaattctacaaccggttcaagggccgcaatgacctgatggagtacgcaaagcaacacgggattcccatcccggtcactcccaagaacccgtggagcatggatgagaacctcatgcacatcagctacgaggctggaatcctggagaaccccaagaaccaagcgcctccaggtctctacacgaagacccaggacccagccaaagcccccaacacccctgacattctcgagatcgagttcaaaaaaggggtccctgtgaaggtgaccaacgtcaaggatggcaccacccaccagacctccttggagctcttcatgtacctgaacgaagtcgcgggcaagcatggcgtgggccgtattgacatcgtggagaaccgcttcattggaatgaagtcccgaggtatctacgagaccccagcaggcaccatcctttaccatgctcatttagacatcgaggccttcaccatggaccgggaagtgcgcaaaatcaaacaaggcctgggcttgaaatttgctgagctggtgtataccggtttctggcacagccctgagtgtgaatttgtccgccactgcatcgccaagtcccaggagcgagtggaagggaaagtgcaggtgtccgtcctcaagggccaggtgtacatcctcggccgggagtccccactgtctctctacaatgaggagctggtgagcatgaacgtgcagggtgattatgagccaactgatgccaccgggttcatcaacatcaattccctcaggctgaaggaatatcatcgtctccagagcaaggtcactgccaaatagacccgtgtacaatgaggagctggggcctcctcaatttgcagatcccccaagtacaggcgctaattgttgtgataatttgtaattgtgacttgttctccccggctggcagcgtagtggggctgccaggccccagctttgttccctggtccccctgaagcctgcaaacgttgtcatcgaagggaagggtggggggcagctgcggtggggagctataaaaatgacaattaaaagaga

SEQ ID NO: 108688 - DNA, 1973 bp, Homo sapiens
  Payload ID: 1353
  Gene Symbol: ASS1
  Gene Name: argininosuccinate synthase 1
  Uniprot ID: P00966
  ENST ID: ENST00000372394
  CDS Start-End: 482-1720
ctgctctgccgcctgccaccgctgcccgagcccggtgggcggcggcactgcgtgctggggaagcacagattcttgtgccctctgtgaccttgagcctgccactgacctctctgagccctgctggctgcctccccaataggaatgacaactcctacttcatgaggttgtagtgggggctcaggggcacagggagatcccgctgaggctcccagggccctgcctggtgcttggcaaggagcagttctgatgggggatgtgtcagctgccagaggctcagagccaaggcccctcccacatctcctgcctgcgtgcattcctcacatcctggccttgggccaaactgctcagcctcagccgccttccctcgatgctggaggatcaggtccaagagatgcctctccccgaccagcctaggactgcagtcagcattcccaggccccagtgtggtctgtggggctgtgtgcagagtgtgcgagacgctatgtccagcaaaggctccgtggttctggcctacagtggcggcctggacacctcgtgcatcctcgtgtggctgaaggaacaaggctatgacgtcattgcctatctggccaacattggccagaaggaagacttcgaggaagccaggaagaaggcactgaagcttggggccaaaaaggtgttcattgaggatgtcagcagggagtttgtggaggagttcatctggccggccatccagtccagcgcactgtatgaggaccgctacctcctgggcacctctcttgccaggccctgcatcgcccgcaaacaagtggaaatcgcccagcgggagggggccaagtatgtgtcccacggcgccacaggaaaggggaacgatcaggtccggtttgagctcagctgctactcactggccccccagataaaggtcattgctccctggaggatgcctgaattctacaaccggttcaagggccgcaatgacctgatggagtacgcaaagcaacacgggattcccatcccggtcactcccaagaacccgtggagcatggatgagaacctcatgcacatcagctacgaggctggaatcctggagaaccccaagaaccaagcgcctccaggtctctacacgaagacccaggacccagccaaagcccccaacacccctgacattctcgagatcgagttcaaaaaaggggtccctgtgaaggtgaccaacgtcaaggatggcaccacccaccagacctccttggagctcttcatgtacctgaacgaagtcgcgggcaagcatggcgtgggccgtattgacatcgtggagaaccgcttcattggaatgaagtcccgaggtatctacgagaccccagcaggcaccatcctttaccatgctcatttagacatcgaggccttcaccatggaccgggaagtgcgcaaaatcaaacaaggcctgggcttgaaatttgctgagctggtgtataccggtttctggcacagccctgagtgtgaatttgtccgccactgcatcgccaagtcccaggagcgagtggaagggaaagtgcaggtgtccgtcctcaagggccaggtgtacatcctcggccgggagtccccactgtctctctacaatgaggagctggtgagcatgaacgtgcagggtgattatgagccaactgatgccaccgggttcatcaacatcaattccctcaggctgaaggaatatcatcgtctccagagcaaggtcactgccaaatagacccgtgtacaatgaggagctggggcctcctcaatttgcagatcccccaagtacaggcgctaattgttgtgataatttgtaattgtgacttgttctccccggctggcagcgtagtggggctgccaggccccagctttgttccctggtccccctgaagcctgcaaacgttgtcatcgaagggaagggtggggggcagctgcggtggggagctataaaaatgacaattaaaagagacactagtcttttatttcta

SEQ ID NO: 108689 - DNA, 807 bp, Homo sapiens
  Payload ID: 1353
  Gene Symbol: ASS1
  Gene Name: argininosuccinate synthase 1
  ENST ID: ENST00000422569
  CDS Start-End: 213-807
cccggtaaggagccctcggcccctctcgctgcccactccctagccgagagcacccgcttcccgggcccagaggaggaggcgtagaagacgcccgccccggggcccgcggaggcagagggcggaccccgatcgccactcgccggggactgggaccgaggcaggagggaaggggctcccgatgctcaaacgcctggcaccggattccagacgctatgtccagcaaaggctccgtggttctggcctacagtggcggcctggacacctcgtgcatcctcgtgtggctgaaggaacaaggctatgacgtcattgcctatctggccaacattggccagaaggaagacttcgaggaagccaggaagaaggcactgaagcttggggccaaaaaggtgttcattgaggatgtcagcagggagtttgtggaggagttcatctggccggccatccagtccagcgcactgtatgaggaccgctacctcctgggcacctctcttgccaggccctgcatcgcccgcaaacaagtggaaatcgcccagcgggagggggccaagtatgtgtcccacggcgccacaggaaaggggaacgatcaggtccggtttgagctcagctgctactcactggccccccagataaaggtcattgctccctggaggatgcctgaattctacaaccggttcaagggccgcaatgacctgatggagtacgcaaagcaacacgggattcccatcccggtcactcccaagaacccgtggagcatggatgagaacctcatgcacatcagctacgaggctggaatcctggagaacccca

SEQ ID NO: 108690 - DNA, 545 bp, Homo sapiens
  Payload ID: 1353
  Gene Symbol: ASS1
  Gene Name: argininosuccinate synthase 1
  ENST ID: ENST00000443588
  CDS Start-End: 7-545
gacgctatgtccagcaaaggctccgtggttctggcctacagtggcggcctggacacctcgtgcatcctcgtgtggctgaaggaacaaggctatgacgtcattgcctatctggccaacattggccagaaggaagacttcgaggaagccaggaagaaggcactgaagcttggggccaaaaaggtgttcattgaggatgtcagcagggagtttgtggaggagttcatctggccggccatccagtccagcgcactgtatgaggaccgctacctcctgggcacctctcttgccaggccctgcatcgcccgcaaacaagtggaaatcgcccagcgggagggggccaagtatgtgtcccacggcgccacaggaaaggtcattgctccctggaggatgcctgaattctacaaccggttcaagggccgcaatgacctgatggagtacgcaaagcaacacgggattcccatcccggtcactcccaagaacccgtggagcatggatgagaacctcatgcacatcagctacgaggctggaatcctggagaaccccaa

SEQ ID NO: 108691 - DNA, 2427 bp, Homo sapiens
  Payload ID: 1354
  Gene Symbol: RNPEP
  Gene Name: arginyl aminopeptidase (aminopeptidase B)
  Uniprot ID: Q9H4A4
  ENST ID: ENST00000295640
  CDS Start-End: 44-1996
cctcgggttcgcggcccggccggtgagcaacggctctgcggccatggcgagcggcgagcattcccccggcagcggcgcggcccggcggccgctgcactccgcgcaggctgtggacgtggcctcggcctccaacttccgggcctttgagctgctgcacttgcacctggacctgcgggctgagttcgggcctccagggcccggcgcagggagccgggggctgagcggcaccgcggtcctggacctgcgctgcctggagcccgagggcgccgccgagctgcggctggactcgcacccgtgcctggaggtgacggcggcggcgctgcggcgggagcggcccggctcggaggagccgcctgcggagcccgtgagcttctacacgcagcccttctcgcactatggccaggccctgtgcgtgtccttcccgcagccctgccgcgccgccgagcgcctccaggtgctgctcacctaccgcgtcggggagggacccggggtttgctggttggctcccgagcagacagcaggaaagaagaagcccttcgtgtacacccagggccaggctgtcctaaaccgggccttcttcccttgcttcgacacgcctgctgttaaatacaagtattcagctcttattgaggtcccagatggcttcacagctgtgatgagtgctagcacctgggagaagagaggtccaaataagttcttcttccagatgtgtcagcccatcccctcctatctgatagctttggccatcggagatctggtttcggctgaagttggacccaggagccgggtgtgggctgagccctgcctgattgatgctgccaaggaggagtacaacggggtgatagaagaatttttggcaacaggagagaagctttttggaccttatgtttggggaaggtatgacttgctcttcatgccaccgtcctttccatttggaggaatggagaacccttgtctgacctttgtcaccccctgcctgctagctggggaccgctccttggcagatgtcatcatccatgagatctcccacagttggtttgggaacctggtcaccaacgccaactggggtgaattctggctcaatgaaggtttcaccatgtacgcccagaggaggatctccaccatcctctttggcgctgcgtacacctgcttggaggctgcaacggggcgggctctgctgcgtcagcacatggacatcactggagaggaaaacccactcaacaagctccgcgtgaagattgaaccaggcgttgacccggacgacacctataatgagaccccctacgagaaaggtttctgctttgtttcatacctggcccacttggtgggtgatcaggatcagtttgacagttttctcaaggcctatgtgcatgaattcaaattccgaagcatcttagccgatgactttctggacttctacttggaatatttccctgagcttaagaaaaagagagtggatatcattccaggttttgagtttgatcgatggctgaatacccccggctggcccccgtacctccctgatctctcccctggggactcactcatgaagcctgctgaagagctagcccaactgtgggcagccgaggagctggacatgaaggccattgaagccgtggccatctctccctggaagacctaccagctggtctacttcctggataagatcctccagaaatcccctctccctcctgggaatgtgaaaaaacttggagacacatacccaagtatctcaaatgcccggaatgcagagctccggctgcgatggggccaaatcgtccttaagaacgaccaccaggaagatttctggaaagtgaaggagttcctgcataaccaggggaagcagaagtatacacttccgctgtaccacgcaatgatgggtggcagtgaggtggcccagaccctcgccaaggagacttttgcatccaccgcctcccagctccacagcaatgttgtcaactatgtccagcagatcgtggcacccaagggcagttagaggctcgtgtgcatggcccctgcctcttcaggctctccaggctttcagaataattgtttgttcccaaattcctgttccctgatcaacttcctggagtttatatcccctcaggataatctattctctagcttaggtatctgtgactcttgggcctctgctctggtgggaacttacttctctatagcccactgagccccgagacagagaacctgcccacagctctccccgctacaggctgcaggcactgcagggcagcgggtattctcctccccacctaagtctctgggaagaagtggagaggactgatgctcttcttttttctctttctgtcctttttcttgctgattttatgcaaagggctggcattctgattgttcttttttcaggtttaatccttattttaataaagttttcaagcaaaaattaagtta

SEQ ID NO: 108692 - DNA, 2282 bp, Homo sapiens
  Payload ID: 1354
  Gene Symbol: RNPEP
  Gene Name: arginyl aminopeptidase (aminopeptidase B)
  ENST ID: ENST00000367286
  CDS Start-End: 16-1851
aacggctctgcggccatggcgagcggcgagcattcccccggcagcggcgcggcccggcggccgctgcactccgcgcaggctgtggacgtggcctcggcctccaacttccgggcctttgagctgctgcacttgcacctggacctgcgggctgagttcgggcctccagggcccggcgcagggagccgggggctgagcggcaccgcggtcctggacctgcgctgcctggagcccgagggcgccgccgagctgcggctggactcgcacccgtgcctggaggtgacggcggcggcgctgcggcgggagcggcccggctcggaggagccgcctgcggagcccgtgagcttctacacgcagcccttctcgcactatggccaggccctgtgcgtgtccttcccgcagccctgccgcgccgccgagcgcctccaggtgctgctcacctaccgcgtcggggagggacccggggtttgctggttggctcccgagcagacagcaggaaagaagaagcccttcgtgtacacccagggccaggctgtcctaaaccgggccttcttcccttgcttcgacacgcctgctgttaaatacaagtattcagctcttattgaggtcccagatggcttcacagctgtgatgagtgctagcacctgggagaagagaggtccaaataagttcttcttccagatgtgtcagcccatcccctcctatctgatagctttggccatcggagatctggtttcggctgaagttggacccaggtatgacttgctcttcatgccaccgtcctttccatttggaggaatggagaacccttgtctgacctttgtcaccccctgcctgctagctggggaccgctccttggcagatgtcatcatccatgagatctcccacagttggtttgggaacctggtcaccaacgccaactggggtgaattctggctcaatgaaggtttcaccatgtacgcccagaggaggatctccaccatcctctttggcgctgcgtacacctgcttggaggctgcaacggggcgggctctgctgcgtcagcacatggacatcactggagaggaaaacccactcaacaagctccgcgtgaagattgaaccaggcgttgacccggacgacacctataatgagaccccctacgagaaaggtttctgctttgtttcatacctggcccacttggtgggtgatcaggatcagtttgacagttttctcaaggcctatgtgcatgaattcaaattccgaagcatcttagccgatgactttctggacttctacttggaatatttccctgagcttaagaaaaagagagtggatatcattccaggttttgagtttgatcgatggctgaatacccccggctggcccccgtacctccctgatctctcccctggggactcactcatgaagcctgctgaagagctagcccaactgtgggcagccgaggagctggacatgaaggccattgaagccgtggccatctctccctggaagacctaccagctggtctacttcctggataagatcctccagaaatcccctctccctcctgggaatgtgaaaaaacttggagacacatacccaagtatctcaaatgcccggaatgcagagctccggctgcgatggggccaaatcgtccttaagaacgaccaccaggaagatttctggaaagtgaaggagttcctgcataaccaggggaagcagaagtatacacttccgctgtaccacgcaatgatgggtggcagtgaggtggcccagaccctcgccaaggagacttttgcatccaccgcctcccagctccacagcaatgttgtcaactatgtccagcagatcgtggcacccaagggcagttagaggctcgtgtgcatggcccctgcctcttcaggctctccaggctttcagaataattgtttgttcccaaattcctgttccctgatcaacttcctggagtttatatcccctcaggataatctattctctagcttaggtatctgtgactcttgggcctctgctctggtgggaacttacttctctatagcccactgagccccgagacagagaacctgcccacagctctccccgctacaggctgcaggcactgcagggcagcgggtattctcctccccacctaagtctctgggaagaagtggagaggactgatgctcttcttttttctctttctgtcctttttcttgctgattttatgcaaagggctggcattctgattgttcttttttcaggtttaatccttattttaataaagttttcaagcaaaaattaagtta

SEQ ID NO: 108693 - DNA, 1166 bp, Homo sapiens
  Payload ID: 1354
  Gene Symbol: RNPEP
  Gene Name: arginyl aminopeptidase (aminopeptidase B)
  ENST ID: ENST00000447312
  CDS Start-End: 134-1166
gccactgggcggtgcatccttcaccctttccgtccttccgcgtctcctccctggccctggaggcttgtccagattgcgccgcattcccgctcatcgcacactgccgtttctaacattttccgtggctttctagatgacctgttgttcatgcacttcacttagtgccctcttggacttttgggccgaggtttgctggttggctcccgagcagacagcaggaaagaagaagcccttcgtgtacacccagggccaggctgtcctaaaccgggccttcttcccttgcttcgacacgcctgctgttaaatacaagtattcagctcttattgaggtcccagatggcttcacagctgtgatgagtgctagcacctgggagaagagaggtccaaataagttcttcttccagatgtgtcagcccatcccctcctatctgatagctttggccatcggagatctggtttcggctgaagttggacccaggagccgggtgtgggctgagccctgcctgattgatgctgccaaggaggagtacaacggggtgatagaagaatttttggcaacaggagagaagctttttggaccttatgtttggggaaggtatgacttgctcttcatgccaccgtcctttccatttggaggaatggagaacccttgtctgacctttgtcaccccctgcctgctagctggggaccgctccttggcagatgtcatcatccatgagatctcccacagttggtttgggaacctggtcaccaacgccaactggggtgaattctggctcaatgaaggtttcaccatgtacgcccagaggaggatctccaccatcctctttggcgctgcgtacacctgcttggaggctgcaacggggcgggctctgctgcgtcagcacatggacatcactggagaggaaaacccactcaacaagctccgcgtgaagattgaaccaggcgttgacccggacgacacctataatgagaccccctacgagaaaggtttctgctttgtttcatacctggcccacttggtgggtgatcaggatcagtttgacagttttctcaaggcctatgtgcatgaattcaaattccgaagcatcttagccgatgactttctggacttctacttggaatatttccctgagcttaagaaaaagagagtggatatcattccag

SEQ ID NO: 108694 - DNA, 505 bp, Homo sapiens
  Payload ID: 1354
  Gene Symbol: RNPEP
  Gene Name: arginyl aminopeptidase (aminopeptidase B)
  ENST ID: ENST00000449524
  CDS Start-End: 1-505
ctgattgatgctgccaaggaggagtacaacggggtgatagaagaatttttggcaacaggagagaagctttttggaccttatgtttggggaaggtatgacttgctcttcatgccaccgtcctttccatttggaggaatggagaacccttgtctgacctttgtcaccccctgcctgctagctggggaccgctccttggcagatgtcatcatccatgagatctcccacagttggtttgggaacctggtcaccaacgccaactggggtgaattctggctcaatgaaggtttcaccatgtacgcccagaggaggatctccaccatcctctttggcgttgacccggacgacacctataatgagaccccctacgagaaaggtttctgctttgtttcatacctggcccacttggtgggtgatcaggatcagtttgacagttttctcaaggcctatgtgcatgaattcaaattccgaagcatcttagccgatgactttctggacttctacttgg

SEQ ID NO: 108695 - DNA, 851 bp, Homo sapiens
  Payload ID: 1354
  Gene Symbol: RNPEP
  Gene Name: arginyl aminopeptidase (aminopeptidase B)
  ENST ID: ENST00000487116
  CDS Start-End: 1-516
ttccgggcctttgagctgctgcacttgcacctggacctgcgggctgagttcgggcctccagggcccggcgcagggagccgggggctgagcggcaccgcggtcctggacctgcgctgcctggagcccgagggcgccgccgagctgcggctggactcgcacccgtgcctggaggtgacggcggcggcgctgcggcgggagcggcccggctcggaggagccgcctgcggagcccgtgagcttctacacgcagcccttctcgcactatggccaggccctgtgcgtgtccttcccgcagccctgccgcgccgccgagcgcctccaggtgctgctcacctaccgcgtcggggagggacccggggtttgctggttggctcccgagcagacagcaggaaagaagaagcccttcgtgtacacccagggccaggctgtcctaaaccgggccttcttcccttgcttcgacacgcctgctgttaaatacaagtattcagctcttattgaggagccgggtgtgggctgagccctgcctgattgatgctgccaaggaggagtacaacggggtgatagaagaatttttggcaacaggagagaagctttttggaccttatgtttggggaaggtatgacttgctcttcatgccaccgtcctttccatttggaggaatggagaacccttgtctgacctttgtcaccccctgcctgctagctggggaccgctccttggcagatgtcatcatccatgagatctcccacagttggtttgggaacctggtcaccaacgccaactggggtgaattctggctcaatgaaggtttcaccatgtacgcccagaggaggatctccaccatcctctttg

SEQ ID NO: 108696 - DNA, 780 bp, Homo sapiens
  Payload ID: 1354
  Gene Symbol: RNPEP
  Gene Name: arginyl aminopeptidase (aminopeptidase B)
  ENST ID: ENST00000492587
  CDS Start-End: 1-454
gcccggcgcagggagccgggggctgagcggcaccgcggtcctggacctgcgctgcctggagcccgagggcgccgccgagctgcggctggactcgcacccgtgcctggaggtgacggcggcggcgctgcggcgggagcggcccggctcggaggagccgcctgcggagcccgtgagcttctacacgcagcccttctcgcactatggccaggccctgtgcgtgtccttcccgcagccctgccgcgccgccgagcgcctccaggtgctgctcacctaccgcgtcggggagggacccggggtttgctggttggctcccgagcagacagcaggaaagaagaagcccttcgtgtacacccagggccaggctgtcctaaaccgggccttcttcccttgcttcgacacgcctgctgttaaatacaagtattcagctcttattgaggagccgggtgtgggctgagccctgcctgattgatgctgccaaggaggagtacaacggggtgatagaagaatttttggcaacaggagagaagctttttggaccttatgtttggggaaggcgctgcgtacacctgcttggaggctgcaacggggcgggctctgctgcgtcagcacatggacatcactggagaggaaaacccactcaacaagctccgcgtgaagattgaaccaggcgttgacccggacgacacctataatgagaccccctacgagaaaggtttctgctttgtttcatacctggcccacttggtgggtgatcaggatcagtttgacagttttctcaag

SEQ ID NO: 108697 - DNA, 5558 bp, Homo sapiens
  Payload ID: 1355
  Gene Symbol: RNPEPL1
  Gene Name: arginyl aminopeptidase (aminopeptidase B)-like 1
  Uniprot ID: Q9HAU8
  ENST ID: ENST00000270357
  CDS Start-End: 594-2078
ccagcgcgcagctcttccgcctccgccacctgcagctgggcctggagctgcggcccgaggcgcgcgagttggccggctgcctggtgctcgagctgtgcgcgctgcggcccgcgccccgcgcgctcgtgctcgacgcgcacccggctctgcgcctgcactcagccgccttccgtcgcgcccccgccgccgccgccgagacgccctgcgccttcgccttctccgcccccgggccggggcccgcgccgccgcccccgctgcccgccttccccgaggcgcccggctccgagcccgcctgctgtccgctggccttcagggtggacccgttcaccgactacggctcctcgctcaccgtcacgctgccgcccgagctgcaggcgcaccagcccttccaggtcatcctgcggtacacctcgaccgacgcccccgccatctggtggctggacccagagctgacctatggctgcgccaagcccttcgtcttcacccagggccactccgtgtgcaaccgctccttcttcccgtgcttcgacacacctgccgtgaagtgcacctactctgccgtcgtcaaggcgccatcgggggtgcaggtgctgatgagtgccacccggagtgcatacatggaggaagaaggcgtcttccacttccacatggagcaccccgtgcccgcctacctcgtggccctggtggccggagacctcaagccggcagacatcgggcccaggagccgcgtgtgggccgagccatgcctcctgcccacggccaccagcaagctgtcgggcgcagtggagcagtggctgagtgcagctgagcggctgtatgggccctacatgtggggcaggtacgacattgtcttcctgccaccctccttccccatcgtggccatggagaacccctgcctcaccttcatcatctcctccatcctggagagcgatgagttcctggtcatcgatgtcatccacgaggtggcccacagttggttcggcaacgctgtcaccaacgccacgtgggaagagatgtggctgagcgagggcctggccacctatgcccagcgccgtatcaccaccgagacctacggtgctgccttcacctgcctggagactgccttccgcctggacgccctgcaccggcagatgaagcttctgggagaggacagcccggtcagcaaactgcaggtcaagctggagccaggagtgaatcccagccacctgatgaacctgttcacctacgagaagggctactgcttcgtgtactacctgtcccagctctgcggagacccacagcgctttgatgactttctccgagcctatgtggagaagtacaagttcaccagcgtggtggcccaggacctgctggactccttcctgagcttcttcccggagctgaaggagcagagcgtggactgccgggcagggctggaattcgagcgctggctcaatgccacaggcccgccgctggctgagccggacctgtctcagggatccagcctgacccggcccgtggaggcccttttccagctgtggaccgcagaacctctggaccaggcagctgcctcggccagcgccattgacatctccaagtggaggaccttccagacagcactcttcctggaccggctcctggatgggtccccgctgccgcaggaggtggtgatgagcctgtccaagtgctactcctccctgctggactcgatgaacgctgagatccgcatccgctggctgcagattgtggtccgcaacgactactatcctgacctccacagggtgcggcgcttcctggagagccagatgtcacgcatgtacaccatcccgctgtacgaggacctctgcaccggtgccctcaagtccttcgcgctggaggtcttctaccagacgcagggccggctgcaccccaacctgcgcagagccatccagcagatcctgtcccagggcctgggctccagcacagagcccgcctcagagcccagcacggagctgggcaaggctgaagcagacacagactcggacgcacaggccctgctgcttggggacgaggcccccagcagtgccatctctctcagggacgtcaatgtgtctgcctagccctgttggcgggctgaccctcgacctcccagacaccacaattgtgccttctgtgggccaggcctgccatgactgcgtctcggctctggccatgagctctgcccaggcccacaagcccctcccctgggctctcccaggcagggagaatggggagagggacctccttgtgtctggcagagacctgtggacctggcctccccactcccagctctcttgcactgcaggccctggggccagcccgcacacaccatgcctcctgtctcaacactgacagctgtgcctagccccggatgccagcacctgccaggtgccgccccggggcaagggccccagcagccctatggtgaccgccacactgtgccttaatgtctgccgggggcccaggctgtgctgtccctgcagcacgcctccttgcagggatctgagccaccctccccgcacagccctgcaccccgcccctggggttggcagcctcagttggcccctggcagaggaacaaggacacagacattccctcagtgtggggggcaggggacacagggagaggatggttgtccctggggagggccctctggccccaggcaaccttagcccctcagaacagggagtcccaggacccagggagagtgtggggacaggacagcctgtctcttgtagcttcctggggtgggaggcacaggggcaaagcaataccccagggaaagtgggaggtggtgctggtgctctctccaggcccaccatgctgggagaggcggccagagcctggggcctccagcctgggactgctgtgatggggtatcacggtgatggtcccattaaacttccactctgcaaacctgatctcctgcgctctttctcgcgactcttgtcctctgcatcttcctggctgtgtagggtgggctggcctgccgggacttggggcctggagctggtcaggagctgggtgtggccccctcctctgatacataagcccgagagcaggctccccgaatcctgcccagccccttggctggaccccctgggcctgagtagcctctggatgtcacaggaaagccatgtgtcaccttcactctgggccttcacctgtggcttaagccaaatcccggcctcagtggtgatcctttcccaagatgggtacaaggtgacaggcatgttttgttttggagaactgagatttccattttcccaggcgataggtgtcgctgcccttcacagtccccaaggatgtggcgccaccatctcagtgccacgcacacctggccaacatgccgtggcccagaagcagcacgtctcttctcccaacccgctggccaggcccagtcacagccccactccacacatggcagccaggaagtggggagggcaggaggtgctgggcaaataaccctgataccatcactgtccagtccccagtcaccaaatgtcccactcaccctccttcctgttctggatgccccgcccctcccctcccctcccaaggacatatgagtcccctccagtggcggtggcaactctggtctagggtctggggccgtctctacatgtgttgcttcatgtaccttcttcacatcaggtctgggggaggcgccaccccatccagagacctaggaactagaagactgccactgcccctcacacccagggataggatgactgcagtaacccctgtgaaagcgggtatggagggcacctggcagcccctgctgcatggccatctaaagtcttgccaggcaggcacagctagggcccctgcctgggagtggacaccccactcccccaagtcatgttctctgtggcctggggctccagccttgggaggacccctttcctgtttcttaaccatgcttgatggtgtcctcaaaggagccctgctcagtggcagaactgctttctcagcctcttccccgccaaggttgttttcaagtcccagcagtcacagactttcatcctgggctcttctttcttttgcaattcagctctcgaaatgactctgtggtctgcgggtgactccactccacgtgcctacagccacgcccacagcgccacctccggacgctgctgagctgcgcacctgtgcctgacacctggctttgggaaactcagcagcagtgcccagcgtcatgaccctgggggcaggagggcatctggatccaggatggcaccctcaccacaatctgtcttggctctgtgcccgcccgtggggtacacaggagggctctttcagccctaagtccttgtgttcctgacctttgttcctcttccacccagcttgcaagtgcagaatttttttttagctcgtcgcttccctgcagtcccttgtccaatgcagcctccggccgatactcaggccagtgttgtttcccaacctctccactagatacgcacacttagctcacggtctgcctcatgagtcatcccagttgagctttaccaaatgttttgccccacctaacagcctgcccacattccaaatcctggcaggtcgcacgttttattagcacagcacccctctcctagcggccagcttctctattaggccacgttatgctccagccacacaactatgaagcgcagacgtctcacacaacaaagctttctcatgctgcaggcccacctcaggctggcaggggaaggggggattctcttcaatgtgaccactctcggacccgtaccgatgaacagagatctcaaatgtttccaggcaccttgccagggataagagagctgttgaggggctcacactggcagtggaagttctaaggggcctacaaccacaggggctgcaaccccaccatatgcacaaaagcgggggcagatggcaaacagcactaatgacaacgacggagctgaggccagaatgtgagagagatctgcattttggggattagggcctagtcaggcaggtaggagatgatgttcaaaaagggaaaagaagcgtgatgaaagactggtttctacagagatagattagaaagctgaagcctgaaaaaacagtgaaggagacccatgcaaatttctaggccctggaggtccaaataaggttttctaagtccctcaggccatgacaggttcagtccagacttgtctcccagagtgtttctctgccatccctactctaactgggacttattggtggtgtttctctcctaaggccagatgctttgcacagaacattaggaaactccagatgtaaaggtaaggcacaactgagaatcacctgcccagggcagcaacacagtgtgaaggaaaacaggccactcaacccaaacttacacctgagacagaggcaacagaaaaatcagaaaaggactttagaacacatataatcaaaatctcagacctaaagacgacttttgaaataaaccataacatatgaagaggcacttatgaaacaagaacaggtagtttataaaaaagaaccagtcagagaccctggaaattttttaaaaagcaattactaaaataaaaaatgaaaactca

SEQ ID NO: 108698 - DNA, 1576 bp, Homo sapiens
  Payload ID: 1355
  Gene Symbol: RNPEPL1
  Gene Name: arginyl aminopeptidase (aminopeptidase B)-like 1
  ENST ID: ENST00000437406
  CDS Start-End: 1-744
gcctatgtggagaagtacaagttcaccagcgtggtggcccaggacctgctggactccttcctgagcttcttcccggagctgaaggagcagagcgtggactgccgggcaggcccgccgctggctgagccggacctgtctcagggatccagcctgacccggcccgtggaggcccttttccagctgtggaccgcagaacctctggaccaggcagctgcctcggccagcgccattgacatctccaagtggaggaccttccagacagcactcttcctggaccggctcctggatgggtccccgctgccgcaggaggtggtgatgagcctgtccaagtgctactcctccctgctggactcgatgaacgctgagatccgcatccgctggctgcagattgtggtccgcaacgactactatcctgacctccacagggtgcggcgcttcctggagagccagatgtcacgcatgtacaccatcccgctgtacgaggacctctgcaccggtgccctcaagtccttcgcgctggaggtcttctaccagacgcagggccggctgcaccccaacctgcgcagagccatccagcagatcctgtcccagggcctgggctccagcacagagcccgcctcagagcccagcacggagctgggcaaggctgaagcagacacagactcggacgcacaggccctgctgcttggggacgaggcccccagcagtgccatctctctcagggacgtcaatgtgtctgcctagccctgttggcgggctgaccctcgacctcccagacaccacaattgtgccttctgtgggccaggcctgccatgactgcgtctcggctctggccatgagctctgcccaggcccacaagcccctcccctgggctctcccaggcagggagaatggggagagggacctccttgtgtctggcagagacctgtggacctggcctccccactcccagctctcttgcactgcaggccctggggccagcccgcacacaccatgcctcctgtctcaacactgacagctgtgcctagccccggatgccagcacctgccaggtgccgccccggggcaagggccccagcagccctatggtgaccgccacactgtgccttaatgtctgccgggggcccaggctgtgctgtccctgcagcacgcctccttgcagggatctgagccaccctccccgcacagccctgcaccccgcccctggggttggcagcctcagttggcccctggcagaggaacaaggacacagacattccctcagtgtggggggcaggggacacagggagaggatggttgtccctggggagggccctctggccccaggcaaccttagcccctcagaacagggagtcccaggacccagggagagtgtggggacaggacagcctgtctcttgtagcttcctggggtgggaggcacaggggcaaagcaataccccagggaaagtgggaggtggtgctggtgctctctccaggcccaccatgctgggagaggcggccagagcctggggcctccagcctgggactgctgtgatggggtatcacggtgatggtcccattaaacttccactctgc

SEQ ID NO: 108699 - DNA, 538 bp, Homo sapiens
  Payload ID: 1355
  Gene Symbol: RNPEPL1
  Gene Name: arginyl aminopeptidase (aminopeptidase B)-like 1
  ENST ID: ENST00000451363
  CDS Start-End: 195-538
atcacaagctggtgcccagggcagtccccatctctgtggagggcttgcctgccgctggcctctctagataagctcctcatgactcatgcaaccttttcatcaacccggaaggaagcagccgccggtcgccactagtgggtgctgccttcacctgcctggagactgccttccgcctggacgccctgcaccggcagatgaagcttctgggagaggacagcccggtcagcaaactgcaggcctatgtggagaagtacaagttcaccagcgtggtggcccaggacctgctggactccttcctgagcttcttcccggagctgaaggagcagagcgtggactgccgggcagggctggaattcgagcgctggctcaatgccacaggcccgccgctggctgagccggacctgtctcagggatccagcctgacccggcccgtggaggcccttttccagctgtggaccgcagaacctctggaccaggcagctgcctcggccagcgccattgacatctccaagtggaggaccttccagacagcactctt

SEQ ID NO: 108700 - DNA, 4930 bp, Homo sapiens
  Payload ID: 1356
  Gene Symbol: ATE1
  Gene Name: arginyltransferase 1
  Uniprot ID: O95260
  ENST ID: ENST00000224652
  CDS Start-End: 115-1671
ggcttcgcgcgagcctcgggaggctcccgggcggcgcgctgcattgtggggtggcggcggcggccgcgctagcgacgcggggccgggcggctgagcgttcgcggggccgaggccatggctttctgggcggggggttcgcccagcgtcgtggactatttccctagcgaggacttctaccgctgcggctactgcaagaacgagtcgggcagccgctccaatggcatgtgggcacattccatgacagtacaggattatcaggatctcatagaccgaggatggcgaagaagtggaaaatatgtgtacaaacctgtcatgaatcaaacatgttgtcctcagtacacaataaggtgccgacctttacaatttcagccttcaaaatctcacaagaaggttttgaaaaaaatgttgaaatttctagctaaaggggaggttcccaaaggaagttgtgaggatgagcccatggattccacaatggatgatgctgttgcgggtgactttgcattgataaataaactggatatacagtgtgatcttaaaacactcagtgatgacatcaaagagagtttagagagtgaaggaaaaaattcaaagaaagaagaacctcaggaattacttcagtcacaagatttcgtaggagagaagttgggctctggtgaaccgtcacattcagttaaagttcacacagttcctaagccaggcaaaggggctgatttgagtaagcctccatgtcgaaaagcaaaggaaatccggaaagaaaggaaaaggttaaaactaatgcagcagaacccagctggagaacttgagggtttccaggctcaaggtcacccaccatctttgtttccaccaaaggctaaatccaaccagccaaaatcactcgaagatttaatttttgagtctttaccagagaatgcatcacacaagttagaggtgagggtggtgagatcatctccaccaagttcgcagttcaaagccacacttctggagtcttaccaggtctataaacgttaccagatggttattcacaagaacccacctgatacgccaaccgaaagccagttcacaagattcctttgcagttcacccttggaggcagagactccccctaatgggccagattgtggctatggctcctttcaccagcagtactggcttgacggaaagatcattgctgtgggggtgattgacatcctcccaaactgtgtatcatctgtgtatttgtactacgatcctgattattcgtttttgtctttgggcgtctactctgcactacgagaaattgcttttactaggcagcttcatgagaaaacttctcaactcagctattattatatgggtttctacattcattcatgtcccaagatgaaatataagggtcagtatagaccttctgatttgctgtgccctgagacatatgtttgggtacccattgagcaatgcctgccttcacttgaaaactccaagtactgccgtttcaaccaggacccagaagcagtggatgaggatcgcagtacggaacctgaccgattgcaggtgtttcacaagagagccatcatgccttacggtgtttataagaaacagcagaaagacccaagtgaggaggctgctgttctgcagtacgccagcctggtggggcagaagtgctccgagcggatgctgctgttcagaaactgacctgttcacctctgccgggaagttcctgtgttgtgctgatgatttgtgccaggatacatattcagtacctgtggggaaataactgtcaccacccacaaattagacattttttattttgactatctatggcttttaaaaaatattttgtggcaatgtatctgtgagaatctcatagttaatataaagattttaaaactgcattatgacctagcccccataattgggatttatcattttggaggattctttctagagcaagatacgctcaaattctcctgtttgtattttgtaaaatgaagaagtgaatctaagtaacttaatcacagttgtgcattttttttggttctgttagagaaattaaaacagactgtttcctcaggcccattttaaactgaacttatgctaggaaaccttaagtatggggaaggtagaaagttcatttcatcacttagaaaatatgtcttctcaagaacaaaactgtgctgttacaactcagtgttcaatgtgaaattgctgccaaatgttatgtagtttaatagagaacttgaaaaaataaaacattaaaatggagcttgtgttagcatcaggtatccatttgttcaggacagtcctgttcatgtctgttgtcttggcatagttttttcccctagaatatagtactcccttttactctaaaaaatatcccagtttggacaataaaatacataattactctagttatattatttgctttacttctaaaaatgtaagaaattgaatttttttaaagaaaaatgttggttcctgccttgatctaagtctcatccaaaggaaataaatagtcactagttttttatcttacaactcaggacatttgtctttggttattaatggaaattagtatgtgattactttcatagttatgccacaaatcacattgaagaaggaatcattccgacctctgttccaggacaagagctagaacaatccatttcttgtcctttgatttgagagtcacagtcagggtggcttctgccacccttagtaactcagagcagaggccagccccctccttccctcactttcttttgctgagtcctttgcccacctgtcaaggtggcaggcactgtgctgggtacaggaggacagtcagacatgtcccttcttagctatagtcgagctgtctgggaaacaggatgaaaaacaggagggttattttcttgtgccctctttgtcagctgatcccctcttctgctaccagctatttggccagcaagccgtttttagtccccactttgcccatttttctgttttggttcatcgtttcttaaaagccatgttataaaacatggtagtttgaatcctgttgctaattttaaactttcctctaaaatgtactgaattttgacaaaaatttgaaaatatcctcagctaactagaataaaaaggatcataaaacaatgattttaaaactgaaatctctagaaactcaacatccaagtcagccgcatttcttcattcagagtgtgtgtgtcacacctgccaaggtgctgcgtactctgctaaccgagctagagtagtgagcaaagccattttctctgatcacaagattttacatttttctgggattttgacctgcaaagtagtctcgtaagagcatttgagagacttacttggaactgccttcagaatctatagagccttttttctctttttcctctaaaatgaaaagagcttcattttatgattataacaaaagtgacactgtaagcagttagaacattaagaagtataaataaaaagtaaaaatcatctacaaccctaccatactcagaaggagaaaagaactgtcatgtatgtatacacacatacctatgtaattttaatataaatagaattatgttctacatgctgttttatttcctcaacagtaaattatggacatgtctgaaatgtgaaataaatttcaaaataaggcttcagaaagtgtagtaagtaatctctgcattattaaaaataagcagggtagggctggtacttggctcgcttagcatttgaatgtccaacttggtgttatcactgtatcttccctccatttgtctttgtgattagcatgtaaaatggtattcataaagatcacaacccttgaatatcagatgaagagaaaacttgactccaacatcttaccacaactctggtttcttcctgcagaattcattttcagaggaaaatgatgaatcatccctgtctgtgaaccactgtgctttccttgagggtggcattgtaggttgacaccagcaaagactcagagtgacttgagcattggagatccttctacttggctgctgtattcatgcattatgttggtttgagaatagctagtgtattgatccaagtagtcaaagtgtcttaaaaggacacctatttgtccttttgagccccagctgagtgaatactgatagtggactagaaaagcatagtcaagaaaagtgacccaccttgttacttgaccagcagtctagctgagagatctgattttatgttcgtaactttctgtaaagaaagacacaaggacttttcaaagacagtttatatctttccaaggcaggaagctttgcatttgcaatcttagtgttgtgtccctttctgattttcaaatacatcacacctgccttcctgttttgggagcaaagatgtaatttcaattccccttgctaccgtccttatttaaattatttccattctaagagatttttgttatttttttaaatgtaatctgagcacttttttgtattctaaaagatagatgatatcagataaatatgttgtacatttgattaaaattatttagataaatattactatgttgacttttaaatagctttatcctatttttcattcattttgcaaatatttgttgtgtgtagtttcttaacgtgtcagaatctattatgtaaaagaacctttccagatttctgaacagtatatgctttgattttataggctttatattatttcagtatgaataaagataaggaatatgaaacagttaactaaaatgtatctgtcgttgctaacttgaaaaatgaagtagaaacagttggaaaatgtttgaattagaagttattcaagtgcacactcttttctaaaagaaagccaatgactataaggcaaaagaagtttgactgcatgtggtattttttgctcttgtatatgctttttgaacaagctatttgataaagcctgaatggaaaaaataaagctgtttctatctgcagtg

SEQ ID NO: 108701 - DNA, 4803 bp, Homo sapiens
  Payload ID: 1356
  Gene Symbol: ATE1
  Gene Name: arginyltransferase 1
  ENST ID: ENST00000369040
  CDS Start-End: 276-1544
ggcttcgcgcgagcctcgggaggctcccgggcggcgcgctgcattgtggggtggcggcggcggccgcgctagcgacgcggggccgggcggctgagcgttcgcggggccgaggccatggctttctgggcggggggttcgcccagcgtcgtggactatttccctagcgaggacttctaccgctgcggctactgcaagaacgagtcgggcagccgctccaatggtgccgacctttacaatttcagccttcaaaatctcacaagaaggttttgaaaaaaatgttgaaatttctagctaaaggggaggttcccaaaggaagttgtgaggatgagcccatggattccacaatggatgatgctgttgcgggtgactttgcattgataaataaactggatatacagtgtgatcttaaaacactcagtgatgacatcaaagagagtttagagagtgaaggaaaaaattcaaagaaagaagaacctcaggaattacttcagtcacaagatttcgtaggagagaagttgggctctggtgaaccgtcacattcagttaaagttcacacagttcctaagccaggcaaaggggctgatttgagtaagcctccatgtcgaaaagcaaaggaaatccggaaagaaaggaaaaggttaaaactaatgcagcagaacccagctggagaacttgagggtttccaggctcaaggtcacccaccatctttgtttccaccaaaggctaaatccaaccagccaaaatcactcgaagatttaatttttgagtctttaccagagaatgcatcacacaagttagaggtgaggttagtacctgtctcctttgaggacccagagttcaagtcgtctttcagccagtccttttctttgtatgtcaagtatcaagtggccatacaccaggatccacccgatgaatgtgggaagactgagttcacaagattcctttgcagttcacccttggaggcagagactccccctaatgggccagattgtggctatggctcctttcaccagcagtactggcttgacggaaagatcattgctgtgggggtgattgacatcctcccaaactgtgtatcatctgtgtatttgtactacgatcctgattattcgtttttgtctttgggcgtctactctgcactacgagaaattgcttttactaggcagcttcatgagaaaacttctcaactcagctattattatatgggtttctacattcattcatgtcccaagatgaaatataagggtcagtatagaccttctgatttgctgtgccctgagacatatgtttgggtacccattgagcaatgcctgccttcacttgaaaactccaagtactgccgtttcaaccaggacccagaagcagtggatgaggatcgcagtacggaacctgaccgattgcaggtgtttcacaagagagccatcatgccttacggtgtttataagaaacagcagaaagacccaagtgaggaggctgctgttctgcagtacgccagcctggtggggcagaagtgctccgagcggatgctgctgttcagaaactgacctgttcacctctgccgggaagttcctgtgttgtgctgatgatttgtgccaggatacatattcagtacctgtggggaaataactgtcaccacccacaaattagacattttttattttgactatctatggcttttaaaaaatattttgtggcaatgtatctgtgagaatctcatagttaatataaagattttaaaactgcattatgacctagcccccataattgggatttatcattttggaggattctttctagagcaagatacgctcaaattctcctgtttgtattttgtaaaatgaagaagtgaatctaagtaacttaatcacagttgtgcattttttttggttctgttagagaaattaaaacagactgtttcctcaggcccattttaaactgaacttatgctaggaaaccttaagtatggggaaggtagaaagttcatttcatcacttagaaaatatgtcttctcaagaacaaaactgtgctgttacaactcagtgttcaatgtgaaattgctgccaaatgttatgtagtttaatagagaacttgaaaaaataaaacattaaaatggagcttgtgttagcatcaggtatccatttgttcaggacagtcctgttcatgtctgttgtcttggcatagttttttcccctagaatatagtactcccttttactctaaaaaatatcccagtttggacaataaaatacataattactctagttatattatttgctttacttctaaaaatgtaagaaattgaatttttttaaagaaaaatgttggttcctgccttgatctaagtctcatccaaaggaaataaatagtcactagttttttatcttacaactcaggacatttgtctttggttattaatggaaattagtatgtgattactttcatagttatgccacaaatcacattgaagaaggaatcattccgacctctgttccaggacaagagctagaacaatccatttcttgtcctttgatttgagagtcacagtcagggtggcttctgccacccttagtaactcagagcagaggccagccccctccttccctcactttcttttgctgagtcctttgcccacctgtcaaggtggcaggcactgtgctgggtacaggaggacagtcagacatgtcccttcttagctatagtcgagctgtctgggaaacaggatgaaaaacaggagggttattttcttgtgccctctttgtcagctgatcccctcttctgctaccagctatttggccagcaagccgtttttagtccccactttgcccatttttctgttttggttcatcgtttcttaaaagccatgttataaaacatggtagtttgaatcctgttgctaattttaaactttcctctaaaatgtactgaattttgacaaaaatttgaaaatatcctcagctaactagaataaaaaggatcataaaacaatgattttaaaactgaaatctctagaaactcaacatccaagtcagccgcatttcttcattcagagtgtgtgtgtcacacctgccaaggtgctgcgtactctgctaaccgagctagagtagtgagcaaagccattttctctgatcacaagattttacatttttctgggattttgacctgcaaagtagtctcgtaagagcatttgagagacttacttggaactgccttcagaatctatagagccttttttctctttttcctctaaaatgaaaagagcttcattttatgattataacaaaagtgacactgtaagcagttagaacattaagaagtataaataaaaagtaaaaatcatctacaaccctaccatactcagaaggagaaaagaactgtcatgtatgtatacacacatacctatgtaattttaatataaatagaattatgttctacatgctgttttatttcctcaacagtaaattatggacatgtctgaaatgtgaaataaatttcaaaataaggcttcagaaagtgtagtaagtaatctctgcattattaaaaataagcagggtagggctggtacttggctcgcttagcatttgaatgtccaacttggtgttatcactgtatcttccctccatttgtctttgtgattagcatgtaaaatggtattcataaagatcacaacccttgaatatcagatgaagagaaaacttgactccaacatcttaccacaactctggtttcttcctgcagaattcattttcagaggaaaatgatgaatcatccctgtctgtgaaccactgtgctttccttgagggtggcattgtaggttgacaccagcaaagactcagagtgacttgagcattggagatccttctacttggctgctgtattcatgcattatgttggtttgagaatagctagtgtattgatccaagtagtcaaagtgtcttaaaaggacacctatttgtccttttgagccccagctgagtgaatactgatagtggactagaaaagcatagtcaagaaaagtgacccaccttgttacttgaccagcagtctagctgagagatctgattttatgttcgtaactttctgtaaagaaagacacaaggacttttcaaagacagtttatatctttccaaggcaggaagctttgcatttgcaatcttagtgttgtgtccctttctgattttcaaatacatcacacctgccttcctgttttgggagcaaagatgtaatttcaattccccttgctaccgtccttatttaaattatttccattctaagagatttttgttatttttttaaatgtaatctgagcacttttttgtattctaaaagatagatgatatcagataaatatgttgtacatttgattaaaattatttagataaatattactatgttgacttttaaatagctttatcctatttttcattcattttgcaaatatttgttgtgtgtagtttcttaacgtgtcagaatctattatgtaaaagaacctttccagatttctgaacagtatatgctttgattttataggctttatattatttcagtatgaataaagataaggaatatgaaacagttaactaaaatgtatctgtcgttgctaacttgaaaaatgaagtagaaacagttggaaaatgtttgaattagaagttattcaagtgcacactcttttctaaaagaaagccaatgactataaggcaaaagaagtttgactgcatgtggtattttttgctcttgtatatgctttttgaacaagctatttgataaagcctgaatggaaaaaataaagctgtttctatctgcagtg

SEQ ID NO: 108702 - DNA, 4900 bp, Homo sapiens
  Payload ID: 1356
  Gene Symbol: ATE1
  Gene Name: arginyltransferase 1
  Uniprot ID: O95260
  ENST ID: ENST00000369043
  CDS Start-End: 88-1644
cgggcggcgcgctgcattgtggggtggcggcggcggccgcgctagcgacgcggggccgggcggctgagcgttcgcggggccgaggccatggctttctgggcggggggttcgcccagcgtcgtggactatttccctagcgaggacttctaccgctgcggctactgcaagaacgagtcgggcagccgctccaatggcatgtgggcacattccatgacagtacaggattatcaggatctcatagaccgaggatggcgaagaagtggaaaatatgtgtacaaacctgtcatgaatcaaacatgttgtcctcagtacacaataaggtgccgacctttacaatttcagccttcaaaatctcacaagaaggttttgaaaaaaatgttgaaatttctagctaaaggggaggttcccaaaggaagttgtgaggatgagcccatggattccacaatggatgatgctgttgcgggtgactttgcattgataaataaactggatatacagtgtgatcttaaaacactcagtgatgacatcaaagagagtttagagagtgaaggaaaaaattcaaagaaagaagaacctcaggaattacttcagtcacaagatttcgtaggagagaagttgggctctggtgaaccgtcacattcagttaaagttcacacagttcctaagccaggcaaaggggctgatttgagtaagcctccatgtcgaaaagcaaaggaaatccggaaagaaaggaaaaggttaaaactaatgcagcagaacccagctggagaacttgagggtttccaggctcaaggtcacccaccatctttgtttccaccaaaggctaaatccaaccagccaaaatcactcgaagatttaatttttgagtctttaccagagaatgcatcacacaagttagaggtgaggttagtacctgtctcctttgaggacccagagttcaagtcgtctttcagccagtccttttctttgtatgtcaagtatcaagtggccatacaccaggatccacccgatgaatgtgggaagactgagttcacaagattcctttgcagttcacccttggaggcagagactccccctaatgggccagattgtggctatggctcctttcaccagcagtactggcttgacggaaagatcattgctgtgggggtgattgacatcctcccaaactgtgtatcatctgtgtatttgtactacgatcctgattattcgtttttgtctttgggcgtctactctgcactacgagaaattgcttttactaggcagcttcatgagaaaacttctcaactcagctattattatatgggtttctacattcattcatgtcccaagatgaaatataagggtcagtatagaccttctgatttgctgtgccctgagacatatgtttgggtacccattgagcaatgcctgccttcacttgaaaactccaagtactgccgtttcaaccaggacccagaagcagtggatgaggatcgcagtacggaacctgaccgattgcaggtgtttcacaagagagccatcatgccttacggtgtttataagaaacagcagaaagacccaagtgaggaggctgctgttctgcagtacgccagcctggtggggcagaagtgctccgagcggatgctgctgttcagaaactgacctgttcacctctgccgggaagttcctgtgttgtgctgatgatttgtgccaggatacatattcagtacctgtggggaaataactgtcaccacccacaaattagacattttttattttgactatctatggcttttaaaaaatattttgtggcaatgtatctgtgagaatctcatagttaatataaagattttaaaactgcattatgacctagcccccataattgggatttatcattttggaggattctttctagagcaagatacgctcaaattctcctgtttgtattttgtaaaatgaagaagtgaatctaagtaacttaatcacagttgtgcattttttttggttctgttagagaaattaaaacagactgtttcctcaggcccattttaaactgaacttatgctaggaaaccttaagtatggggaaggtagaaagttcatttcatcacttagaaaatatgtcttctcaagaacaaaactgtgctgttacaactcagtgttcaatgtgaaattgctgccaaatgttatgtagtttaatagagaacttgaaaaaataaaacattaaaatggagcttgtgttagcatcaggtatccatttgttcaggacagtcctgttcatgtctgttgtcttggcatagttttttcccctagaatatagtactcccttttactctaaaaaatatcccagtttggacaataaaatacataattactctagttatattatttgctttacttctaaaaatgtaagaaattgaatttttttaaagaaaaatgttggttcctgccttgatctaagtctcatccaaaggaaataaatagtcactagttttttatcttacaactcaggacatttgtctttggttattaatggaaattagtatgtgattactttcatagttatgccacaaatcacattgaagaaggaatcattccgacctctgttccaggacaagagctagaacaatccatttcttgtcctttgatttgagagtcacagtcagggtggcttctgccacccttagtaactcagagcagaggccagccccctccttccctcactttcttttgctgagtcctttgcccacctgtcaaggtggcaggcactgtgctgggtacaggaggacagtcagacatgtcccttcttagctatagtcgagctgtctgggaaacaggatgaaaaacaggagggttattttcttgtgccctctttgtcagctgatcccctcttctgctaccagctatttggccagcaagccgtttttagtccccactttgcccatttttctgttttggttcatcgtttcttaaaagccatgttataaaacatggtagtttgaatcctgttgctaattttaaactttcctctaaaatgtactgaattttgacaaaaatttgaaaatatcctcagctaactagaataaaaaggatcataaaacaatgattttaaaactgaaatctctagaaactcaacatccaagtcagccgcatttcttcattcagagtgtgtgtgtcacacctgccaaggtgctgcgtactctgctaaccgagctagagtagtgagcaaagccattttctctgatcacaagattttacatttttctgggattttgacctgcaaagtagtctcgtaagagcatttgagagacttacttggaactgccttcagaatctatagagccttttttctctttttcctctaaaatgaaaagagcttcattttatgattataacaaaagtgacactgtaagcagttagaacattaagaagtataaataaaaagtaaaaatcatctacaaccctaccatactcagaaggagaaaagaactgtcatgtatgtatacacacatacctatgtaattttaatataaatagaattatgttctacatgctgttttatttcctcaacagtaaattatggacatgtctgaaatgtgaaataaatttcaaaataaggcttcagaaagtgtagtaagtaatctctgcattattaaaaataagcagggtagggctggtacttggctcgcttagcatttgaatgtccaacttggtgttatcactgtatcttccctccatttgtctttgtgattagcatgtaaaatggtattcataaagatcacaacccttgaatatcagatgaagagaaaacttgactccaacatcttaccacaactctggtttcttcctgcagaattcattttcagaggaaaatgatgaatcatccctgtctgtgaaccactgtgctttccttgagggtggcattgtaggttgacaccagcaaagactcagagtgacttgagcattggagatccttctacttggctgctgtattcatgcattatgttggtttgagaatagctagtgtattgatccaagtagtcaaagtgtcttaaaaggacacctatttgtccttttgagccccagctgagtgaatactgatagtggactagaaaagcatagtcaagaaaagtgacccaccttgttacttgaccagcagtctagctgagagatctgattttatgttcgtaactttctgtaaagaaagacacaaggacttttcaaagacagtttatatctttccaaggcaggaagctttgcatttgcaatcttagtgttgtgtccctttctgattttcaaatacatcacacctgccttcctgttttgggagcaaagatgtaatttcaattccccttgctaccgtccttatttaaattatttccattctaagagatttttgttatttttttaaatgtaatctgagcacttttttgtattctaaaagatagatgatatcagataaatatgttgtacatttgattaaaattatttagataaatattactatgttgacttttaaatagctttatcctatttttcattcattttgcaaatatttgttgtgtgtagtttcttaacgtgtcagaatctattatgtaaaagaacctttccagatttctgaacagtatatgctttgattttataggctttatattatttcagtatgaataaagataaggaatatgaaacagttaactaaaatgtatctgtcgttgctaacttgaaaaatgaagtagaaacagttggaaaatgtttgaattagaagttattcaagtgcacactcttttctaaaagaaagccaatgactataaggcaaaagaagtttgactgcatgtggtattttttgctcttgtatatgctttttgaacaagctatttgataaagcctgaatggaaaaaataaagctgtttctatctgca

SEQ ID NO: 108703 - DNA, 2031 bp, Homo sapiens
  Payload ID: 1356
  Gene Symbol: ATE1
  Gene Name: arginyltransferase 1
  ENST ID: ENST00000423243
  CDS Start-End: 1-1546
ggcggggggttcgcccagcgtcgtggactatttccctagcgaggacttctaccgctgcggctactgcaagaacgagtcgggcagccgctccaatggcatgtgggcacattccatgacagtacaggattatcaggatctcatagaccgaggatggcgaagaagtggaaaatatgtgtacaaacctgtcatgaatcaaacatgttgtcctcagtacacaataaggtgccgacctttacaatttcagccttcaaaatctcacaagaaggttttgaaaaaaatgttgaaatttctagctaaaggggaggttcccaaaggaagttgtgaggatgagcccatggattccacaatggatgatgctgttgcgggtgactttgcattgataaataaactggatatacagtgtgatcttaaaacactcagtgatgacatcaaagagagtttagagagtgaaggaaaaaattcaaagaaagaagaacctcaggaattacttcagtcacaagatttcgtaggagagaagttgggctctggtgaaccgtcacattcagttaaagttcacacagttcctaagccaggcaaaggggctgatttgagtaagcctccatgtcgaaaagcaaaggaaatccggaaagaaaggaaaaggttaaaactaatgcagcagaacccagctggagaacttgagggtttccaggctcaaggtcacccaccatctttgtttccaccaaaggctaaatccaaccagccaaaatcactcgaagatttaatttttgagtctttaccagagaatgcatcacacaagttagaggtgagggtggtgagatcatctccaccaagttcgcagttcaaagccacacttctggagtcttaccaggtctataaacgttaccagatggttattcacaagaacccacctgatacgccaaccgaaagccagttcacaagattcctttgcagttcacccttggaggcagagactccccctaatgggccagattgtggctatggctcctttcaccagcagtactggcttgacggaaagatcattgctgtgggggtgattgacatcctcccaaactgtgtatcatctgtgtatttgtactacgatcctgattattcgtttttgtctttgggcgtctactctgcactacgagaaattgcttttactaggcagcttcatgagaaaacttctcaactcagctattattatatgggtttctacattcattcatgtcccaagatgaaatataagggtcagtatagaccttctgatttgctgtgccctgagacatatgtttgggtacccattgagcaatgcctgccttcacttgaaaactccaagtactgccgtttcaaccaggacccagaagcagtggatgaggatcgcagtacggaacctgaccgattgcaggtgtttcacaagagagccatcatgccttacggtgtttataagaaacagcagaaagacccaagtgaggaggctgctgttctgcagtacgccagcctggtggggcagaagtgctccgagcggatgctgctgttcagaaactgacctgttcacctctgccgggaagttcctgtgttgtgctgatgatttgtgccaggatacatattcagtacctgtggggaaataactgtcaccacccacaaattagacattttttattttgactatctatggcttttaaaaaatattttgtggcaatgtatctgtgagaatctcatagttaatataaagattttaaaactgcattatgacctagcccccataattgggatttatcattttggaggattctttctagagcaagatacgctcaaattctcctgtttgtattttgtaaaatgaagaagtgaatctaagtaacttaatcacagttgtgcattttttttggttctgttagagaaattaaaacagactgtttcctcaggcccattttaaactgaacttatgctaggaaaccttaagtatggggaaggtagaaagttcatttcatcacttagaaaatatgtcttctcaagaacaaaactgtgctg

SEQ ID NO: 108704 - DNA, 697 bp, Homo sapiens
  Payload ID: 1356
  Gene Symbol: ATE1
  Gene Name: arginyltransferase 1
  ENST ID: ENST00000455628
  CDS Start-End: 32-697
tggtcggcccgagcggaccctcgcggcggccatggcgtcggtggtggaatacaagggcctcagggccggctaccactgcggctactgcgattccaaggagggcaaagcgtcctgcggcatgtgggcacattccatgacagtacaggattatcaggatctcatagaccgaggatggcgaagaagtggaaaatatgtgtacaaacctgtcatgaatcaaacatgttgtcctcagtacacaataaggtgccgacctttacaatttcagccttcaaaatctcacaagaaggttttgaaaaaaatgttgaaatttctagctaaaggggaggttcccaaaggaagttgtgaggatgagcccatggattccacaatggatgatgctgttgcgggtgactttgcattgataaataaactggatatacagtgtgatcttaaaacactcagtgatgacatcaaagagagtttagagagtgaaggaaaaaattcaaagaaagaagaacctcaggaattacttcagtcacaagatttcgtaggagagaagttgggctctggtgaaccgtcacattcagttaaagttcacacagttcctaagccaggcaaaggggctgatttgagtaagcctccatgtcgaaaagcaaaggaaatccggaaagaaaggaaaaggttaaaactaatgcagcagaacccagctggagaactt

SEQ ID NO: 108705 - DNA, 5165 bp, Homo sapiens
  Payload ID: 1356
  Gene Symbol: ATE1
  Gene Name: arginyltransferase 1
  ENST ID: ENST00000540606
  CDS Start-End: 371-1906
acctgcttgtgttcttgtattcagggcactggagtgcgtgccagctggtctggaagcagctccagcaagtcacttacacggtggccaggggcggcctgactttcaatccgagacccgccgggaatgactttgggataatcacaacctccggtcctcagtttccttacctgtgaaatggggctgataacgcacagctgtgggaagcaccggcccaaacgcagggcttggggacacgaccaccatccccgcccacgggtccccgcgccaggcttcgctctccacccctcccgccgcgggccccagcgcttcgccgaggtcggccccgggcgccaagaggcgtggtcggcccgagcggaccctcgcggcggccatggcgtcggtggtggaatacaagggcctcagggccggctaccactgcggctactgcgattccaaggagggcaaagcgtcctgcggcatgtgggcacattccatgacagtacaggattatcaggatctcatagaccgaggatggcgaagaagtggaaaatatgtgtacaaacctgtcatgaatcaaacatgttgtcctcagtacacaataaggtgccgacctttacaatttcagccttcaaaatctcacaagaaggttttgaaaaaaatgttgaaatttctagctaaaggggaggttcccaaaggaagttgtgaggatgagcccatggattccacaatggatgatgctgttgcgggtgactttgcattgataaataaactggatatacagtgtgatcttaaaacactcagtgatgacatcaaagagagtttagagagtgaaggaaaaaattcaaagaaagaagaacctcaggaattacttcagtcacaagatttcgtaggagagaagttgggctctggtgaaccgtcacattcagttaaagttcacacagttcctaagccaggcaaaggggctgatttgagtaagcctccatgtcgaaaagcaaaggaaatccggaaagaaaggaaaaggttaaaactaatgcagcagaacccagctggagaacttgagggtttccaggctcaaggtcacccaccatctttgtttccaccaaaggctaaatccaaccagccaaaatcactcgaagatttaatttttgagtctttaccagagaatgcatcacacaagttagaggtgaggttagtacctgtctcctttgaggacccagagttcaagtcgtctttcagccagtccttttctttgtatgtcaagtatcaagtggccatacaccaggatccacccgatgaatgtgggaagactgagttcacaagattcctttgcagttcacccttggaggcagagactccccctaatgggccagattgtggctatggctcctttcaccagcagtactggcttgacggaaagatcattgctgtgggggtgattgacatcctcccaaactgtgtatcatctgtgtatttgtactacgatcctgattattcgtttttgtctttgggcgtctactctgcactacgagaaattgcttttactaggcagcttcatgagaaaacttctcaactcagctattattatatgggtttctacattcattcatgtcccaagatgaaatataagggtcagtatagaccttctgatttgctgtgccctgagacatatgtttgggtacccattgagcaatgcctgccttcacttgaaaactccaagtactgccgtttcaaccaggacccagaagcagtggatgaggatcgcagtacggaacctgaccgattgcaggtgtttcacaagagagccatcatgccttacggtgtttataagaaacagcagaaagacccaagtgaggaggctgctgttctgcagtacgccagcctggtggggcagaagtgctccgagcggatgctgctgttcagaaactgacctgttcacctctgccgggaagttcctgtgttgtgctgatgatttgtgccaggatacatattcagtacctgtggggaaataactgtcaccacccacaaattagacattttttattttgactatctatggcttttaaaaaatattttgtggcaatgtatctgtgagaatctcatagttaatataaagattttaaaactgcattatgacctagcccccataattgggatttatcattttggaggattctttctagagcaagatacgctcaaattctcctgtttgtattttgtaaaatgaagaagtgaatctaagtaacttaatcacagttgtgcattttttttggttctgttagagaaattaaaacagactgtttcctcaggcccattttaaactgaacttatgctaggaaaccttaagtatggggaaggtagaaagttcatttcatcacttagaaaatatgtcttctcaagaacaaaactgtgctgttacaactcagtgttcaatgtgaaattgctgccaaatgttatgtagtttaatagagaacttgaaaaaataaaacattaaaatggagcttgtgttagcatcaggtatccatttgttcaggacagtcctgttcatgtctgttgtcttggcatagttttttcccctagaatatagtactcccttttactctaaaaaatatcccagtttggacaataaaatacataattactctagttatattatttgctttacttctaaaaatgtaagaaattgaatttttttaaagaaaaatgttggttcctgccttgatctaagtctcatccaaaggaaataaatagtcactagttttttatcttacaactcaggacatttgtctttggttattaatggaaattagtatgtgattactttcatagttatgccacaaatcacattgaagaaggaatcattccgacctctgttccaggacaagagctagaacaatccatttcttgtcctttgatttgagagtcacagtcagggtggcttctgccacccttagtaactcagagcagaggccagccccctccttccctcactttcttttgctgagtcctttgcccacctgtcaaggtggcaggcactgtgctgggtacaggaggacagtcagacatgtcccttcttagctatagtcgagctgtctgggaaacaggatgaaaaacaggagggttattttcttgtgccctctttgtcagctgatcccctcttctgctaccagctatttggccagcaagccgtttttagtccccactttgcccatttttctgttttggttcatcgtttcttaaaagccatgttataaaacatggtagtttgaatcctgttgctaattttaaactttcctctaaaatgtactgaattttgacaaaaatttgaaaatatcctcagctaactagaataaaaaggatcataaaacaatgattttaaaactgaaatctctagaaactcaacatccaagtcagccgcatttcttcattcagagtgtgtgtgtcacacctgccaaggtgctgcgtactctgctaaccgagctagagtagtgagcaaagccattttctctgatcacaagattttacatttttctgggattttgacctgcaaagtagtctcgtaagagcatttgagagacttacttggaactgccttcagaatctatagagccttttttctctttttcctctaaaatgaaaagagcttcattttatgattataacaaaagtgacactgtaagcagttagaacattaagaagtataaataaaaagtaaaaatcatctacaaccctaccatactcagaaggagaaaagaactgtcatgtatgtatacacacatacctatgtaattttaatataaatagaattatgttctacatgctgttttatttcctcaacagtaaattatggacatgtctgaaatgtgaaataaatttcaaaataaggcttcagaaagtgtagtaagtaatctctgcattattaaaaataagcagggtagggctggtacttggctcgcttagcatttgaatgtccaacttggtgttatcactgtatcttccctccatttgtctttgtgattagcatgtaaaatggtattcataaagatcacaacccttgaatatcagatgaagagaaaacttgactccaacatcttaccacaactctggtttcttcctgcagaattcattttcagaggaaaatgatgaatcatccctgtctgtgaaccactgtgctttccttgagggtggcattgtaggttgacaccagcaaagactcagagtgacttgagcattggagatccttctacttggctgctgtattcatgcattatgttggtttgagaatagctagtgtattgatccaagtagtcaaagtgtcttaaaaggacacctatttgtccttttgagccccagctgagtgaatactgatagtggactagaaaagcatagtcaagaaaagtgacccaccttgttacttgaccagcagtctagctgagagatctgattttatgttcgtaactttctgtaaagaaagacacaaggacttttcaaagacagtttatatctttccaaggcaggaagctttgcatttgcaatcttagtgttgtgtccctttctgattttcaaatacatcacacctgccttcctgttttgggagcaaagatgtaatttcaattccccttgctaccgtccttatttaaattatttccattctaagagatttttgttatttttttaaatgtaatctgagcacttttttgtattctaaaagatagatgatatcagataaatatgttgtacatttgattaaaattatttagataaatattactatgttgacttttaaatagctttatcctatttttcattcattttgcaaatatttgttgtgtgtagtttcttaacgtgtcagaatctattatgtaaaagaacctttccagatttctgaacagtatatgctttgattttataggctttatattatttcagtatgaataaagataaggaatatgaaacagttaactaaaatgtatctgtcgttgctaacttgaaaaatgaagtagaaacagttggaaaatgtttgaattagaagttattcaagtgcacactcttttctaaaagaaagccaatgactataaggcaaaagaagtttgactgcatgtggtattttttgctcttgtatatgctttttgaacaagctatttgataaagcctgaatggaaaaaataaagctgtttctatctgcagtg

SEQ ID NO: 108706 - DNA, 4826 bp, Homo sapiens
  Payload ID: 1356
  Gene Symbol: ATE1
  Gene Name: arginyltransferase 1
  ENST ID: ENST00000543447
  CDS Start-End: 356-1567
ggcttcgcgcgagcctcgggaggctcccgggcggcgcgctgcattgtggggtggcggcggcggccgcgctagcgacgcggggccgggcggctgagcgttcgcggggccgaggccatggctttctgggcggggggttcgcccagcgtcgtggactatttccctagcgaggacttctaccgctgcggctactgcaagaacgagtcgggcagccgctccaatggcatgtgggcacattccatgacagtacaggattatcaggatctcatagaccgaggatggcgaagaagtggaaaatatgtgtacaaacctgtcatgaatcaaacatgttgtcctcagtacacaataagatgagcccatggattccacaatggatgatgctgttgcgggtgactttgcattgataaataaactggatatacagtgtgatcttaaaacactcagtgatgacatcaaagagagtttagagagtgaaggaaaaaattcaaagaaagaagaacctcaggaattacttcagtcacaagatttcgtaggagagaagttgggctctggtgaaccgtcacattcagttaaagttcacacagttcctaagccaggcaaaggggctgatttgagtaagcctccatgtcgaaaagcaaaggaaatccggaaagaaaggaaaaggttaaaactaatgcagcagaacccagctggagaacttgagggtttccaggctcaaggtcacccaccatctttgtttccaccaaaggctaaatccaaccagccaaaatcactcgaagatttaatttttgagtctttaccagagaatgcatcacacaagttagaggtgagggtggtgagatcatctccaccaagttcgcagttcaaagccacacttctggagtcttaccaggtctataaacgttaccagatggttattcacaagaacccacctgatacgccaaccgaaagccagttcacaagattcctttgcagttcacccttggaggcagagactccccctaatgggccagattgtggctatggctcctttcaccagcagtactggcttgacggaaagatcattgctgtgggggtgattgacatcctcccaaactgtgtatcatctgtgtatttgtactacgatcctgattattcgtttttgtctttgggcgtctactctgcactacgagaaattgcttttactaggcagcttcatgagaaaacttctcaactcagctattattatatgggtttctacattcattcatgtcccaagatgaaatataagggtcagtatagaccttctgatttgctgtgccctgagacatatgtttgggtacccattgagcaatgcctgccttcacttgaaaactccaagtactgccgtttcaaccaggacccagaagcagtggatgaggatcgcagtacggaacctgaccgattgcaggtgtttcacaagagagccatcatgccttacggtgtttataagaaacagcagaaagacccaagtgaggaggctgctgttctgcagtacgccagcctggtggggcagaagtgctccgagcggatgctgctgttcagaaactgacctgttcacctctgccgggaagttcctgtgttgtgctgatgatttgtgccaggatacatattcagtacctgtggggaaataactgtcaccacccacaaattagacattttttattttgactatctatggcttttaaaaaatattttgtggcaatgtatctgtgagaatctcatagttaatataaagattttaaaactgcattatgacctagcccccataattgggatttatcattttggaggattctttctagagcaagatacgctcaaattctcctgtttgtattttgtaaaatgaagaagtgaatctaagtaacttaatcacagttgtgcattttttttggttctgttagagaaattaaaacagactgtttcctcaggcccattttaaactgaacttatgctaggaaaccttaagtatggggaaggtagaaagttcatttcatcacttagaaaatatgtcttctcaagaacaaaactgtgctgttacaactcagtgttcaatgtgaaattgctgccaaatgttatgtagtttaatagagaacttgaaaaaataaaacattaaaatggagcttgtgttagcatcaggtatccatttgttcaggacagtcctgttcatgtctgttgtcttggcatagttttttcccctagaatatagtactcccttttactctaaaaaatatcccagtttggacaataaaatacataattactctagttatattatttgctttacttctaaaaatgtaagaaattgaatttttttaaagaaaaatgttggttcctgccttgatctaagtctcatccaaaggaaataaatagtcactagttttttatcttacaactcaggacatttgtctttggttattaatggaaattagtatgtgattactttcatagttatgccacaaatcacattgaagaaggaatcattccgacctctgttccaggacaagagctagaacaatccatttcttgtcctttgatttgagagtcacagtcagggtggcttctgccacccttagtaactcagagcagaggccagccccctccttccctcactttcttttgctgagtcctttgcccacctgtcaaggtggcaggcactgtgctgggtacaggaggacagtcagacatgtcccttcttagctatagtcgagctgtctgggaaacaggatgaaaaacaggagggttattttcttgtgccctctttgtcagctgatcccctcttctgctaccagctatttggccagcaagccgtttttagtccccactttgcccatttttctgttttggttcatcgtttcttaaaagccatgttataaaacatggtagtttgaatcctgttgctaattttaaactttcctctaaaatgtactgaattttgacaaaaatttgaaaatatcctcagctaactagaataaaaaggatcataaaacaatgattttaaaactgaaatctctagaaactcaacatccaagtcagccgcatttcttcattcagagtgtgtgtgtcacacctgccaaggtgctgcgtactctgctaaccgagctagagtagtgagcaaagccattttctctgatcacaagattttacatttttctgggattttgacctgcaaagtagtctcgtaagagcatttgagagacttacttggaactgccttcagaatctatagagccttttttctctttttcctctaaaatgaaaagagcttcattttatgattataacaaaagtgacactgtaagcagttagaacattaagaagtataaataaaaagtaaaaatcatctacaaccctaccatactcagaaggagaaaagaactgtcatgtatgtatacacacatacctatgtaattttaatataaatagaattatgttctacatgctgttttatttcctcaacagtaaattatggacatgtctgaaatgtgaaataaatttcaaaataaggcttcagaaagtgtagtaagtaatctctgcattattaaaaataagcagggtagggctggtacttggctcgcttagcatttgaatgtccaacttggtgttatcactgtatcttccctccatttgtctttgtgattagcatgtaaaatggtattcataaagatcacaacccttgaatatcagatgaagagaaaacttgactccaacatcttaccacaactctggtttcttcctgcagaattcattttcagaggaaaatgatgaatcatccctgtctgtgaaccactgtgctttccttgagggtggcattgtaggttgacaccagcaaagactcagagtgacttgagcattggagatccttctacttggctgctgtattcatgcattatgttggtttgagaatagctagtgtattgatccaagtagtcaaagtgtcttaaaaggacacctatttgtccttttgagccccagctgagtgaatactgatagtggactagaaaagcatagtcaagaaaagtgacccaccttgttacttgaccagcagtctagctgagagatctgattttatgttcgtaactttctgtaaagaaagacacaaggacttttcaaagacagtttatatctttccaaggcaggaagctttgcatttgcaatcttagtgttgtgtccctttctgattttcaaatacatcacacctgccttcctgttttgggagcaaagatgtaatttcaattccccttgctaccgtccttatttaaattatttccattctaagagatttttgttatttttttaaatgtaatctgagcacttttttgtattctaaaagatagatgatatcagataaatatgttgtacatttgattaaaattatttagataaatattactatgttgacttttaaatagctttatcctatttttcattcattttgcaaatatttgttgtgtgtagtttcttaacgtgtcagaatctattatgtaaaagaacctttccagatttctgaacagtatatgctttgattttataggctttatattatttcagtatgaataaagataaggaatatgaaacagttaactaaaatgtatctgtcgttgctaacttgaaaaatgaagtagaaacagttggaaaatgtttgaattagaagttattcaagtgcacactcttttctaaaagaaagccaatgactataaggcaaaagaagtttgactgcatgtggtattttttgctcttgtatatgctttttgaacaagctatttgataaagcctgaatggaaaaaataaagctgtttctatctgcagtg

SEQ ID NO: 108707 - DNA, 2146 bp, Homo sapiens
  Payload ID: 1357
  Gene Symbol: RARS
  Gene Name: arginyl-tRNA synthetase
  Uniprot ID: P54136
  ENST ID: ENST00000231572
  CDS Start-End: 55-2037
gaggctgaccgtttccgcttccgtccacttggcgagtgagacgctgatgggaggatggacgtactggtgtctgagtgctccgcgcggctgctgcagcaggaagaagagattaaatctctgactgctgaaattgaccggttgaaaaactgtggctgtttaggagcttctccaaatttggagcagttacaagaagaaaatttaaaattaaagtatcgactgaatattcttcgaaagagtcttcaggcagaaaggaacaaaccaactaaaaatatgattaacattattagccgcctacaagaggtctttggtcatgcaattaaggctgcatatccagatttggaaaatcctcctctgctagtgacaccaagtcagcaggccaagtttggggactatcagtgtaatagtgctatgggtatttctcagatgctcaaaaccaaggaacagaaagttaatccaagagaaattgctgaaaacattaccaaacacctcccagacaatgaatgtattgaaaaagttgaaattgctggtcctggttttattaatgtccacttaagaaaggattttgtatcagaacaattgaccagtcttctagtgaatggagttcaactacctgctctgggagagaataaaaaggttatagttgacttttcctcccctaatatagctaaagagatgcatgtaggccacctgaggtcaactatcataggagagagtataagccgcctctttgaatttgcagggtatgacgtgctcaggttaaatcatgtaggagactgggggacccagtttggcatgctcatcgctcacctgcaagacaaatttccagattatctaacagtttcacctcctattggggatcttcaggtcttttataaggaatctaagaagaggtttgatactgaggaggaatttaagaagcgagcatatcagtgtgtagttctgctccagggtaaaaacccagatattacaaaagcttggaagcttatctgtgatgtctcccgccaagagttaaataaaatctatgatgcattggacgtctctttaatagagagaggggaatccttctatcaagataggatgaatgatattgtaaaggaatttgaagatagaggatttgtgcaggtggatgatggcagaaagattgtatttgtcccagggtgttccataccattaaccatagtaaaatcagatggaggttatacctatgatacatctgacctggctgctattaaacaaagactatttgaggaaaaagcagatatgattatctatgttgtggacaatggacaatctgtgcacttccagacaatatttgctgctgctcaaatgattggttggtatgaccctaaagtaactcgagtcttccatgctggatttggtgtggtgctaggggaagacaagaaaaagtttaaaacacgttcgggtgaaacagtgcgcctcatggatcttctgggagaaggactaaaacgatccatggacaagttgaaggaaaaagaaagagacaaggtcttaactgcagaggaattgaatgctgctcagacatccgttgcgtatggctgcatcaaatatgctgacctttcccataaccggttgaatgactacatcttctcctttgacaaaatgctagatgacagaggaaatacagctgcttacttgttgtatgccttcactagaatcaggtctattgcacgtctggccaatattgatgaagaaatgctccaaaaagctgctcgagaaaccaagattcttttggatcatgagaaggaatggaaactaggccggtgcattttacggttccctgagattctgcaaaagattttagatgacttatttctccacactctctgtgattatatatatgagctggcaactgctttcacagagttctatgatagctgctactgtgtggagaaagatagacagactggaaaaatattgaaggtgaacatgtggcgtatgctgctatgtgaagcagtagctgctgtcatggccaaggggtttgatatcctgggaataaaacctgtccaaaggatgtaatccttcataggtttgaacactgtgtgtttttaccaaagtggccattggcactgtttgcttttttacaatcatgtggacacaagcataagtaaagaaaatttgtcaacca

SEQ ID NO: 108708 - DNA, 581 bp, Homo sapiens
  Payload ID: 1357
  Gene Symbol: RARS
  Gene Name: arginyl-tRNA synthetase
  ENST ID: ENST00000521329
  CDS Start-End: 30-206
cacttggcgagtgagacgctgatgggaggatggacgtactggtgtctgagtgctccgcgcggctgctgcagcagagtctcgctctgtcaagcagactggagtgcagtggcacgatctcgactcaccgcaacctcagcctctgggattcaggcaattctcctgcctcagcctcccaagtagctaggattacaggaagaagagattaaatctctgactgctgaaattgaccggttgaaaaactgtggctgtttaggagcttctccaaatttggagcagttacaagaagaaaatttaaaattaaagtatcgactgaatattcttcgaaagagtcttcaggcagaaaggaacaaaccaactaaaaatatgattaacattattagccgcctacaagaggtctttggtcatgcaattaaggctgcatatccagatttggaaaatcctcctctgctagtgacaccaagtcagcaggccaagtttggggactatcagtgtaatagtgctatgggtatttctcagatgctcaaaaccaaggaacagaaagttaatccaagagaaattgctgaaaacattaccaaacacct

SEQ ID NO: 108709 - DNA, 1990 bp, Homo sapiens
  Payload ID: 1357
  Gene Symbol: RARS
  Gene Name: arginyl-tRNA synthetase
  ENST ID: ENST00000520013
  CDS Start-End: 9-398
atgggaggatggacgtactggtgtctgagtgctccgcgcggctgctgcagcaggaagaagagattaaatctctgactgctgaaattgaccggttgaaaaactgtggctgtttaggagcttctccaaatttggagcagttacaagaagaaaatttaaaattaaagtatcgactgaatattcttcgaaagagtcttcaggcagaaaggaacaaaccaactaaaaatatgattaacattattagccgcctacaagaggtctttggtcatgcaattaaggctgcatatccagatttggaaaatcctcctctgctagtgacaccaagtcagcaggccaagtttggggactatcagtgtaatagtgctatgggtatttctcaggttttattaatgtccacttaagaaaggattttgtatcagaacaattgaccagtcttctagtgaatggagttcaactacctgctctgggagagaataaaaaggttatagttgacttttcctcccctaatatagctaaagagatgcatgtaggccacctgaggtcaactatcataggagagagtataagccgcctctttgaatttgcagggtatgacgtgctcaggttaaatcatgtaggagactgggggacccagtttggcatgctcatcgctcacctgcaagacaaatttccagattatctaacagtttcacctcctattggggatcttcaggtcttttataaggaatctaagaagaggtttgatactgaggaggaatttaagaagcgagcatatcagtgtgtagttctgctccagggtaaaaacccagatattacaaaagcttggaagcttatctgtgatgtctcccgccaagagttaaataaaatctatgatgcattggacgtctctttaatagagagaggggaatccttctatcaagataggatgaatgatattgtaaaggaatttgaagatagaggatttgtgcaggtggatgatggcagaaagattgtatttgtcccagggtgttccataccattaaccatagtaaaatcagatggaggttatacctatgatacatctgacctggctgctattaaacaaagactatttgaggaaaaagcagatatgattatctatgttgtggacaatggacaatctgtgcacttccagacaatatttgctgctgctcaaatgattggttggtatgaccctaaagtaactcgagtcttccatgctggatttggtgtggtgctaggggaagacaagaaaaagtttaaaacacgttcgggtgaaacagtgcgcctcatggatcttctgggagaaggactaaaacgatccatggacaagttgaaggaaaaagaaagagacaaggtcttaactgcagaggaattgaatgctgctcagacatccgttgcgtatggctgcatcaaatatgctgacctttcccataaccggttgaatgactacatcttctcctttgacaaaatgctagatgacagaggaaatacagctgcttacttgttgtatgccttcactagaatcaggtctattgcacgtctggccaatattgatgaagaaatgctccaaaaagctgctcgagaaaccaagattcttttggatcatgagaaggaatggaaactaggccggtgcattttacggttccctgagattctgcaaaagattttagatgacttatttctccacactctctgtgattatatatatgagctggcaactgctttcacagagttctatgatagctgctactgtgtggagaaagatagacagactggaaaaatattgaaggtgaacatgtggcgtatgctgctatgtgaagcagtagctgctgtcatggccaaggggtttgatatcctgggaataaaacctgtccaaaggatgtaatccttcataggtttgaacactgtgtgtttttaccaaagtggccattggcactgtttgcttttttacaatcatgtggacacaagcataagtaaagaaaatttgtcaacc

SEQ ID NO: 108710 - DNA, 559 bp, Homo sapiens
  Payload ID: 1357
  Gene Symbol: RARS
  Gene Name: arginyl-tRNA synthetase
  ENST ID: ENST00000522834
  CDS Start-End: 18-359
gagacgctgatgggaggatggacgtactggtgtctgagtgctccgcgcggctgctgcagcaggaagaagagattaaatctctgactgctgaaattgaccggttgaaaaactgtggctgtttaggagcttctccaaatttggagcagttacaagaagaaaatttaaaattaaagtatcgactgaatattcttcgaaagagtcttcaggcagaaaggaacaaaccaactaaaaatatgattaacattattagccgcctacaagaggtctttggtcatgcaattaaggctgcatatccagatttggaaaatcctcctctgctagtgacaccaaatgctcaaaaccaaggaacagaaagttaatccaagagaaattgctgaaaacattaccaaacacctcccagacaatgaatgtattgaaaaagttgaaattgctggtcctggttttattaatgtccacttaagaaaggattttgtatcagaacaattgaccagtcttctagtgaatggagttcaactacctgctctgggagagaataaaaaggttatagttgacttttcct

SEQ ID NO: 108711 - DNA, 177 bp, Homo sapiens
  Payload ID: 1357
  Gene Symbol: RARS
  Gene Name: arginyl-tRNA synthetase
  ENST ID: ENST00000626454
  CDS Start-End: 1-177
atggacgtactggtgtctgagtgctccgcgcggctgctgcagcagagtctcgctctgtcaagcagactggagtgcagtggcacgatctcgactcaccgcaacctcagcctctgggattcaggcaattctcctgcctcagcctcccaagtagctaggattacaggaagaagagattaa

SEQ ID NO: 108712 - DNA, 1818 bp, Homo sapiens
  Payload ID: 1358
  Gene Symbol: RARS2
  Gene Name: arginyl-tRNA synthetase 2, mitochondrial
  Uniprot ID: Q5T160
  ENST ID: ENST00000369536
  CDS Start-End: 47-1783
cgaggccggaactggcggactgcggcgcacttccgtagaggtggacatggcgtgcggctttcgccgcgctattgcttgccagctttccagagtgttgaatcttccaccagaaaacttgatcacatcaatatctgcagttccaatttcccaaaaagaagaagtagctgattttcagctttctgtggattctttattggaaaaagacaatgaccattcaagaccagatattcaagttcaagccaagagactagcagagaagctaagatgtgatacagtggtgagtgaaatcagtactggtcaaaggactgtaaatttcaaaataaacagagagctcttaacaaagacagtgctacaacaagtaattgaagatggctcaaaatatggattaaaaagtgaacttttctctggacttccccagaagaagattgtggttgaattcagttcacctaatgttgccaaaaaatttcatgttggacatttgcgttctaccatcataggaaattttatagcaaatctcaaagaagctttaggacatcaagtaataagaataaattaccttggcgattggggcatgcagtttggtcttctgggaactggcttccagctgtttggctatgaggaaaaactgcagtccaatcctctacagcatctctttgaagtttatgtacaagttaataaagaagcagcagatgataaaagtgtagcaaaagcagcacaggagttcttccaacgattggaactgggcgatgtgcaagcactttcactgtggcaaaaatttcgggacttgagcattgaagagtacattcgggtttacaagcgtctgggagtatattttgatgaatattcaggagaatcattttatcgtgaaaaatctcaagaggtcttaaagttgctggagagtaaaggactcctactgaaaacaataaaaggaacggctgtagtagatctctctgggaatggcgacccctcctcaatttgtactgtaatgcgaagtgatgggacttctctctatgcaaccagagatcttgcagctgctatagatcgaatggacaagtataattttgatacaatgatatatgtgacagataaaggacaaaaaaagcattttcagcaagtattccaaatgctgaagatcatgggatatgactgggcagaaaggtgccagcacgtgccctttggagtagtacagggaatgaagactcgaagaggagatgtcactttcctggaagatgttttaaatgagattcaattaaggatgctacagaacatggcttcaattaagacaactaaagaactcaagaacccacaagagactgcagagagggtcgggctcgcagcactcattattcaggacttcaaaggtttactcttatctgactacaagttcagctgggatcgtgttttccagagtcgcggggacacaggagtcttcctacagtacacacacgcccgcctccacagtttggaagagacttttggatgtgggtacctgaatgacttcaacactgcttgtttacaagagccacagtctgtttcaattcttcagcatcttctcaggttcgacgaggtgctttataaatcatctcaggactttcaacccaggcatatcgtcagttaccttctaactttaagtcatcttgcagctgtggcacacaaaacactacaaataaaagatagtcctcctgaagtggctggggccagacttcatcttttcaaagctgtccgttctgtcctagccaatggaatgaaacttcttggaataacacctgtatgtaggatgtaatttccattaaaatggcttttaaaatgtcaagtgaa

SEQ ID NO: 108713 - DNA, 618 bp, Homo sapiens
  Payload ID: 1358
  Gene Symbol: RARS2
  Gene Name: arginyl-tRNA synthetase 2, mitochondrial
  ENST ID: ENST00000451155
  CDS Start-End: 1-618
ctttccagagtgttgaatcttccaccagaaaacttgatcacatcaatatctgcagttccaatttcccaaaaagaagtttcgctcttgtcacccaggctggagtgcagtggcacaatcttgactcgctgcagtctccacctccaggattcaagcgattcccctgcctcagtctcccaagcagctgggattgtagagaagtagctgattttcagctttctgtggattctttattggaaaaagacaatgaccattcaagaccagatattcaagttcaagccaagagactagcagagaagctaagatgtgatacagtggtgagtgaaatcagtactggtcaaaggactgtaaatttcaaaataaacagagagctcttaacaaagacagtgctacaacaagtaattgaagatggctcaaaatatggattaaaaagtgaacttttctctggacttccccagaagaagattgtggttgaattcagttcacctaatgttgccaaaaaatttcatgttggacatttgcgttctaccatcataggaaattttatagcaaatctcaaagaagctttaggacatcaagtaataagaataaattaccttggcgattggggcatgcagtttg

SEQ ID NO: 108714 - DNA, 13708 bp, Homo sapiens
  Payload ID: 1359
  Gene Symbol: AGO1
  Gene Name: argonaute RISC catalytic component 1
  Uniprot ID: Q9UL18
  ENST ID: ENST00000373204
  CDS Start-End: 214-2787
actggcagctggccgggcgctcgcagtgggagctgctgcaggctccgcggcggcggcaacggaggctgcgggggcggcggcgcgagcggccgggcttggtaggggagccgagcccggcccgggatcccgagcagcgagagtgtggggtacctaggcccctcacgctggacttcacagtctccgggccgcctgacctccgcacgggtatatgggatggaagcgggaccctcgggagcagctgcgggcgcttacctgccccccctgcagcaggtgttccaggcacctcgccggcctggcattggcactgtggggaaaccaatcaagctcctggccaattactttgaggtggacatccctaagatcgacgtgtaccactacgaggtggacatcaagccggataagtgtccccgtagagtcaaccgggaagtggtggaatacatggtccagcatttcaagcctcagatctttggtgatcgcaagcctgtgtatgatggaaagaagaacatttacactgtcacagcactgcccattggcaacgaacgggtcgactttgaggtgacaatccctggggaagggaaggatcgaatctttaaggtctccatcaagtggctagccattgtgagctggcgaatgctgcatgaggccctggtcagcggccagatccctgttcccttggagtctgtgcaagccctggatgtggccatgaggcacctggcatccatgaggtacacccctgtgggccgctccttcttctcaccgcctgagggctactaccacccgctggggggtgggcgcgaggtctggttcggctttcaccagtctgtgcgccctgccatgtggaagatgatgctcaacattgatgtctcagccactgccttttataaggcacagccagtgattgagttcatgtgtgaggtgctggacatcaggaacatagatgagcagcccaagcccctcacggactctcagcgcgttcgcttcaccaaggagatcaagggcctgaaggtggaagtcacccactgtggacagatgaagaggaagtaccgcgtgtgtaatgttacccgtcgccctgctagccatcagacattccccttacagctggagagtggacagactgtggagtgcacagtggcacagtatttcaagcagaaatataaccttcagctcaagtatccccatctgccctgcctacaagttggccaggaacaaaagcatacctaccttcccctagaggtctgtaacattgtggctgggcagcgctgtattaaaaagctgaccgacaaccagacctcgaccatgataaaggccacagctagatccgctccagacagacaggaggagatcagtcgcctgatgaagaatgccagctacaacttagatccctacatccaggaatttgggatcaaagtgaaggatgacatgacggaggtgacagggcgagtgctgccggcgcccatcttgcagtacggcggccggaaccgggccattgccacacccaatcagggtgtctgggacatgcgggggaaacagttctacaatgggattgagatcaaagtctgggccatcgcctgcttcgcaccccaaaaacagtgtcgagaagaggtgctcaagaacttcacagaccagctgcggaagatttccaaggatgcggggatgcctatccagggtcaaccttgtttctgcaaatatgcacagggggcagacagcgtggagcctatgttccggcatctcaagaacacctactcagggctgcagctcattattgtcatcctgccagggaagacgccggtgtatgctgaggtgaaacgtgtcggagatacactcttgggaatggctacgcagtgtgtgcaggtgaagaacgtggtcaagacctcacctcagactctgtccaacctctgcctcaagatcaatgtcaaacttggtggcattaacaacatcctagtcccacaccagcgctctgccgtttttcaacagccagtgatattcctgggagcagatgttacacaccccccagcaggggatgggaaaaaaccttctatcacagcagtggtaggcagtatggatgcccaccccagccgatactgtgctactgtgcgggtacagcgaccacggcaagagatcattgaagacttgtcctacatggtgcgtgagctcctcatccaattctacaagtccacccgtttcaagcctacccgcatcatcttctaccgagatggggtgcctgaaggccagctaccccagatactccactatgagctactggccattcgtgatgcctgcatcaaactggaaaaggactaccagcctgggatcacttatattgtggtgcagaaacgccatcacacccgccttttctgtgctgacaagaatgagcgaattgggaagagtggtaacatcccagctgggaccacagtggacaccaacatcacccacccatttgagtttgacttctatctgtgcagccacgcaggcatccagggcaccagccgaccatcccattactatgttctttgggatgacaaccgtttcacagcagatgagctccagatcctgacgtaccagctgtgccacacttacgtacgatgcacacgctctgtctctatcccagcacctgcctactatgcccgcctggtggctttccgggcacgataccacctggtggacaaggagcatgacagtggagaggggagccacatatcggggcagagcaatgggcgggacccccaggccctggccaaagccgtgcaggttcaccaggatactctgcgcaccatgtacttcgcttgaaggcagaacgctgttacctcactggatagaagaaagctttccaagccccaggagctgtgccacccaaatccagaggaagcaaggaggagggaggtggggtagggaggagtgtaggatgccttgtttccttctatagaggtggtgtaagagtggggaacagggccagcaagacagaccaccagccagaaatctctgatatcaacctcatgtcccccacccctcaccccatcttgtcacatctggccctgaccccactggaccaaaaggggcagcactggtgcccaccatacacacaggtgtctcatgtgactcacagtgctaaagactcatgcttgacagcttggtaaggtcaactctgtagccctgcagacaaaagctggttaggtttgggtttgatactttagatgggaaagtgaggggcttgagaaagtgggtgggaggagggaaggattttttaggagccttaatcagaaaaggactagatttgtttaagaagaaaaatgaaaccagacccagatcaatattttaggatactagatgttttaatgggttcagaatccagtttgtaggaagattttttaatggttttggttgctcctcccccagctgccaccccccaccttacccttattcctctctgtccacattttctgccccaccttacttctcctccctgacagacatccagcccctagtaatacttaaggcactatggcacttagctttgaagtgacacgaccctgtcttccttccgcccgctggtgggtaaccagtgccttccctgtaacggtaatgctgcagaactgcaaccttttgtacctttctttggggaatggggtgggggtgggagaggaggtagatggggaagaaataccccagacccaacaaacctccagccagaaagccagctattttgcatttgaaggaattgacttcctcattcattgagctttttaaaagatcacaacctcaagatggttaaaatccattgacatttgcactttcaaacatgacaagtctcggagctgctgagatgacaggcccctggcctttccacttatgcctccttttctccttattcctcctacctcccgccccgcccaggtctggagttactttcatagcatttttcactcttggcttcttttctcccttgatggtcaagtctcttatgtttcaatatttcttaactggggtgtcttataacaaaaaactcttaggtctaaaatgagaaaaaagagagaaaacaaaatgttatttttataccataacttgagtgtattgccaaaatttggaaatccttcccatgcctgatgagtttatatcccagaaacattgagccatcagaatgaactgtgtacctgatttgttctctgacctggctaggtagggagggggtggttatcgccccaagatggggtccaggctccatccttcctctgtgcagataatacctttttcttgctatagcctccctcctctgcactgtcctgcactctttcttgcaagtgcatctttttccttcccctggactgtcctctgaccctttggctcatcctagattgcagtgtgtcctgtggacaggctggggaattttgctgctccctattgcttctgtttacaaaaatgaatttttcctggtttcccactagggcatgtgggtgggtggcatggacttttttttttttttttttttgtcttgagacatggggtttggctgtcttgcaggactggagaaggtggtggttctagcttggtctctgttggccttgaagcaagcatcccccctgccctttttccttgactgttcatttttttcctgccccactgcttgggatggggagttgcaacttcagtgtggaatttcctctttgaggagcctgggcttggatctatcctgatctggtgatgaagccatgattactttagacctagcccaggcttggaggccagctggaggaagaagggtctaaatcctggcctgtagagttagaactaccatttcctccccttagctgcccttgtatgacccggatttgctatgcaaaacaatctatcccaggttctgttctggttggctacattgttcagcaactcacaaaacgtagcacaaacattcattatggagaaagcatcaggactgttgagtaactcctcctttacttttttcctgctggctacagcatggggtgccctataggcacaagcccagctgaagaacagaatggagggctctgggaggaggcagctcactggagagcctacattccttacacaagtgcctaaagagagtgatgctaacactccatctgccctgtccattgccttcatatacagtctacttcgtgttctgtcaccctttggggaggggagttctcctgggacagtgggctctgcatgttctccacttggatacattttggggctaggatcagggcactattcctggagggtccagtcattcaccagcatttgcaaatgtccatagggagcaggtggcagcctctactcccagcaacaagtttgtgttctctccttttctctctttgcctcactctctccagttggttttcagctggggcttgaaatgcatttttagccctttgacgtggcttatgccattcaagaaataaaaagcaagagaatcagctttgggcaatgacaagaaatgagttcttactctgatttttttgtaaaaagataatttttgagacttgaaaaataccccgaccttgagattattcctgtttgaaaggtggtgcatgcagatggagaagtggtgttggcagcaagctttggctcatgtggatttggtttaagtggtgcttcttacccaagcttcaaggaagtgcttgggggacccccagcctcatcctcttagttgggtctcttgttccctttgtaccactgttttgccttccttttcctcttctctctttgcctggcttcctttcccttttcttctattcactctgcttgcttgctggccggcctgcctgcctgcctgcctgcctgcctgcctgtctgcctatgtgatgatgaaatctctgcatggctgcaatgatcccactgttagctggcagggtcaggcttagctccttgactgcagaagaccaagaacctgttccccaagcccagagatgtccacctgggctggactgccctcaagcttatactagagaagagcaactgacctgcccaacttgtgtgaagtcaggagggtttctggcattttccacacctgtccactccttggagctggtttctctcattgctttttctaaatctggttctttttctctttacctggggcctggcttttctgagattgtcttagggttgagctatttgggtatcctgggtttgagtgttaggggatggacataaaggaaaaagagtgatgagaagagaatggagagaatttgaataaaaggtgggaaaggagagcactgttctttgattgtttatccagtccaacctgatccattagggatcgaggtgctacactggcctccagggataagcctggggctactgttgctgggaacttaggcttaacataaagccgaagaaggtacctagaaatttgaaacttccctaaaaagctcctaatgcccacctgctagatagcttctctgtggcctcctatttagctaagcagcagtgtttttggatactttttttttctgtttgtgaataaggccagcactcaagatgggcagccaagggtgcactgactattagctggcccataggatatctgtaaggctggtgggacagttttggacctggaatcatgtgtaactaacaaggttggacgtttcttccccatcagggtagaaaaatcatctcaaactagccaaaaggcagttttggaaactacattgggggacgttatttttatttatatatggggcctaggccaatccaggatggtagctggaataccttccttcttaaaatctgatcatggcagggatatgcagggcactttttactatttggccttctaagcagattgggaaggaggtattttctggttttcgctttcctccgacttaataggacttgccttctccctgggcagggagagaggctgggttggtgctctcccttactctactcatactgacttagagcctctggctgctgtttgggcatccaagaaagggaggggaaggaatgagctaaaaacaaaacagaatgaggtgggaaagggagattttcttctttacagaggaaaataggaaaccctccaagaattgtgcaagtaaagacatttgttgaatgcactgagtcccttggtgtagtagcaataaggaaaaatgaaattactttcctgtgcacacagtccagcctaattggtatgtgatgttgcacttagcagccatgtggtgggcatgtgtgactactctggttttcactttagtttctaaactttttatccctctcaagtccagcatggatggggaaatgtctctggatccccacagctgtgtacttgtttgcatttgtttccctttgagatttgtgtttgtgtcctgctttgagctgtaccttgtccagtccattgtgaaattatcccagcagctgtaatgtacagttccttctgaagcaagcaacatcagcagcagcagcagcagcagcacaattctgtgttttataaagacaacagtggcttctatttctaaagtgcggtctttctctttttttttcctaccagcaaaacaaacttttgggactgattacatctctaatagattttaggtgagaataatactgtagattgttatgcaggaatacttcacagagccttcatttattcttcattcaacaaacatgcaaagcactgtgccagcagtattgtggggaggggaggcacaattcaaaatgaggaaaatagtgtccgtctcattaagggaattaagtttggtgggggatatgattagccaaatagtcccctggcataggaggaagataatgagggagtggaataaggctacaacaacgaatatagggaggaagggacagatttgagagacgaggtagaattaataggactcgatggctggtgggaggagaagacaggagtagaggttagctcccaggtttctccttgaccataggagtgtgttgggacattctgccagtcaagatgggggtgacggggagactgtagaaggaaggtggggagtttttgaagaaacagaatgttgtatagactgagttttgaggtgtttgtggggcagtaagggtaaggtgtccagtaaacacaggttggtgctcaggtaagactgtaaaactgcatttatagatacaggagtcttatagatggtagttaaagccataggcatgaatgagatagcttagaaaaagagaagagaaactagtatacagccccctaagaaactcaatttaaaggttcgggggaggaagcagatcttaaggtgacagatcactggtagacagtttgtgggttttttgtttctttgtttagccagtttggtgaggtaggagaagaaatcagagtagaagaaggttcatgaagggagtgattaacaacatgaactgctgcagagagggagttctttttttttctgtgtgttttacctttctactccccatcttttggggatcttgtaactctatgacttacttacgttattctccagtatttcttgaaaatgagcattggaaaaaccaattctaaaatggctaaaactaggactttcaagttcaccacaactaccaccaattaggagataattgtaaaagaataaacaaaacctaattttgttcctagccaatattataaaccatgttccagcatactagataatagtagcatactatatttatttccataatttgtcttctttagagcctatgaactcctaggagcagaagctatattctcttcatttttgtcatctcagggtcatggcatataccaacagatcagtatgtgcaaatataattgaaataggctagtagtctgtggtttatgagtatgggctgggtgggcagtggatcaagaagtgataggagtacacaggatgaactcagaattcctgaatcttcaggtaagcagatacttaactacattatcattgtcttttcccactcaccccaagttggaggttctatggttttgtactttaagctggtggtataattgtcaagcatgtaaattctggcattcttcctggtactgctagagcattgttatttctatgcatgggggtaagaaggctcagagaaggatcctggcggataccccagtgagaaatcgtcagtggcagccagtgtgtacatacgtggacctagcattcctctggaggccaagtgttgtaaattggcctgtggctatcatctggcagactcccttgggaaagagccagccagccccatgcttcttttcagcagcaagggttagggaggttggttgaacttgaagagcagattggacatggagcagattttgaccagttgaaataagacataaatttatgactccgagtgaggcagaaataaagaacttagcagggggaataggaggaggatgattatggcaaattttgctataaactttagttttagaaaagattgatattgaaaagccttcaggatttgcctgtggttgctactcaagttaaaaagactgggagcctgcattgtttggtcctggagctcaaggttttcagtgaaggcttgtcctggcacctctgggcattccttttcattactggttgagcatccttccttctgctctgtcaattggcaaaatatgctggagcacattctggactagcagttgccttggggtagtcaggctgggtatttgtttggtatctcttggtgtagcagaccccagaatctcatggcaattaggatttggtggctaaacgaaagagttagtgcaaggaaaagcctagttggaatttctgagtctgggccatccttaagctgctgtctactgcctgaatgggaagtaatgtcgaattggaaaattagctcaccatttttgttctagctttgcagacatttattcctctgatgataggctgagaaatgcctaggccggcttagaaggcacacagcatgacagaagtactccttcaaagcagctgtgtcaagaaggaagagctggaaaagtggatttgctggggaattagatgcatttagttttccacttacgcacaactgccttctccagtatatcataccaaggttttttaggcctttgtggcttaccctgcaggaacatactgtgtcctgttgttctggactgtagcatcttcaccaccatcctcttggcaatggttttttgtttggggtttttttttttttttttttggacaaagtataataatattgagggacctttctagggagcctttggtcctttgtccccattttccaaagggagggaactttcctcttaaaagagacagtgggaacttttagccaggtttttggaaaaggcctgtgggctattaatgagagtgagctgcaaaaggaggaagggtttgtttgggtactttgaagtacttagctaggtgttttctacagtatcttatataattgcatcttacagcatctttacatgcgaaatagtttatcagttatcttcaattgcatattacaaaattctgattaaatttttcttaaataagaaaactatcatttcatatgacaagaaatcctaatttaatgttactccaaggttggttaattcagtggctcagtgataacaccaaagactcagtttcttgaaatttttttgctctgccatcctccatgtttatcctcacgccagttcgcctcatggtcccaatatggctactgtaattctgggaaggaaatgctgacagaaccgtgtctggcaaaagagagacagatttttctgtgtccttctaaagcaaggaagtcttcccctggaagctccaacagatacggcctcatggctttgctagaaatgggtcatctcactcctgtcattggcaaagcaagtaagatcatccatcaggagtggcttagattaatgaattatcctttgagtcgtgtagactagaaagttcagtcatgtctactagcaagaaaggagataagggctgttggataagcagcatctggtctcaaaggtacttcaacttttacagatgagaaacatgaatcagagtgactttcccaggctcacagcaagtaagagagggccttcagtgttagctgtgtctgtccctaaagcccatgttttatattgtatcttgctagagtataaagtaacttactttctaccttgtagaaactgatggtctaggagaagagatttgaactcaggtgcccagttgactctaatcttggcccatgtgagaggattgtactcagttgctctcctcatccagtgatgtttcttgtctaacacaagaagcctaggagtagaaagtcctaagcagagtagaataatagcggcagcagggagggaagtgtgaactgtgtgtccctgagcctgacttactgggcagggacatgacacttaaagcggcagctggccactctgtctttcctgcatgcactgagtatttggtagctcattagtgaccagtgatattgatcatcttttcatgtgctcacttactatccccatatctttgttgtttgcatcttttacccattgtatttgttgtttttgagacagtgtctcactctgtcacccaggctggagtgcagtctcatgatcgcggctcactgcagtttctgcctcctgggctcaagcaatcctcccacctcagcctcctgagtagctgggcttacaggcgcacaccaccatgcccagctaattaaaaaaaaaattttttttgtagcagttcggtctcattagtattgcccaggctggcctctcttagcttcaagctatcctcccgcctcggcctcccaaagtgctggaattacaggcataagccacaagccactgggcccagcctcttttacctgtttcaaaattgagttttattgagttgtaagagttctttattcattttaaacacaagtcctttgttggatatatcttttacatctatttttcccagtctgtggcttgccttttcattttgaagagcaaaagtttaaaattttgtgaatttattaaagctccgtttgttgcttttttctgttctagtttatacttttgtatcatattttaggaaattttgcactgggtatttgatggctcctgaggaggttcaactttcagagcgcactgatttctctgcacctgagattttgtactatttctgtatttctttcttctcagaacaaccagtgtcaccaggtatgagggcagagttttagcttgtttgctgagccccattcttgaagctcatttatttattcacctatctgtccatcaatccaacaaatatactgaatgctgctatgtgccaggtactggcactgttctaggtactggggcaatgacagttaagataatacccaatgaccctgctctgtacccttaagagcagactcagttgggaatgagttatccaaatatagggtgtacatgtagtcaggagagagcctcatacagctttgcctttggcagaatccttcaaacctctttgtcttcctacttcttgatattacaaatcatgagcctttcacatgcattgactctaaagaggtgggttcctggatagcagaagtagataggaaggcatcattgacatttactgagatggattgaatcagagggtgtaaattctgctccatcaatgttgaaaaagactagcccaccccaaaggtttatcactgtcaccatgtctaatgtctattctggaagaagctgaagaagtctgcctttgtttagggaaccggttccagaatcagaggggttgaggatataaaagacccttgcacaagagttggtatttaccctgtcagatgctgctaccaagatttggattgtgtacagtcgaggattaaaaatgacttttaagatgcagtgtttcatctggtgacatttaatttgatattttaaaattggggagggtattttcagccatgggggtagggatgtgaaagaagaagaaagtaagaattggagtcagatgtggttttgagtcccatacatttattgtttaatattatatggtaagtactttaaaatggtaaatagtaaatacttgtgttattcactaacatttggggaggattttctctgtgctttatgtatattacctaaccttacaaactgtgtaaggtacatgctgttctctcaatttttcagataagaaaattgaagcccagagagatcaagtgactgatccaaagtcccacagtgaggggaactgaagataggatattctttctccttttcctctttaaaaaattattttgattaaaaaaaaccgtattactgaagcatagggacatggggagaaattatgaatgattcctcagcctgaataaaatagtatgtttcattaaggcaacaaatatttattaaggacctaatatttgcctgacattcaagtgaggtggggggcacacaagtagtaaataaataacagactgggcaaagggctaccaaggcaatactgtagtagactaacaggtgccccaccatagatgggtggtccggaaaaggcgtctcagatgtctttcgttgagacgcaaaaaaaagctgtggggtagggcgtaaggggagggtggagaagagagagagggttcctggccaagggaaccaaaagcagagaagctccaagtcagaaaaaagcagcggttggcccgttgggagaattggaagccaaccagtatagctgtagcacaggcggggcccatttacgccgtgcgttttcaccctggaaaggagtttgggttttcaagtgtgacgaggcgctattaaagagttttaaacatg

SEQ ID NO: 108715 - DNA, 3996 bp, Homo sapiens
  Payload ID: 1359
  Gene Symbol: AGO1
  Gene Name: argonaute RISC catalytic component 1
  ENST ID: ENST00000373206
  CDS Start-End: 297-2645
tgaggcaagcgcctcaggagtgcgtgaggcccacgcagaactcggggagccttttatcctgaggacacaggggaagaattggaggactatattcagctgcgggcgcttacctgccccccctgcagcaggtgttccaggcacctcgccggcctggcattggcactgtggggaaaccaatcaagctcctggccaattactttgaggtggacatccctaagatcgacgtgtaccactacgaggtggacatcaagccggataagtgtccccgtagagtcaaccgggaagtggtggaatacatggtccagcatttcaagcctcagatctttggtgatcgcaagcctgtgtatgatggaaagaagaacatttacactgtcacagcactgcccattggcaacgaacgggtcgactttgaggtgacaatccctggggaagggaaggatcgaatctttaaggtctccatcaagtggctagccattgtgagctggcgaatgctgcatgaggccctggtcagcggccagatccctgttcccttggagtctgtgcaagccctggatgtggccatgaggcacctggcatccatgaggtacacccctgtgggccgctccttcttctcaccgcctgagggctactaccacccgctggggggtgggcgcgaggtctggttcggctttcaccagtctgtgcgccctgccatgtggaagatgatgctcaacattgatgtctcagccactgccttttataaggcacagccagtgattgagttcatgtgtgaggtgctggacatcaggaacatagatgagcagcccaagcccctcacggactctcagcgcgttcgcttcaccaaggagatcaagggcctgaaggtggaagtcacccactgtggacagatgaagaggaagtaccgcgtgtgtaatgttacccgtcgccctgctagccatcagacattccccttacagctggagagtggacagactgtggagtgcacagtggcacagtatttcaagcagaaatataaccttcagctcaagtatccccatctgccctgcctacaagttggccaggaacaaaagcatacctaccttcccctagaggtctgtaacattgtggctgggcagcgctgtattaaaaagctgaccgacaaccagacctcgaccatgataaaggccacagctagatccgctccagacagacaggaggagatcagtcgcctgatgaagaatgccagctacaacttagatccctacatccaggaatttgggatcaaagtgaaggatgacatgacggaggtgacagggcgagtgctgccggcgcccatcttgcagtacggcggccggaaccgggccattgccacacccaatcagggtgtctgggacatgcgggggaaacagttctacaatgggattgagatcaaagtctgggccatcgcctgcttcgcaccccaaaaacagtgtcgagaagaggtgctcaagaacttcacagaccagctgcggaagatttccaaggatgcggggatgcctatccagggtcaaccttgtttctgcaaatatgcacagggggcagacagcgtggagcctatgttccggcatctcaagaacacctactcagggctgcagctcattattgtcatcctgccagggaagacgccggtgtatgctgaggtgaaacgtgtcggagatacactcttgggaatggctacgcagtgtgtgcaggtgaagaacgtggtcaagacctcacctcagactctgtccaacctctgcctcaagatcaatgtcaaacttggtggcattaacaacatcctagtcccacaccagcgctctgccgtttttcaacagccagtgatattcctgggagcagatgttacacaccccccagcaggggatgggaaaaaaccttctatcacagcagtggtaggcagtatggatgcccaccccagccgatactgtgctactgtgcgggtacagcgaccacggcaagagatcattgaagacttgtcctacatggtgcgtgagctcctcatccaattctacaagtccacccgtttcaagcctacccgcatcatcttctaccgagatggggtgcctgaaggccagctaccccagatactccactatgagctactggccattcgtgatgcctgcatcaaactggaaaaggactaccagcctgggatcacttatattgtggtgcagaaacgccatcacacccgccttttctgtgctgacaagaatgagcgaattgggaagagtggtaacatcccagctgggaccacagtggacaccaacatcacccacccatttgagtttgacttctatctgtgcagccacgcaggcatccagggcaccagccgaccatcccattactatgttctttgggatgacaaccgtttcacagcagatgagctccagatcctgacgtaccagctgtgccacacttacgtacgatgcacacgctctgtctctatcccagcacctgcctactatgcccgcctggtggctttccgggcacgataccacctggtggacaaggagcatgacagtggagaggggagccacatatcggggcagagcaatgggcgggacccccaggccctggccaaagccgtgcaggttcaccaggatactctgcgcaccatgtacttcgcttgaaggcagaacgctgttacctcactggatagaagaaagctttccaagccccaggagctgtgccacccaaatccagaggaagcaaggaggagggaggtggggtagggaggagtgtaggatgccttgtttccttctatagaggtggtgtaagagtggggaacagggccagcaagacagaccaccagccagaaatctctgatatcaacctcatgtcccccacccctcaccccatcttgtcacatctggccctgaccccactggaccaaaaggggcagcactggtgcccaccatacacacaggtgtctcatgtgactcacagtgctaaagactcatgcttgacagcttggtaaggtcaactctgtagccctgcagacaaaagctggttaggtttgggtttgatactttagatgggaaagtgaggggcttgagaaagtgggtgggaggagggaaggattttttaggagccttaatcagaaaaggactagatttgtttaagaagaaaaatgaaaccagacccagatcaatattttaggatactagatgttttaatgggttcagaatccagtttgtaggaagattttttaatggttttggttgctcctcccccagctgccaccccccaccttacccttattcctctctgtccacattttctgccccaccttacttctcctccctgacagacatccagcccctagtaatacttaaggcactatggcacttagctttgaagtgacacgaccctgtcttccttccgcccgctggtgggtaaccagtgccttccctgtaacggtaatgctgcagaactgcaaccttttgtacctttctttggggaatggggtgggggtgggagaggaggtagatggggaagaaataccccagacccaacaaacctccagccagaaagccagctattttgcatttgaaggaattgacttcctcattcattgagctttttaaaagatcacaacctcaagatggttaaaatccattgacatttgcactttcaaacatgacaagtctcggagctgctgagatgacaggcccctggcctttccacttatgcctccttttctccttattcctcctacctcccgccccgcccaggtctggagttactttcatagcatttttcactcttggcttcttttctcccttgatggtcaagtctcttatgtttcaatatttcttaactggggtgtcttataacaaaaaactcttaggtctaaaatgagaaaaaagagagaaaacaaaatgttatttttataccataacttgagtgtattgccaaaatttggaaatccttcccatgcctgatgagtttatatcccagaaacattgagccatcagaatg

SEQ ID NO: 108716 - DNA, 2836 bp, Homo sapiens
  Payload ID: 1359
  Gene Symbol: AGO1
  Gene Name: argonaute RISC catalytic component 1
  ENST ID: ENST00000635259
  CDS Start-End: 1-401
agcatttcaagcctcagatctttggtgatcgcaagcctgtgtatgatggaaagaagaacatttacactgtcacagcactgcccattggcaacgaacgggtcgactttgaggtgacaatccctggggaagggaaggatcgaatctttaaggtctccatcaagtggctagccattgtgagctggcgaatgctgcatgaggccctggtcagcggccagatccctgttcccttggagtctgtgcaagccctggatgtggccatgaggcacctggcatccatgaggccagggctcctccgtgcccaggatgcctcacagggtgggggcctgtgcccgagggaccagttctctgcctgtccctgccaggtacacccctgtgggccgctccttcttctcaccgcctgagggctactaccacccgctggggggtgggcgcgaggtctggttcggctttcaccagtctgtgcgccctgccatgtggaagatgatgctcaacattgatgtctcagccactgccttttataaggcacagccagtgattgagttcatgtgtgaggtgctggacatcaggaacatagatgagcagcccaagcccctcacggactctcagcgcgttcgcttcaccaaggagatcaagggcctgaaggtggaagtcacccactgtggacagatgaagaggaagtaccgcgtgtgtaatgttacccgtcgccctgctagccatcagacattccccttacagctggagagtggacagactgtggagtgcacagtggcacagtatttcaagcagaaatataaccttcagctcaagtatccccatctgccctgcctacaagttggccaggaacaaaagcatacctaccttcccctagaggtctgtaacattgtggctgggcagcgctgtattaaaaagctgaccgacaaccagacctcgaccatgataaaggccacagctagatccgctccagacagacaggaggagatcagtcgcctgatgaagaatgccagctacaacttagatccctacatccaggaatttgggatcaaagtgaaggatgacatgacggaggtgacagggcgagtgctgccggcgcccatcttgcagtacggcggccggaaccgggccattgccacacccaatcagggtgtctgggacatgcgggggaaacagttctacaatgggattgagatcaaagtctgggccatcgcctgcttcgcaccccaaaaacagtgtcgagaagaggtgctcaagaacttcacagaccagctgcggaagatttccaaggatgcggggatgcctatccagggtcaaccttgtttctgcaaatatgcacagggggcagacagcgtggagcctatgttccggcatctcaagaacacctactcagggctgcagctcattattgtcatcctgccagggaagacgccggtgtatgctgaggtgaaacgtgtcggagatacactcttgggaatggctacgcagtgtgtgcaggtgaagaacgtggtcaagacctcacctcagactctgtccaacctctgcctcaagatcaatgtcaaacttggtggcattaacaacatcctagtcccacaccagcgctctgccgtttttcaacagccagtgatattcctgggagcagatgttacacaccccccagcaggggatgggaaaaaaccttctatcacagcagtggtaggcagtatggatgcccaccccagccgatactgtgctactgtgcgggtacagcgaccacggcaagagatcattgaagacttgtcctacatggtgcgtgagctcctcatccaattctacaagtccacccgtttcaagcctacccgcatcatcttctaccgagatggggtgcctgaaggccagctaccccagatactccactatgagctactggccattcgtgatgcctgcatcaaactggaaaaggactaccagcctgggatcacttatattgtggtgcagaaacgccatcacacccgccttttctgtgctgacaagaatgagcgaattgggaagagtggtaacatcccagctgggaccacagtggacaccaacatcacccacccatttgagtttgacttctatctgtgcagccacgcaggcatccagggcaccagccgaccatcccattactatgttctttgggatgacaaccgtttcacagcagatgagctccagatcctgacgtaccagctgtgccacacttacgtacgatgcacacgctctgtctctatcccagcacctgcctactatgcccgcctggtggctttccgggcacgataccacctggtggacaaggagcatgacagtggagaggggagccacatatcggggcagagcaatgggcgggacccccaggccctggccaaagccgtgcaggttcaccaggatactctgcgcaccatgtacttcgcttgaaggcagaacgctgttacctcactggatagaagaaagctttccaagccccaggagctgtgccacccaaatccagaggaagcaaggaggagggaggtggggtagggaggagtgtaggatgccttgtttccttctatagaggtggtgtaagagtggggaacagggccagcaagacagaccaccagccagaaatctctgatatcaacctcatgtcccccacccctcaccccatcttgtcacatctggccctgaccccactggaccaaaaggggcagcactggtgcccaccatacacacaggtgtctcatgtgactcacagtgctaaagactcatgcttgacagcttggtaaggtcaactctgtagccctgcagacaaaagctggttaggtttgggtttgatactttagatgggaaa

SEQ ID NO: 108717 - DNA, 14581 bp, Homo sapiens
  Payload ID: 1360
  Gene Symbol: AGO2
  Gene Name: argonaute RISC catalytic component 2
  Uniprot ID: Q9UKV8
  ENST ID: ENST00000220592
  CDS Start-End: 114-2693
ggccgcgccggggcggatcgtgcggccggcggctccctcgcggctcgcggcgtcggggcccgtggcgcgcgcgcggccgcccctcggccccggagcccctcggcggcgccaccatgtactcgggagccggccccgcacttgcacctcctgcgccgccgccccccatccaaggatatgccttcaagcctccacctagacccgactttgggacctccgggagaacaatcaaattacaggccaatttcttcgaaatggacatccccaaaattgacatctatcattatgaattggatatcaagccagagaagtgcccgaggagagttaacagggaaatcgtggaacacatggtccagcactttaaaacacagatctttggggatcggaagcccgtgtttgacggcaggaagaatctatacacagccatgccccttccgattgggagggacaaggtggagctggaggtcacgctgccaggagaaggcaaggatcgcatcttcaaggtgtccatcaagtgggtgtcctgcgtgagcttgcaggcgttacacgatgcactttcagggcggctgcccagcgtcccttttgagacgatccaggccctggacgtggtcatgaggcacttgccatccatgaggtacacccccgtgggccgctccttcttcaccgcgtccgaaggctgctctaaccctcttggcgggggccgagaagtgtggtttggcttccatcagtccgtccggccttctctctggaaaatgatgctgaatattgatgtgtcagcaacagcgttttacaaggcacagccagtaatcgagtttgtttgtgaagttttggattttaaaagtattgaagaacaacaaaaacctctgacagattcccaaagggtaaagtttaccaaagaaattaaaggtctaaaggtggagataacgcactgtgggcagatgaagaggaagtaccgcgtctgcaatgtgacccggcggcccgccagtcaccaaacattcccgctgcagcaggagagcgggcagacggtggagtgcacggtggcccagtatttcaaggacaggcacaagttggttctgcgctacccccacctcccatgtttacaagtcggacaggagcagaaacacacctaccttcccctggaggtctgtaacattgtggcaggacaaagatgtattaaaaaattaacggacaatcagacctcaaccatgatcagagcgactgctaggtcggcgcccgatcggcaagaagagattagcaaattgatgcgaagtgcaagtttcaacacagatccatacgtccgtgaatttggaatcatggtcaaagatgagatgacagacgtgactgggcgggtgctgcagccgccctccatcctctacgggggcaggaataaagctattgcgacccctgtccagggcgtctgggacatgcggaacaagcagttccacacgggcatcgagatcaaggtgtgggccattgcgtgcttcgccccccagcgccagtgcacggaagtccatctgaagtccttcacagagcagctcagaaagatctcgagagacgccggcatgcccatccagggccagccgtgcttctgcaaatacgcgcagggggcggacagcgtggagcccatgttccggcacctgaagaacacgtatgcgggcctgcagctggtggtggtcatcctgcccggcaagacgcccgtgtacgccgaggtcaagcgcgtgggagacacggtgctggggatggccacgcagtgcgtgcagatgaagaacgtgcagaggaccacgccacagaccctgtccaacctctgcctgaagatcaacgtcaagctgggaggcgtgaacaacatcctgctgccccagggcaggccgccggtgttccagcagcccgtcatctttctgggagcagacgtcactcacccccccgccggggatgggaagaagccctccattgccgccgtggtgggcagcatggacgcccaccccaatcgctactgcgccaccgtgcgcgtgcagcagcaccggcaggagatcatacaagacctggccgccatggtccgcgagctcctcatccagttctacaagtccacgcgcttcaagcccacccgcatcatcttctaccgcgacggtgtctctgaaggccagttccagcaggttctccaccacgagttgctggccatccgtgaggcctgtatcaagctagaaaaagactaccagcccgggatcaccttcatcgtggtgcagaagaggcaccacacccggctcttctgcactgacaagaacgagcgggttgggaaaagtggaaacattccagcaggcacgactgtggacacgaaaatcacccaccccaccgagttcgacttctacctgtgtagtcacgctggcatccaggggacaagcaggccttcgcactatcacgtcctctgggacgacaatcgtttctcctctgatgagctgcagatcctaacctaccagctgtgtcacacctacgtgcgctgcacacgctccgtgtccatcccagcgccagcatactacgctcacctggtggccttccgggccaggtaccacctggtggataaggaacatgacagtgctgaaggaagccatacctctgggcagagtaacgggcgagaccaccaagcactggccaaggcggtccaggttcaccaagacactctgcgcaccatgtactttgcttgacatgttttagtgtttagcgattgtgtaccgagtgggattcacgagaccagctacactcagaccaacagatggccagcccttccgtgacagccagcatcgaacatgagacgtcattgattttattagattctccgttttccagaatgccttccgtcccagatttcaaacttggattttgaactgcagacctgtatgagaacccaatgtcataggaaatatggtttgctaaaatctataagctgcttattaaaacagagtcccgtgtgtcctaaaaatctcctaaaaccagtctatgaactcagggctttaaaacatttttaatttatttggtcattcaatttacttgtttttaatacatgattctctatgaaattgatgggctcaaactagctgtgaatcttctgagagtgaaagcaacacaaaacacaagtgtggttttaaagccttgaacattctgatgttgtcactaaagttgatttccaggcgatgctcgtgtgcccctggcgtggctcacccaagttcctcgactgagggccggtggccatgcagaggcgtccgcaggtgccgtgttctgccagcaccgcccttcacccggcctgaactaaggagcagtggcagaaggtgggccccgtgtgtttacagcatttccaggtccagagaggttggcagacaagtgccattttaataaaaaatgtatttaaaaaaagaaaaaagacaatatactgacagtctaatcatcagatttgtcctataggactgtgacatttattttccaaagtttttaaagaatacgggtctgtggtgataaatacagtacaatcctttttcactgttatgtctttaatgtaagagaagaatatatatatctggtttgcagtattaatgtgatagatagatgctgttttttcattttattgactatggggtgcttctgtgatctgtttggcatatcaagagtgttttggagcctggagatgggaccgcctctcagttcttagtgcttaaggacaggaatatgcaattgacttaatgtgacagcaacccgcttcccccgtggagactgtgcagcgtgtacccatgggagggacggatgtgccctccgcgccgctcgccaccctccctgccgcctcatccccgtgtgtcactcactcagctgatgaagcacaagtggaaattatttattcttgcattgctgggaaacattgatgtgtggggactcactcctctccgtgtgctcttttgtcagatgacttccatagatctatgcactgagattcgtagaaagctgttggtggtggctctgctgggcgtgaggccgtcggtcacagcgaaggagcttgcctggccctgggaggcccaaggatagcagggccagcagagggcatgggccgttcttctggggtttgcatttggggccccagacttgggtttgccaatctagaaactgttgcactaagagtgacaccacggacgattttgaaggctaacaacagacaactctgtttgtgctgagtgggctttttgtctctgtacacagttttagtaagactcaaatccatgttccgtgtagaggcgtcaggaaggaggcgagcctcccctagtgctgctgtgcgctccgtaggtcccctcttcctgctgctgttccctccccggccctgcgcgacacttacctcggcactgtggtggggtggggtgccaaaggagctgcctcctgctcagcggcacccccccccccacctttgtgctcagctgctttggaggcagcaggaggggcagcaagccgcaggtcgggggtctcccgatacctcgcctggatattggcggcaatgacaaagggatgactattatttgtgaagatgtgtactcagagtggtgtgtgtgtgtgtgcatgcgtgtgtccctgtgtgtgagtgtcttattaatggcattagtctcttctggctgtatttttttttaatctttttaaatgacagaagctcccactctaagaaatggcagttccttttgttttagtggcaagtggcactttctcctgttttcagaaggatacagacatgctcgtagcttaaattaatggatgcattcaagctaaggagggaatcttgtgactaataacttttcaaatctgaaattagattagtttccagccatttttacaatcatctggaaccatgtgtctcaaaggtgtgtttcttccacctgcgtcaggctgtctgggggatggcggttcttgtttaacatgcagatttgtgggcctgctgccacctcctgcgtgcggtacttcagggatggccagggcatctgtgtctaagcgatggcctgcagccctgggctccctggggtctgaggacccagctctggtggcacccagcagggaggaggtgcttcctgagcagatgcctgagacagactgggctggcagaaaagtaggactacaatttttgttttttttaatcattttgaaggaaaactttcatttttagtgggccagagtacttcgaaaagggtacttttttatagccctatgcttgttttataaaacttttaatactaaaaacattaatagaccaaacatctccagctgggtcagctgcacacctttgtacatgtctgatgattcagagtttaaatggctgtagttacaatttctcaggtaaacaattgttttctcaaatttttaccaatccctgcattattaggataaattttgagacagtgtaaaaacctcaaagtacagtagggtaagtcccagccctgttcacgtgaaagccagaggtggcccttccccggcatctgatcgtctgatcatgtgggtgcctggggccttgccacccttccctgtccactgctgcccccctgggcctgtcaagatttgaggggtgcccactcgctggctttgtccccatcccactgttaagtaaggtgtgccttgctttaagcaaactgaatgtgaaaattatgtgtagaagtctgggtttgtttaaaagaaaaactgggattttatctcatctctttaaaagaggtctcccaattcgatttctgtactgggactcttcctggtgtgtttttacatgttcactttttaaaaacattgatgtactcccatccttttaccactaccctatcacatttgacaagttcttgctgtaatgacgacgcaattaacgaacaccaggggagcggtggaaagctgccctcgtgtgtgagcccttcggtgacgcaaagccaccgtcctgttgttttgtgtgtcctaagctcagattttcctggtttggataaattttgtaaaactgggcatagctgtacttttagaaagggatcgttttccttaagttttggttttctctggttcaagcagtctttacatgcagccttttgattgcacatcagggtctcccttttcttttccagatgatgttgcttttcggtggtggtctcacactcctttgaatgaatgtttgcactctagaaccacaaacgatgcgtgaccattgtacagcttgcccaagagggaactgttggaagcaggcagtgacctccacgctgtttgtttgaggctgacctaaactgctatcactaatgtttacccccgtgacggagtgcccattagaacagatcatgtcagttcagttcctgtagtggggttagtaggtggggggttttattgttgttgttatttgttacttttattgctgttaaatgcaaatattgctatttattttttcctttctgctctggtttggtttggccgacacagatattccagtgcatgtggtacctaatggatatgatagaaattatttccccaacttttataaattgcctaatgtttaccttcaagtttgctggatgatttatttttgaaagccacaaatgtgatttttctggatgaattgtttttcttatatatgcagcaatgtaattttacattgatctgcggggtggtttaaattttatttttacaaggcagtttttcagtcaaattatatatttgatacaatacgctaggatagaccggccacacgtcaggcagccgggacaccggagtgtccccaggaggcctttggggctggggtggcccgtggcttgttccctgcgcctctgggaactggatgagtccttcggcgggactgtgacccgctggacagttaaaaggatttttcatgggcattttcctacacataaggcagttccattaggaggagctttagaagtcgacataatccagacagtggacaatcccagtggcccagacaagccatacgacattttcctgtgacctctctctgacccatctctcacgctcatgagaaaaggaatgtacaataaatagaaacagaaacttcctcagtgctcatgcgcctcacttgcagaacgtgagtatttcatttatgtttgaagcccttccccaaagtgaccgaggagttgcactctagctgccgtgccagcagtctcgtctgctgtgacgcttctcggtgcggatgcagtgcacctgtgactttgtcatgggggtgcccctgttacacacacacacgctgactcttttttatgaggaaaatcttcgactcaaaataattgcactgattttttgacaacttctttttacgatgtcccacttcgcatctgctgtacttgtttgagatgattgtaaatagatttgtggtaggagaagtgacatgaatgcaacacgtggctctgttgtggagacactgcctcgtattcagtattatgtgttaaagttgtgtggacttaactctgttccgccctttagcttcgtgtctgttgaccatttatgaaggacaagttcgcctcattttctttttcttctgaagggaagttctagatcggttactaggagaacatggtctcttggtgcctgatgatttagtcctaagcagactcgttgcagtcttgtgaacactgttgtggtctgtttgattcctcgtcgcttaccgtggctctccaaagcatggtctttgagttccacccagcctgggacagtccagacgggaggcatctgctccgcctgctactaggacgcaagggcctccttgcatctctgtggtcagagtcatcttaaagccatgaggttactgtcgtgtcaaagctgtcatttgtgcccgttattttgctggagtagcagcgtgtgctgtagcccccgtgtgtcactctgtggtcaggctaccctgtgtcacacccagcaagaagtttttcagccccagaccagtctgtgtgtgtgtccgagtcacaccagtgccattacggtgccctcgcttatgcttctttcagtatgttttgccatgttattgtctaaagtgaatgtattggcttagccaaatcactacagaaggtggttcctaaataccttttagtttaaaaaaaaatgcagataaaggctacctctgaattctcaatagattcatcatgtttgctcttaagtgtagctgtccacactgaaaacagccaatatgttgcctgaataaactgaattgtgaacatctatctgttcagttctggcttgaaaatgtgtgtgccatactgtgacccacgggcagcccctcctcctctactgtgtcaggtggaccagggtcacctctgttctgcgcagctttgagattctaggattctacggccggcacgaatggcatgggagggttctctgcacgggacggcataacggcatgccatccttcaggctggcaggagcctgcgcaggtgtggcaaaatcttgaaacagcctgtgtcctgcctggcttttcactttcctatttaatataagaaagcacttttttttctgctttacctacaaatgggttgaaaatggcctcctctgtcctctcctctcttttatacactctgtaaaatcacaaaggtgcttcaacaccgactgtcatgcaaataatacatttaaaatagttgcatggtttcaaagacaatgcagacgtaattggcctttgactttgggacctcgggttactctcactccctactgcaaaacaaactaagggttgaaagcaaagcattctgttcaaatccagggccctttgtttgaaaagaacacagggcccacagctggtgttttgaagtagaagttcccactagtggcgcagtggaccgtctgatgcagacttgcaggaagtcggtcctgggaggctctgaacacccctccctgtgattaaccactttgctgtcagaaatgtcattttcccatacactgtgctgtgggcccggggcctccttcgcttctttctttgggttccatatgttgcccgatcttgaggttagcgctcgccccaatttctccatgagtttactctgagttgacaggcgatgatctgacagttggaggtgtctgggtgtttggaggtggccccgttctcatgttggctgctcatcagacattgagtttggccccggcggttctactacgtcactacctggaagcaattgcctttaacactctgctgtttggggtttcgatgctttttatgctgcgttgcgtgctttcattccggaagagctaagtgtcctttgcagtctctctgagaatgttttgtaattctgccgccacgctgttctgtgcggaccgacctcaagaggcttgggcccccgtgggtgtcccactgcctgccggcccagggtacaggctgcttgggtccgctgggctggccttgggctgtcagaatctggtccagggtgtttcgaggggacactgcacagccgctcgcccctcgactcagtcatgggagctgcagcacgcagatccaccgcaagcttcctgcacgcgcatctccggaatgctgcgctgggccctcccaccatcttcgcgtttgtgagaatttactcagaagtgagagaactgaagattcctggtgcttttgttaacacgtttctatcttattggttggtgtggaaatgttagatgtgttgttaggtttttaaatgctgtgggtggtatgattaaagggttaagtcctcacctcagcccccagcccccttttggggggtaggaagaggctgagttatctcctatttaaaacctccttggatttaagtagttcagagttaaagctaaaacaccaaatattaactctttcccccaagtgtctccaggaactggacgttggggccattcttattcagttctttctgtagctccaaggtccttaaaatgagtgagttgatcccaagaacaccccacagcaccaaccagcagggcacagtgcaagcgacttcatagatcggggtgctcgtgtaggggtccggggctcctttgaactctgggagttgtgtgcgcagtcttgggtgggagacggcaggtccctctgtcccaagaagctggtggtgccaaggccttcctctgtctccatcagtgccagcctgatcgcgttctggaagacccagtctcagactctgtgcctttaaagtccggtcctcagtgtcctttcagaatcatgttggggctgcgtttctctggggaactaagcctgtgccattccacaaggcaggcgtggacctccagccttggaagctttctttccgctcctcagcccctgacttgtaaactgtgatgccatgcagtctggagccgcgggggacgcactcggtctcattgcggaaaacacttggttccagtcgtgtggtttctcccataccctgaccaagtccacctctgccaggattgcaggagattggtgcaagacccatctcttatgcattgaccatgaccatcagcaaagcctggtggtcttgttctcatagtcactcgagaagaatatttattgtaatggaagtagattttttaaaaaaggaattggaatcatgtctttgtagaatgtgtgtgtgtgaagtcctcagctgtaaggtgctattcagtcctgtgacccttattttggaatgctcttcattactgttgctctgttttgtgacttcctgggaaaccgcttactttggtgtggtgtcaccttgagctgtgcacataggacaccagttttgacttaacctaacaggcagtttttatctctagctttttcaagccaggtattgagcagtttcttggccaatggcctgagaaaccacctgtccctgtcaaggggtgattttattggttttaagtggggaagtaatcccatgtacttatttcttaaatacctaggaagttcttcttggtggctcctcttggccctcccctctttctcccccaacccaccatcctgcaaggcaaggaatggcctctccctccacagaggcaacggctgcagagggagcactgtggctgccatcccagttcctcttcaaagccaaacagacacgcgtgactcaaatcctacagtatggagggtggcgttgcattgaaattccaggcctgagtttgatagtggattttaatgtagttgttaaaggtatgaattcatgttttataactgtagaggcaagcaagtttttattttttaaaaagttttgagagaataatttataagtttctgtgcagcaaagtggctaattactcattaaatacaggaaaagaatgtagtatctaaatccagctttttcttacctctggtacacttcagattacttacctaatacatattgagggcttttaacccttagttttatcaatttttctagttttattttatttttataaaataattgaaaaagaaccaaaaatgaattcagaagttccatagatggatttttgccccttcttaattttctcccacaatgaaaacattttagaagacattttgaatcaaaatgtattatgaccattgaaagttctctattttctaagaagctgagcagctccaagggcctcgtttcaggtggtactctatgtattgtctgtgggcttgtttctacctgtacagtggaaccatgtgaccatgtcttgtgcttgcaatatagaaaccatgcagtgctgttttgtgaattggcagtttctgtataaactcttatttatatacattggcctctctgtatgattttccatttgctacatgaattgtaaaattaattataaaattatagtacctgctaaatacaattctgaggcttcatgtcattgtctttagttgaataccatgctgtgtgtcttgaagatgtccacgcttgcatgatgctaggtggcaatgccactttaaattaagccttaatcagatgttaaatttgtgagtttcagagtatgcaaaaatattaggcagagtgagtgtaaactgttcagatcaagatgctgtatcataattcaagttatttttttctggagttaaagggaagcattcagtgatacacctctctctctctctctctctctccccctctcccccctccccctccctctctctgtctctgtctctgtctctctctctctctcttgtctagcttggctatggccatagcttgatgaaaatggaccattgtgcatttctgtgacagtcaaaaagacctgttctaaaagtcttgcgactttttcagggttttttttttttttcatgtttctttttttttttcccctccagtctgagatttctgtgtggctgatggagagtgtgatttgggcgtaggtcttatttgcaaacctgctcatgttctaagctttcttcaggtagtaccacctgtcatcgcttctgcatatgatttaaatggatttttgtttttataaaagtatcataaatttagagataaaatggaggggacccagctttctttacaatgtggatctacctcagttaaacagttgggtgctattactaagtctgtcaaattaaattggaaaaagtaaccaaacagtgagatacaactccacatgaaacttgaaattgtaatttccgtttatttaatgatatttttatttatttgtgccttttatgttgaaccccaatgcattgaaaaaattcagtatgaaacagtacatattttatttatattacaggtgggagaaaagtccaattggtcatggaatttgatagacttttccccagccaactgctacagtgtattataatcccgactgcccccctgtgaaaagaaaaaaaaaaatgtccaagagcaaatttaacattttacaaacaataaagtccaaactcctctatgcacatatttatagcttatcacttcattttctgtgccagtgaaggggtggccagaaaaaaaatcccaagtaccctcatcattgcttttctagccattcatgccccctcttcctctggcacattttctaagagtttatttcataagcagcaaacggactgttgtcgatttcatctctcctgacctacctggtggaggtgctaatggccatggacagaaaggggcgagccagagctcgtggctttgtggaggcagaggcctgcattcagcagcggccctgtgtgcctgtaagttaggaaggctttctgacaggtaagaaaatgagataggttgatgacttaccatgcttttatatttggcagtttacaattctagacttttcctactatggcgatctttttttacttaattctttggaggtaacaatattttggagtcttaagaatttgattttataccaataagaaataaaaattagggatctttcctgtagtatatagttttactattttaaagagatctctgaattttacaagagaaccaacattccttaatggcagaactttgaaagttgatttgggaggctttttgctgcaggatctcaaaaatagagagagagatgattctacttaaatgtttttaattttctaacttccatcaggttgatacttaagctctattttgtaaagagtaaatcatcctttagtatgctgcataagatgatcagcattcttgcactttctcagtaataagacgtgccgggcaattggctccccaggacgcattgtgtttttaacctaacgagaggactttggggcaggtgattaaatttatataggtacctcaagaaaaagaacctgaatatgctgcattttctttctttagcttttacatgtagcattttgttttgcttttgttatttttgttttgatatatgctttttggaccccaatagactgttgaaagaaatttaaaaattactcttgtagggatatagtatccttaaaaaataaaaatttaaaaaaatttaaaaaaattgctgcaatatctggctcgaaggttgccctatattagaataatactttagccaaatacacctgaggaggcagacactgtgtttataagcagacaataatgttctgaatccttcctgttcatgctgctttcttaattcatttctccatgtcatcaagaggttggataacttatttctaagctcaaggttaaaaatcatgtcacctttttttttttcccccaacacagacctcagaaaaattgcgattgaggaagtagcatgatcctaaatgtgttgctgaaatcaggcagcccgagcctctggtctctccagagagcccgtcttcacatttctctattcctcagcactcacccgaaactgaacagatggggagtggtcttgattgtcaagataaaactggtgaagaaagctaaatgctgagaaactgagcatctattgtcgtgtttaagcttagctgggtcctttctagtttgtttttacagcttactaggtgaagtagtttgcactatttttgcaataaattcatggaaaacctaacagttacttgttttgtttcttactgtgtgtatataaactaatactaaaagtttggcatagtgttttttcacctccttacataacccctaacatgcacagaatgctgtaaatctgataaaatatgatgtgaatgatattttataaagttattttgtatggtgtcaattttgttttgcctcatagtatgtcagcaaaaaattaaataaaagtcctcctatttaca

SEQ ID NO: 108718 - DNA, 3050 bp, Homo sapiens
  Payload ID: 1360
  Gene Symbol: AGO2
  Gene Name: argonaute RISC catalytic component 2
  ENST ID: ENST00000523609
  CDS Start-End: 41-262
cggccgcccctcggccccggagcccctcggcggcgccaccatgtactcgggagccggccccgggaaatcgtggaacacatggtccagcactttaaaacacagatctttggggatcggaagcccgtgtttgacggcaggaagaatctatacacagccatgccccttccgattgggagggacaaggtggagctggaggtcacgctgccaggagaaggcaaggatcgcatcttcaaggtgtccatcaagtgggtgtcctgcgtgagcttgcaggcgttacacgatgcactttcagggcggctgcccagcgtcccttttgagacgatccaggccctggacgtggtcatgaggcacttgccatccatgaggtacacccccgtgggccgctccttcttcaccgcgtccgaaggctgctctaaccctcttggcgggggccgagaagtgtggtttggcttccatcagtccgtccggccttctctctggaaaatgatgctgaatattgatgtgtcagcaacagcgttttacaaggcacagccagtaatcgagtttgtttgtgaagttttggattttaaaagtattgaagaacaacaaaaacctctgacagattcccaaagggtaaagtttaccaaagaaattaaaggtctaaaggtggagataacgcactgtgggcagatgaagaggaagtaccgcgtctgcaatgtgacccggcggcccgccagtcaccaaacattcccgctgcagcaggagagcgggcagacggtggagtgcacggtggcccagtatttcaaggacaggcacaagttggttctgcgctacccccacctcccatgtttacaagtcggacaggagcagaaacacacctaccttcccctggaggtctgtaacattgtggcaggacaaagatgtattaaaaaattaacggacaatcagacctcaaccatgatcagagcgactgctaggtcggcgcccgatcggcaagaagagattagcaaattgatgcgaagtgcaagtttcaacacagatccatacgtccgtgaatttggaatcatggtcaaagatgagatgacagacgtgactgggcgggtgctgcagccgccctccatcctctacgggggcaggaataaagctattgcgacccctgtccagggcgtctgggacatgcggaacaagcagttccacacgggcatcgagatcaaggtgtgggccattgcgtgcttcgccccccagcgccagtgcacggaagtccatctgaagtccttcacagagcagctcagaaagatctcgagagacgccggcatgcccatccagggccagccgtgcttctgcaaatacgcgcagggggcggacagcgtggagcccatgttccggcacctgaagaacacgtatgcgggcctgcagctggtggtggtcatcctgcccggcaagacgcccgtgtacgccgaggtcaagcgcgtgggagacacggtgctggggatggccacgcagtgcgtgcagatgaagaacgtgcagaggaccacgccacagaccctgtccaacctctgcctgaagatcaacgtcaagctgggaggcgtgaacaacatcctgctgccccagggcaggccgccggtgttccagcagcccgtcatctttctgggagcagacgtcactcacccccccgccggggatgggaagaagccctccattgccgccgtggtgggcagcatggacgcccaccccaatcgctactgcgccaccgtgcgcgtgcagcagcaccggcaggagatcatacaagacctggccgccatggtccgcgagctcctcatccagttctacaagtccacgcgcttcaagcccacccgcatcatcttctaccgcgacggtgtctctgaaggccagttccagcaggttctccaccacgagttgctggccatccgtgaggcctgtatcaagctagaaaaagactaccagcccgggatcaccttcatcgtggtgcagaagaggcaccacacccggctcttctgcactgacaagaacgagcgggttgggaaaagtggaaacattccagcaggcacgactgtggacacgaaaatcacccaccccaccgagttcgacttctacctgtgtagtcacgctggcatccaggggacaagcaggccttcgcactatcacgtcctctgggacgacaatcgtttctcctctgatgagctgcagatcctaacctaccagctgtgtcacacctacgtgcgctgcacacgctccgtgtccatcccagcgccagcatactacgctcacctggtggccttccgggccaggtaccacctggtggataaggaacatgacagtgctgaaggaagccatacctctgggcagagtaacgggcgagaccaccaagcactggccaaggcggtccaggttcaccaagacactctgcgcaccatgtactttgcttgacatgttttagtgtttagcgattgtgtaccgagtgggattcacgagaccagctacactcagaccaacagatggccagcccttccgtgacagccagcatcgaacatgagacgtcattgattttattagattctccgttttccagaatgccttccgtcccagatttcaaacttggattttgaactgcagacctgtatgagaacccaatgtcataggaaatatggtttgctaaaatctataagctgcttattaaaacagagtcccgtgtgtcctaaaaatctcctaaaaccagtctatgaactcagggctttaaaacatttttaatttatttggtcattcaatttacttgtttttaatacatgattctctatgaaattgatgggctcaaactagctgtgaatcttctgagagtgaaagcaacacaaaacacaagtgtggttttaaagccttgaacattctgatgttgtcactaaagttgatttccaggcgatgctcgtgtgcccctggcgtggctcacccaagttcctcgactgagggccggtggccatgcagaggcgtccgcaggtgccgtgttctgccagcaccgcccttcacccggcctgaactaaggagcagtggcagaaggt

SEQ ID NO: 108719 - DNA, 3141 bp, Homo sapiens
  Payload ID: 1360
  Gene Symbol: AGO2
  Gene Name: argonaute RISC catalytic component 2
  Uniprot ID: Q9UKV8
  ENST ID: ENST00000519980
  CDS Start-End: 41-2518
cggccgcccctcggccccggagcccctcggcggcgccaccatgtactcgggagccggccccgcacttgcacctcctgcgccgccgccccccatccaaggatatgccttcaagcctccacctagacccgactttgggacctccgggagaacaatcaaattacaggccaatttcttcgaaatggacatccccaaaattgacatctatcattatgaattggatatcaagccagagaagtgcccgaggagagttaacagggaaatcgtggaacacatggtccagcactttaaaacacagatctttggggatcggaagcccgtgtttgacggcaggaagaatctatacacagccatgccccttccgattgggagggacaaggtggagctggaggtcacgctgccaggagaaggcaaggatcgcatcttcaaggtgtccatcaagtgggtgtcctgcgtgagcttgcaggcgttacacgatgcactttcagggcggctgcccagcgtcccttttgagacgatccaggccctggacgtggtcatgaggcacttgccatccatgaggtacacccccgtgggccgctccttcttcaccgcgtccgaaggctgctctaaccctcttggcgggggccgagaagtgtggtttggcttccatcagtccgtccggccttctctctggaaaatgatgctgaatattgatgtgtcagcaacagcgttttacaaggcacagccagtaatcgagtttgtttgtgaagttttggattttaaaagtattgaagaacaacaaaaacctctgacagattcccaaagggtaaagtttaccaaagaaattaaaggtctaaaggtggagataacgcactgtgggcagatgaagaggaagtaccgcgtctgcaatgtgacccggcggcccgccagtcaccaaacattcccgctgcagcaggagagcgggcagacggtggagtgcacggtggcccagtatttcaaggacaggcacaagttggttctgcgctacccccacctcccatgtttacaagtcggacaggagcagaaacacacctaccttcccctggaggtctgtaacattgtggcaggacaaagatgtattaaaaaattaacggacaatcagacctcaaccatgatcagagcgactgctaggtcggcgcccgatcggcaagaagagattagcaaattgatgcgaagtgcaagtttcaacacagatccatacgtccgtgaatttggaatcatggtcaaagatgagatgacagacgtgactgggcgggtgctgcagccgccctccatcctctacgggggcaggaataaagctattgcgacccctgtccagggcgtctgggacatgcggaacaagcagttccacacgggcatcgagatcaaggtgtgggccattgcgtgcttcgccccccagcgccagtgcacggaagtccatctgaagtccttcacagagcagctcagaaagatctcgagagacgccggcatgcccatccagggccagccgtgcttctgcaaatacgcgcagggggcggacagcgtggagcccatgttccggcacctgaagaacacgtatgcgggcctgcagctggtggtggtcatcctgcccggcaagacgcccgtgtacgccgaggtcaagcgcgtgggagacacggtgctggggatggccacgcagtgcgtgcagatgaagaacgtgcagaggaccacgccacagaccctgtccaacctctgcctgaagatcaacgtcaagctgggaggcgtgaacaacatcctgctgccccagggcaggccgccggtgttccagcagcccgtcatctttctgggagcagacgtcactcacccccccgccggggatgggaagaagccctccattgccgccgtggtgggcagcatggacgcccaccccaatcgctactgcgccaccgtgcgcgtgcagcagcaccggcaggagatcatacaagacctggccgccatggtccgcgagctcctcatccagttctacaagtccacgcgcttcaagcccacccgcatcatcttctaccgcgacggtgtctctgaaggccagttccagcaggttctccaccacgagttgctggccatccgtgaggcctgtatcaagctagaaaaagactaccagcccgggatcaccttcatcgtggtgcagaagaggcaccacacccggctcttctgcactgacaagaacgagcgggggacaagcaggccttcgcactatcacgtcctctgggacgacaatcgtttctcctctgatgagctgcagatcctaacctaccagctgtgtcacacctacgtgcgctgcacacgctccgtgtccatcccagcgccagcatactacgctcacctggtggccttccgggccaggtaccacctggtggataaggaacatgacagtgctgaaggaagccatacctctgggcagagtaacgggcgagaccaccaagcactggccaaggcggtccaggttcaccaagacactctgcgcaccatgtactttgcttgacatgttttagtgtttagcgattgtgtaccgagtgggattcacgagaccagctacactcagaccaacagatggccagcccttccgtgacagccagcatcgaacatgagacgtcattgattttattagattctccgttttccagaatgccttccgtcccagatttcaaacttggattttgaactgcagacctgtatgagaacccaatgtcataggaaatatggtttgctaaaatctataagctgcttattaaaacagagtcccgtgtgtcctaaaaatctcctaaaaccagtctatgaactcagggctttaaaacatttttaatttatttggtcattcaatttacttgtttttaatacatgattctctatgaaattgatgggctcaaactagctgtgaatcttctgagagtgaaagcaacacaaaacacaagtgtggttttaaagccttgaacattctgatgttgtcactaaagttgatttccaggcgatgctcgtgtgcccctggcgtggctcacccaagttcctcgactgagggccggtggccatgcagaggcgtccgcaggtgccgtgttctgccagcaccgcccttcacccggcctgaactaaggagcagtggcagaaggt

SEQ ID NO: 108720 - DNA, 316 bp, Homo sapiens
  Payload ID: 1360
  Gene Symbol: AGO2
  Gene Name: argonaute RISC catalytic component 2
  ENST ID: ENST00000524328
  CDS Start-End: 209-316
agcttcatcccaccgggcaattttcctgcacagcagctgttacagtcccattctcacctggcccctgggccagttcggaagcctctgagcagcacttgcacctcctgcgccgccgccccccatccaaggatatgccttcaagcctccacctagacccgactttgggacctccgggagaacaatcaaattacaggccaatttcttcgaaatggacatccccaaaattgacatctatcattatgaattggatatcaagccagagaagtgcccgaggagagttaacagggaaatcgtggaacacatggtccagcacttt

SEQ ID NO: 108721 - DNA, 3211 bp, Homo sapiens
  Payload ID: 1361
  Gene Symbol: AGO3
  Gene Name: argonaute RISC catalytic component 3
  Uniprot ID: Q9H9G7
  ENST ID: ENST00000246314
  CDS Start-End: 614-2494
ccggcccagagctttcggagtgcggttgctcaggggaagccgtcgccgcccccgcctcggggccgagtgagagtgcccgtcgcgtcgcgccgcgtcgccccccgggccgcctccttgccgccagtggcgggctccgttctccctcgaagcactccccccagctccatgaatggaaatcggctccgcaggacccgctggggcccagcccctactcatggtgcccagaagacctggctatggcaccatgggcaaacccattaaactgctggctaactgttttcaagttgaaatcccaaagattgatgtctacctctatgaggtagatattaaaccagacaagtgtcctaggagagtgaacaggtagatttagacgttactttacctggggaaggtggaaaagatcgacctttcaaggtgtcaatcaaatttgtctctcgggtgagttggcacctactgcatgaagtactgacaggacggaccttgcctgagccactggaattagacaagccaatcagcactaaccctgtccatgccgttgatgtggtgctacgacatctgccctccatgaatttctgccactgccttctacaaagcacaacctgtaattcagttcatgtgtgaagttcttgatattcataatattgatgagcaaccaagacctctgactgattctcatcgggtaaaattcaccaaagagataaaaggtttgaaggttgaagtgactcattgtggaacaatgagacggaaataccgtgtttgtaatgtaacaaggaggcctgccagtcatcaaacctttcctttacagttagaaaacggccaaactgtggagagaacagtagcgcagtatttcagagaaaagtatactcttcagctgaagtacccgcaccttccctgtctgcaagtcgggcaggaacagaaacacacctacctgccactagaagtctgtaatattgtggcagggcaacgatgtatcaagaagctaacagacaatcagacttccactatgatcaaggcaacagcaagatctgcaccagatagacaagaggaaattagcagattggtaagaagtgcaaattatgaaacagatccatttgttcaggagtttcaatttaaagttcgggatgaaatggctcatgtaactggacgcgtacttccagcacctatgctccagtatggaggacggaatcggacagtagcaacaccgagccatggagtatgggacatgcgagggaaacaattccacacaggagttgaaatcaaaatgtgggctatcgcttgttttgccacacagaggcagtgcagagaagaaatattgaagggtttcacagaccagctgcgtaagatttctaaggatgcagggatgcccatccagggccagccatgcttctgcaaatatgcacagggggcagacagcgtagagcccatgttccggcatctcaagaacacatattctggcctacagcttattatcgtcatcctgccggggaagacaccagtgtatgcggaagtgaaacgtgtaggagacacacttttgggtatggctacacaatgtgttcaagtcaagaatgtaataaaaacatctcctcaaactctgtcaaacttgtgcctaaagataaatgttaaactcggagggatcaataatattcttgtacctcatcaaagaccttctgtgttccagcaaccagtgatctttttgggagccgatgtcactcatccacctgctggtgatggaaagaagccttctattgctgctgttgtaggtagtatggatgcacacccaagcagatactgtgccacagtaagagttcagagaccccgacaggagatcatccaggacttggcctccatggtccgggaacttcttattcaattttataagtcaactcggttcaagcctactcgtatcatcttttatcgggatggtgtttcagaggggcagtttaggcaggtattatattatgaactactagcaattcgagaagcctgcatcagtttggagaaagactatcaacctggaataacctacattgtagttcagaagagacatcacactcgattattttgtgctgataggacagaaagggttggaagaagtggcaatatcccagctggaacaacagttgatacagacattacacacccatatgagttcgatttttacctctgtagccatgctggaatacagggtaccagtcgtccttcacactatcatgttttatgggatgataactgctttactgcagatgaacttcagctgctaacttaccagctctgccacacttacgtacgctgtacacgatctgtttctatacctgcaccagcgtattatgctcacctggtagcatttagagccagatatcatcttgtggacaaagaacatgacagtgctgaaggaagtcacgtttcaggacaaagcaatgggcgagatccacaagctcttgccaaggctgtacagattcaccaagataccttacgcacaatgtacttcgcttaaatagtccaagtatattctctgagaggaagtactgaaagatgaattgacatacaacgtatgtttccagtgaagtcaattgagtaaggacacctccagccatacagaaaccaacactgtgtgggggccaaggtctgatccttatgttaatacaaggaagattgtttacttcatcaaggaacacagcatcattatgcaatatgaaaccagccaactgctttttgtgcggtctcctataggaagtatcgcaattgttttgttttcatttcttgtagtctaacccttttaatgcctttacctcaagttgcttggcagcacaactatctttgcaaaaaaaagtaaagaaaaagtaaatgatggtttaaaaaatacacaccttcatgaataatcaaagtgatttttcagaattatgtgtgcaaaaaattaatgtgcattcatatattcttgtaaaaggtgtctgtgtatttttaaaatatatacatccatacttcatatgcatatatatctagatctggattgataatagatatatatgtgtctgttatatattttagagttcattccattggggaattttctttcccttttattctacccccactaccgcctttatttctctatttcccttgccttcatcacctacatttttttcccagtcctaccagtgacattcaaatgttgatgtatctggttcgtttgaatataaaatatggcaaacta

SEQ ID NO: 108722 - DNA, 1726 bp, Homo sapiens
  Payload ID: 1361
  Gene Symbol: AGO3
  Gene Name: argonaute RISC catalytic component 3
  ENST ID: ENST00000324350
  CDS Start-End: 280-969
aggaaggagggtggccctaccccagcgggctcggctcggggcctccgcggcagttcggggtccttcacccgccggctccagtcctgtgccgttttccgtccgcgactcttccggcccagagctttcggagtgcggttgctcaggggaagccgtcgccgcccccgcctcggggccgagtgagagtgcccgtcgcgtcgcgccgcgtcgccccccgggccgcctccttgccgccagtggcgggctccgttctccctcgaagcactccccccagctccatgaatggaaatcggctccgcaggacccgctggggcccagcccctactcatggtgcccagaagacctggctatggcaccatgggcaaacccattaaactgctggctaactgttttcaagttgaaatcccaaagattgatgtctacctctatgaggtagatattaaaccagacaagtgtcctaggagagtgaacagggaggtggttgactcaatggttcagcattttaaagtaactatatttggagaccgtagaccagtttatgatggaaaaagaagtctttacaccgccaatccacttcctgtggcaactacaggggtagatttagacgttactttacctggggaaggtggaaaagatcgacctttcaaggtgtcaatcaaatttgtctctcgggtgagttggcacctactgcatgaagtactgacaggacggaccttgcctgagccactggaattagacaagccaatcagcactaaccctgtccatgccgttgatgtggtgctacgacatctgccctccatgaaatacacacctgtggggcgttcatttttctccgctccagaaggatatgaccaccctctgggagggggcagggaagtgtggtttggattccatcagtctgttcggcctgccatgtggaaaatgatgcttaatatcgatgaaagagacctctggcagcagtgtggagaatagatagaggagaaaaaactaatctgagaagccagttaggaggcttttcaatcactagttcaggtaagagatggtgatggtctaatgtgggatggagaggaaggattaagctgaaaaaataggtttaagaaccatgtccagaaaaaaaaaactttgggtgtagtactggtacatggaacggattggaaaaaaatagaccagagctttactagatttttgaaagaattgtttttgcaaataaactacaagcctggcatatcagtcaaggttcagaacctagagaagcagaaccagtacgaagtatagagagagagtttatgcaattgtaggggctagctaggcaagtctgaaattttgggggcaggctgtcaggaagggcagggaaattcaggcatgggctgaagcagttatctataagtggaatttcttgctctcagggaagcttcagccctacttttaagacctttcacctaattgaatcaggcccatccacattattcaggataatctccattacttaaagtcaacagattatggattttaattacatctacaaaataccttcatagcaacacctagattagtgtttgattaaacaaatggcagctggtagcctagcaagttaacacattaaaaacaacacctgccatgatggcttacacttgtaatcccagcactttgggaggccaaagtgggaggatcacttgagattaggagtttgcgatcaggctgaacaacatagtgagacctgatctctacc

SEQ ID NO: 108723 - DNA, 19687 bp, Homo sapiens
  Payload ID: 1361
  Gene Symbol: AGO3
  Gene Name: argonaute RISC catalytic component 3
  Uniprot ID: Q9H9G7
  ENST ID: ENST00000373191
  CDS Start-End: 350-2932
cggcgagcttccggggcggccccgggcaggtcggcggcggcggcccgcagtcgtggaggagcggtgggagcgtcggcggccgcgggcgatgcaacttccggacgggactcccctctgtccgcgcctcacatctccccttcctctcgcctagtcctgtgccgttttccgtccgcgactcttccggcccagagctttcggagtgcggttgctcaggggaagccgtcgccgcccccgcctcggggccgagtgagagtgcccgtcgcgtcgcgccgcgtcgccccccgggccgcctccttgccgccagtggcgggctccgttctccctcgaagcactccccccagctccatgaatggaaatcggctccgcaggacccgctggggcccagcccctactcatggtgcccagaagacctggctatggcaccatgggcaaacccattaaactgctggctaactgttttcaagttgaaatcccaaagattgatgtctacctctatgaggtagatattaaaccagacaagtgtcctaggagagtgaacagggaggtggttgactcaatggttcagcattttaaagtaactatatttggagaccgtagaccagtttatgatggaaaaagaagtctttacaccgccaatccacttcctgtggcaactacaggggtagatttagacgttactttacctggggaaggtggaaaagatcgacctttcaaggtgtcaatcaaatttgtctctcgggtgagttggcacctactgcatgaagtactgacaggacggaccttgcctgagccactggaattagacaagccaatcagcactaaccctgtccatgccgttgatgtggtgctacgacatctgccctccatgaaatacacacctgtggggcgttcatttttctccgctccagaaggatatgaccaccctctgggagggggcagggaagtgtggtttggattccatcagtctgttcggcctgccatgtggaaaatgatgcttaatatcgatgtttctgccactgccttctacaaagcacaacctgtaattcagttcatgtgtgaagttcttgatattcataatattgatgagcaaccaagacctctgactgattctcatcgggtaaaattcaccaaagagataaaaggtttgaaggttgaagtgactcattgtggaacaatgagacggaaataccgtgtttgtaatgtaacaaggaggcctgccagtcatcaaacctttcctttacagttagaaaacggccaaactgtggagagaacagtagcgcagtatttcagagaaaagtatactcttcagctgaagtacccgcaccttccctgtctgcaagtcgggcaggaacagaaacacacctacctgccactagaagtctgtaatattgtggcagggcaacgatgtatcaagaagctaacagacaatcagacttccactatgatcaaggcaacagcaagatctgcaccagatagacaagaggaaattagcagattggtaagaagtgcaaattatgaaacagatccatttgttcaggagtttcaatttaaagttcgggatgaaatggctcatgtaactggacgcgtacttccagcacctatgctccagtatggaggacggaatcggacagtagcaacaccgagccatggagtatgggacatgcgagggaaacaattccacacaggagttgaaatcaaaatgtgggctatcgcttgttttgccacacagaggcagtgcagagaagaaatattgaagggtttcacagaccagctgcgtaagatttctaaggatgcagggatgcccatccagggccagccatgcttctgcaaatatgcacagggggcagacagcgtagagcccatgttccggcatctcaagaacacatattctggcctacagcttattatcgtcatcctgccggggaagacaccagtgtatgcggaagtgaaacgtgtaggagacacacttttgggtatggctacacaatgtgttcaagtcaagaatgtaataaaaacatctcctcaaactctgtcaaacttgtgcctaaagataaatgttaaactcggagggatcaataatattcttgtacctcatcaaagaccttctgtgttccagcaaccagtgatctttttgggagccgatgtcactcatccacctgctggtgatggaaagaagccttctattgctgctgttgtaggtagtatggatgcacacccaagcagatactgtgccacagtaagagttcagagaccccgacaggagatcatccaggacttggcctccatggtccgggaacttcttattcaattttataagtcaactcggttcaagcctactcgtatcatcttttatcgggatggtgtttcagaggggcagtttaggcaggtattatattatgaactactagcaattcgagaagcctgcatcagtttggagaaagactatcaacctggaataacctacattgtagttcagaagagacatcacactcgattattttgtgctgataggacagaaagggttggaagaagtggcaatatcccagctggaacaacagttgatacagacattacacacccatatgagttcgatttttacctctgtagccatgctggaatacagggtaccagtcgtccttcacactatcatgttttatgggatgataactgctttactgcagatgaacttcagctgctaacttaccagctctgccacacttacgtacgctgtacacgatctgtttctatacctgcaccagcgtattatgctcacctggtagcatttagagccagatatcatcttgtggacaaagaacatgacagtgctgaaggaagtcacgtttcaggacaaagcaatgggcgagatccacaagctcttgccaaggctgtacagattcaccaagataccttacgcacaatgtacttcgcttaaatagtccaagtatattctctgagaggaagtactgaaagatgaattgacatacaacgtatgtttccagtgaagtcaattgagtaaggacacctccagccatacagaaaccaacactgtgtgggggccaaggtctgatccttatgttaatacaaggaagattgtttacttcatcaaggaacacagcatcattatgcaatatgaaaccagccaactgctttttgtgcggtctcctataggaagtatcgcaattgttttgttttcatttcttgtagtctaacccttttaatgcctttacctcaagttgcttggcagcacaactatctttgcaaaaaaaagtaaagaaaaagtaaatgatggtttaaaaaatacacaccttcatgaataatcaaagtgatttttcagaattatgtgtgcaaaaaattaatgtgcattcatatattcttgtaaaaggtgtctgtgtatttttaaaatatatacatccatacttcatatgcatatatatctagatctggattgataatagatatatatgtgtctgttatatattttagagttcattccattggggaattttctttcccttttattctacccccactaccgcctttatttctctatttcccttgccttcatcacctacatttttttcccagtcctaccagtgacattcaaatgttgatgtatctggttcgtttgaatataaaatatggcaaactagaattctacttttattttgcataccctactcctgactcctatctcatacacaattctgagttctcaactcttgatattgctgtcttaagaaacaaaattttatatatatatgtatacatacatacacagacacagacacacacatatatatacataaaataactttctgtgagagtgcgtctctcccctcccactcagaacatacatttaccatttgcgcaatttgtatataagcagtagcaacctgaactattctttttcttttttctttttcttttctttcttttttttttttaatgagacagagcctcgctctgtcaccaggctggagtgcagtggcgagatctcggctcactgcaacttccgcctctcgggttcaagcaattctcctgcctcagcctcccgagtagctgggtttacaggcatgtgccaccacacccagctaatttttgtatttttagtagagacggggtttcaccgtgttggccaggatggtctcgatctcttgaccttgtgatccacccgcctcgacctcccaaagtgctgggattacaggcatgagccaccgcacccggcctactattctttttctttagtgagtttgttaaagctgctataaatataaaacctgtcagaagttgtaactttctctctggtaagtgatgtgtattctgaagccttctgtttctatgggttatacatggaaattctttaaaggttttataaagggtaaatattttaaaagattagagctctgtagggttgagacctctgaaattgagtagagagaagagtttgttgagggatttttttgttttgttttttgatagtttacttgctgcctctcataccttaatgtgattttcatatattttttatatatatatatgtatgtgtgtgtatataaacacatatgtatgtgtttggaagtatagcttccttttcttttatatttattagaatagtgctttaataattatagaattgtattggcagcatcttttatagaaatataatcatgtttattttaagaactgacaacttgtttttgctatcttttagtgcaataagcagttttaaaggaaagttgtgtctgcatctttaccatggatagtaggaggaacaggcacctccatagtttaaaagggcaaagaatacagccttaatttcagaaggaaagttttgtaattttcagttttaaagcatatcttttaaaattcatcatgataaaaggctggacgcggtggctcatgcctgtaatcctagcactttgggaggctgagacaggtatatcaccggagctcaggagtttgagaccagcctggccaacgtggtgaaaccccgtctctactaaaaatacaaaaattagctgggcgtggtagtgggcacctctaatcccagctactcgggaggctgaggcaggattgcttgaacctaggaggcggaagttacagtgagccaagactgcaccattgcactccagcctgggcaacaaaaccaaaactccgtctcaaaagaaaaaaaaatcataatgaaaatgaagtgaaattgcctaaatgagtccaacttgaatattagaaataaagttgaacttttatataattgtgaatagcttaacatatttaaattatttgcaaatagattgtgtttattgaagaatcatattggctagatgcccattttcatttactaaaatgaatcaggaaaatgcaagatgatattttaaaacttttgctaatgtatcaccagtataactttccttttaaaattaaggtgatagtaacaaaggaagttaggactttgatcattttaaatcagttaaatcactgaaacgtgggaaattgttttacaaaacttttattgattacactttaaggtattaaaaagtactataaagctatcaaaactgagtttatcagtaacattggattcaggggagctttgcactttgtaactcatgaaaattgcattttgattttttttttttttgcactggttcagagtatagatactacagattgtttccagtgggcattgttgttagcctttcagaattccatctgcacgtgaaacctaatggatttagatctttagtttctctcttacctgtaatccactattattgccaattcactgtattttgagcctaaaatctgagcccatgtcctctgacaggcatgaaatcttttgtccctctgccagaaaactaagaaagtactgtattttgtatgtttattattttgaagtgtctgaaatgcaatttacaacactgttgcaaagaactttacaaaaggtaatatttgtatcgtatatacattttttctcccagccttctcccatctcctccagaaaaatttcctataaagatggatttttttacactgaaattttactgaatatagtcaggatcatgggcaagagaagaaaatagtatacccaagatgataaaaatttaattcgtctatgcttgatcagtgtgagtaaaacatcttcctttatcatgggagctgcacagattcatgtgggaaactttagggaatgactgtagataccctttctctatgtactctctcacctaattttcagtcactcatatatgctagagtggagcccttaatttaaatctatttggaaggacttttttaagaggaaaaatattttttctaaattataaagctttaccttttgagtgatttcttttttagagtgctcttacactagtcagcattgctagtttaaagttgattaacttgaaagagtatgtatactatatttctattttgctaacaaattggtatattaattaccattggttcttaattacaagaaaacttgtgcttagaattttaagataaaaggctaagtgacaaatgcttcttgaaatttgtcctatttattgttgcatttctggtgtagaatttctaatcttttttattttaaaaaagtttttttttttaagttaaacatgaaattcacagtgacccttctgctcctgcccttgctcactaactatatcatgaatgctagattttggtcttcttttttctgtgatgtatcttacgagactgactgtaaaatatcagtctggcaactagataattgattttcatatgaagaagagttgggagtttaatgtatattcttgatggttaatgtgtctacataaagtgctgatacatgtattatatcacagtatcaggttactggcatggaggaccatacacttacaatattgtagctgctatatttatttaagtagattctgacagttactgcactaaacagtaaggagataagcaggattcaaggctagtgttagacccttttttttcctaagagtaaggacacggaatatcaaagtaacaaagggtgctgccattttagtttcaatttaatatcaggatattctttgttttagaaatgtagattttgacttttacagtttgaaaaagggtacctcagcctcttcagtactggttttttggcacatttcaacagaaatattagattccctttctttttcttaatagtgatcttctaacaagtttcttggaaaaactatcattctaagggaaatccctgtttataacctattaatatatttctattcctagaagagagtctagcagggattctagtaggaattactgagtgttttggaaggcacttgatagaggcatctctgctttccagcacagggattctcagccttctaaagatctagaccagtttccaagctagcttctccacagcccaccactgcctagtgtttgcttgtgtattctctaatggattttaggaggataggccttctgacagagtcatgaaagactgaaggcatgtctagggaaataaaacctgacttgcccttcagcaggaatgactggcagcggatctctgtgttcaaggaaagggtgagcgctaagcatgccagtgatggatccgaagtatttagatggattgcagaccaggaattagagaccgtttgtgactcaaggaacttgatggatctgtttagagccctacatgaatttgccaagggcagtgatttttatgaaattcaagaagcaaacgacttcgatacagctagaatatgttgcagtcttcctatttcaaacttgattttaatatttttaccaagaagtttaactgacaactctgcaaaattttcattcagtatcattaaacctgagttaaatgtttgcttagcttatcctcttagatgttcttctgttgaacaggcaggttgcccttaacagtaacttgctacttaaattaccttttattagttagtcaagctgcaaaaatatcattagtgtggcgtctttattttggctttatccatatgaagtattcattattttcattctttttgagaattcataaatgtcttaaagcttcagtaagaattgttgggaggtttgacatcaagtaacgccttcctgtgtagcagtataaccctaatttagaactcttgttttcctatttcagtcctcatatttgatcatagaaaagcacttttgtgattctataggagtcaaaaaatcagccaagagtaggtaagtcagtcagcacagaaatcagaaagtgagaattttctccaaaaaatctttttaaaaaagtcctgcttatactaagaacattcttgatccgttgcagtgttagaaatgacactgtgattagtgaaagccaagctgagtcccaggaagcagggagggggagtgtgtgtgtgtgtatatgtatgagtgtgtatatatataatctcacacacacacacaaagggaaaaattattttgacttttttcctacttttaaaatggtacatttaagtttataattttccatgtcagtcaacataattttttaaactaaggtataatggtcaaggcttgtgctaatattacctactactcattgaaatttatattactttacccatcaaaactagtactccagatgtttacatcattgattaaatctcaagaatcttttgttcttaaaatatggaagttaaagattttaatttgaattaaagatagaaggatggtaaattcaatatagagggttgagatttaccagtgagaaaccctgttgaagtatcaggtaaatggtgtgacaaaattagaatcctgtcaaatcacctatccagccatcggggtcccttccttttttagactaatttctaaggtaaccagaatctaatgtatctatgttagggtctcagtaaagcaaagacgtttgtcagggcgtagactcttgagttaaattttttaatcattttttaaagcaaggcggttcttagaaagtgccttttcagaagatggtgctgtagatttttatttttcaagtagcacgaagctaagaattttaaagataaattattttagaactccaagagtgtgacagtttcataaaaataatgttagttgttgtcttgaatctcgtccaagggaaccaaggaaagcttttatgcagtaaagtatctaggtaaatgctcaccaaatttattttgtaaatttgaaaacaaaatatttagtagaattacctcttttaattcccaactgtgttggaggaaatccataatgcacataaaacagcaaacctacttaactttttaacaagattatgggtatagtaccaatgtccaaagggaaatgtaacttgcctggaatcataggcaacattttctaattaatctttttttttttttttttttttgagacaaagtcttgctctgtcacctaggctggagtgcagtggctcaatctcagcttactgcaaactccgcctcccgggttcaagtgattctcgtgcctcagcctcccaagtagctgggattacaggcatgcaccaccacacccggccctaattagtcattattaaggaggactgctcataaaggcagtaccaaatcatcattcagatcagcttaagtgagaaagcaaaatgataatctctattgttagagaaattttcttttctagacaccaaggaatattttaaatgattttttattttttctaggatgcaggaactatgaaaaatgatgacaaggcatttaaaagggtatgatcagttaaatagaagtagggtctgcaaattgtgcttaaggggaaataagcaaaagaaaggaaaatagtagaacctttcatactaattagaaatgtagttacctaccagagggcaattttgctccataccaggaagcagtaaatagcagtaaatgatcacctaggcacttctttcctgtgaatttggtgagcattcttccagaaaagaagactaaaagcaaacaacaacaacaacaaaaaataccacacctcagtaaccttgtatgctgcattatataataatgatagtaaaattatattgtttggagtgtactgtgtctgtttgcaaatatacatgcacattaaacttttttgtttttataatgtcttaatagcaattatgagtttatttttgttaagattaatttttctattgtgatgtttatatttattggcaatttgtatgcaacttttatattttgcttgtcggttttaaggtattttatttttatagatatttctagctttcctcattctttgtaatagcagcaaagattaagatggagtgttaatataccaaccaaactacgaattccataaactctagagtttggatttttaccaataaaccattaacactattttgtaacttagaatatttaatgttgtttatatagtgggcattaaagacagtctttagacagatttctacatgtggaggggaggtggggctttcctgtaagtttgatcctttttttcccctttagtagcaaactaacataacagattggatttattttacctgactacagttttggggaaacctgtcaaataaataattgttacatgccttttttttttaaatttaagcacattgaaactgcttaaatggtcacatttttcagcattaggattaagataccatttttgtaggcctggaaaacaaatagcaaatgattcaaaattcattgaattgactttgaaatgaaacttttcccccataatttgttatatggaagatttgctaccctgatcttttccctagcatacttctaaagttgattgaatccctgagtatcaatgaagaaatcagagtttaagtggctagggagagccaggtataaagactgattaatagagtacttcagctaattaaaaatttaaatagtaataatttatgaatgtgaataaattggaaggcagcaaaaagcatgattatagaatattaagttcaattatatatagacagtccagtttcctagtgaataggtcaagattatttgttttgttttgtggcactatcatagttcactataacttcaaactcctgggctcaggctatcctcccacctcagcctctgaagtagctgggactactcacatgcgccaccatgcccagctaatggtttttttctttagagatgggggtcactatactgcccaggctggtcttgaactcctaagctcaagtgcttctcccacatcagcctcccaaagtgctgggattacagccatgagccactgcatctggccaagatcaagattatggatattggtatgttaacttttaaaataaaagtacatgggctgggcgcagtggctaacgcctgtaatcccagcaatttgggaggccgaggcaggcagaccacctgaggtcaggggttcgtgaccagcctggccaacatggcgaaaccccgtctctactaaacatacaaaaattagctgggcatggtggcacatgcctgtaatcccagctactcgggaggctgaggcaggagaatcacttgaactcgggaggcggaggttgcagtgagccaagatcgcgccattgcactccagcctgggcaacaagagtgaaactccatctcagaaaataaaaataaaaataaataaaagtacatgaaaaaagtatattcccttaagcaggtaaaatacttgcattgtatttttacatcatgaatttgcttgttaagaaatttcttttctgtaagtggttaaaagataaactgtattccatcctctgggttttcaattctaaattattggagctcaatgtatgacattttactgtagtgtattccactgagaggcaaggaaatgggaaagtgtcaggtaattataaatgggaaaattttatttttatatgatgtaaagttttacagtttaaaatagatcagcatgtgatttcttgtagagattagccatttcatttctttttgcatttttgccagttacattagtttgccctatgatatactattctgagatacttcagccccgcacacatcaagtactaattgtatacagatagtacagatttgtactctgattataagaatttgttactactaattaaaagcaaattaatgtggctgggcgtggtagctcacacctgtaatcccagcactttgggtgggcggctgaggcgggcggatcacgaggtcaggagttggagaccagcctgcccaatatggtgaaaccctgtctctactaaaattacaaaaattagctgggcttggcggtacgtgcctgtaatcccagctactgggaaggccgaggcaggagaatggcttgaacccaggaggcggaggttgcagtgagccaagatcacaccactgcactccagcctgggcgacagagcaagactccgtctcaaaaaaaaaaaaagcaaaatatttttgctgtgattgtatgtccccttttaaggatatttattgcgcttataaccttaatagttgtattcattacatttcaacatgtccaaggttagcagacatgtagttcctgaaaaccaacattttaaaagttgcctctgggctgggcatggtggctcacgcctgtaatccctgcactttgggaggccgaggtgggcggatcacgaggtcaagagatggagaccatcctggccaacatgctgaaaccccatctctactaaaaatacaaaaattagctgggtgtggtggcacacgcctgtagtcccagctacttgggaggctgaggcaggagaatcacttgaacctgggaggcggaggttgcagtgagccaagattgcaccgctgcactccagcctggcaacagagcaagactccatctcaaaacaaacatacaaacaaaaaaaggtgcctctggtcctgtgttttctttttccttctgaaagttcatagaaacctggcatatagagcttattttgctgttttaactggttggctccacaaatcctgctacctgacatcagtacagcttgaccgcagtgaagtacttgatggcttgttcatgtttagttcacctctttagaaagaaagctttgtggccaggtgcagtggctcacacctgtaatcccaacactttgggcagctgaggtgagcagatcacctgaggtcaggagttcaagaccagcctggccaacatggcaaaaccctgtctcttctaaaaatacaaaaattagccgggtgtggtggcggaggatgcagtgagccaagatcgtgccactgcactccagcctgggcaacagagtgagactctgtctcaaaaaaaaaaaaaaatcgttgtgcagtaatagatcatcccaaaaaagaattgccatgaacagcgttatgcgtagaaaacagatggaagtgttggtcattagagccttgctttttaaattttattctttccaaaaattggcggtatgctatctataattttatgtttgatgttgaagaggcaacaccagagactagagagggagattactctgatatttagtgcctaaaactttcatcttggccgggcacggtggctcacacctgtaatcccagcacttcgggaggccgaggcaggctgattacctgaggtcaggagttcgagaccagcctggacaacatggcaaaacccgtctctactaaaaatacaaaaattagccaggcatggtggtgggcgcctgtaatcccagctactcgggaggctgaggcgagagaatcgtttgaacccggtaggcggaggttgcagtgagccgagatcatgccactgcactccagcctgggcgacaagagtgaaactccgtctcaaaaaataataataattttaaaaataaaagacaaaactttcatctttatttcatggctttatttcatctttatttcatttttggttgggaaaacaaacaaaaatctcttaagttagtcctttaatagtctttttagaaccaaagaaggaaagactgcaaaaatgttgcatacgtgactctttattgtcagaatctgtagaaactggaggtctttgtaaagaaatagactagtaggattgtgagaatatatagtgaggggggatttaggataaggcttccttgctgggatccttggacagaaaccttacaattgtttaatatttgcagagtaaaagagcagctattgctatttgaacctacagaagagacctaagacgagcgtctctgtaatctaaatttatatgataatgttgtcccagacccaaaggcacacctattctcagtaacttagagaagtcttggaagttgcttctgaattacagtaaagaaattaaatgaagtctttatccttaaatagggccaggcattgctatcaacatagtgtctttggttttcccctttaaatagaaaacaccaagcagggcctttccagacaatgtagtctttcctgtaaagaaaatggttttggtgtgggatttggtaaaaacactggttagtttgtaatgaagaaagaattttggcatagacagtccgacccagttcatggatacagtttgatcccagggagtttaacaaaaggaagctttggttttgctagcaacagacttgatcttctatagtaattaattgcaattaaggttttccaggagctttctcatttcttagcccagggtccaaccccattccctctttaaaaaagaaagaataggccgggagcagtggctcatgcctgcaatcccagcactttgggaggccaaggcaggtggatcacaaggtcaggagtttgagaccagcgtggccaatatggtgaaaccctgtctctactaaaaatacaaaattagctaggcgtggtggcaggcgcctgaggctgaggcaggagaatcctgctagtctgaattacaataaggaaattaaatgaaggatttatctttaatagagccaggcattgctatcaacataacatgtttggttttcccctttaaatagaaaacaccaagcagggcctttccagacaaggtagtctggaacccaggaggcggaggttgcagtgagccgagatcccaccattgcactccagcctgggtggcagagtgagactccgtctcaaaaaaaaaaaaaagaaggaataggaaaaggacttagaggcagttgatatagaattctactgggggtaaatgacactctcaaaatacttgggaaagaagaatcacatgccacaagctatagcttgattaatattttagcatgttttccatgtttgtattctaaagtttgtttcctttgacattccattatcttacttactagagtgccaccattcttatttgtaatacaatcagtgttttatgccatttgtgaatcacacaattgttcttttttccccatcacacacactcacacacaaacacacacactgttaaaaataaaagaggggaaggataaaacaaaaatagatagaatgatgattattacaatgtaactttaacatatatgaagagaaattctaactcagttaagtgagaattaagattgaaagtattaatgttgcaagtattatctctagccatggaattttttgctggctatagaatgctaatgtgaacagagtatatatcaggaatatgatgtattatggcacagtgataatattattgttgatattagccagatgtggtggtttgcacctgtagtccgaacttctcaggaggatgaggcaggaggatagttgagcccaggagtttaaagcaagcctgggcaatacagcaagaccccaatctttaaaataaataaataaataagaattattcttgaaagtaatattctaaccttctgccaaccaacagagatcctcatattcttaaagaaaattaatatagcttatggttttgataaattggactctgatttaaactttaaaatgttatgacttttattctgatacatggcttctaaaatatgtaaaaaattatattgaatgaattaatacttaacctgttcatttctcttaatttatgtatttattctgactttattatacagcttatgtctcacatctgccttcttgatatgtgcaaaatattgtgtaaaaatagtttaaaactcatcccagttcctagtcaagcgtgggctataagagagaaggcttaaggtgttctttaatggaggaacttttgaaagatcacaaatggaaaaagcctattgagaatttattgcctttgagagtagaaagggctctagaatatgagccagagacttggaatttagtaataggtctcccactgatttgctccgtgtccttaggcaattcgtttaatctctgtgtgcctagtttccccttgtaaataagagtggtaatacctgtcctcacctacctcactaaattgttggagttcttttgttctgagtcagggtctcactctgttgcccaggctgaactacagtagtgtgatcatagctcactacagcctccaactcctgggcccaaactatcctcctgcttcagcctcccaagtagctgggactagaggtacatgccaccacacccagctaattattttcttttattgcagagatggggtctcacatgttgccaaggctgatctctaactcctgagctcaagcagtcctcctgcctcagccacccaaagtgctgggattataggcatgatcactaaattgttgtaagaataagataatgtttgcggaagcatttgagttctccaaaggaaaagctattcagacgttcaagataatagaagagtgttgtgtgaaggattcctttccagtttgcctctgtgaaaatgtctttgttgtagatcattttatgaaataggaataagagaaacataggccttatcatggtgtagtgttcacttacaaacatatcctgttgtttcttccctgcaagatatccagcacacaggctgaatttttctttataataatccttggcaaaagcataacttttcaaaaaccaaatgattttagtggtgctatggcagctgcagttttgagttagattaatgtggtgaaaaccatcaaatacttagaaattgactgggtgcggtggctcatgcctgtaatcccagcactttgggaggccgaggtaggtggatcacttgaggtcaggagttcgagaccagcctggccaacatggcaaaaccccgtctctactaaagatacaaaaattagctgggcacgatggagggtgcctgtaatcccagctactcgggaggctaaggtgggagaattgcttggacccaggtggcagaggttgcagtgagccaagattgtgccactgcactccagcctgggcaacaaagcgaagctctgtctcaataaaaaaaaaaataataataataaaatacaaatacttagaaattaacttcgcctttgccttcaggcacttttgctacatgttagcatcagaggctattgtacaactagatggttattccctgtttcttggccgatttttggtacctttctttgaagaagagggttagattttaagaaagaaagtgtgcttatttcactcatgtctttgcagaatttaactttgctttactttaaaaattccaatcatcatgtacctataaaggttaaaatatagtgaaagtttctgcttcatgtgaattcaattctgagcacctgcaggtcatatcaggtgtctgatgcagttacctttatagatcgtggcaggtccttacatttcaacaggcttatgcatttccatggggggaagagattctgtttctaggaaattacaaagggcacaccactgcagggagtgtaaacaattctttgttgcaacagacaagattttttttaaaaaaagaaaaaaggatgcattttaggtacacagggtatggacgcattcaacatttacttttatctccacagatgccaacctccccttgttgcaggcagttgggcttttccaactcattgctaacaaagctggcatctgcattaatttcaatgagaatttcaagtactgaagatgaaaagttggggagattcatgtttgaaaaatgaaaaatgaacaaaaaatccaccttgtgcagtgagatagctaacgctgatatatcaggaataattttaaactatttttgctgtaatgtgtagctttaatgtctcttttcagttatggacccataaaagtattcctatatcttgtgaataaagatcattcttgtggactagtacgtggatgcattcataggctttgggaagcagtggtgtgcgtatgtgtgtctatatcaatattttatgtttataactctgcgtattaagtttatatagaaaaaaataatgtctttctttagtgtttgggggactcaatggtaatatgaccattgcagtgtaatctgactgctcactctagagaacacttctgttatacacaatgcacatacaaacatacacccctaaagcgtagctaactgctcccactagataattgctgctaaaaacaaaacaaaacaaaacaatacaaaacaaaaaaaaccctaagtaatggaggaagaaatagcattcttttaaaaggggcttttctgaagagtaaaatgtaaatacaggacatgtggggagggtggggccgcctgcaaaatgtcctgaagatggacaaatagccttttaaattctactttttaaccatctttaccgtgtgtgcctatttgtattgcagatgtgaactactatttttggaggttgatatcagtatgttttgaaactgaattattacataaaatcagagtaacctctttctccatcctccttttccacactattcttgccaaatatttctactgaaacccagtttcagcaaggcaaaatgatgggactctcaaacctccctcctcatcttcccttcccctctgtcttatgcctggcctggccttttttgttgttgttggcttttcataagtaagaaaaatttattgtagtatttcaagactgcagaatttcaagtgtatatctataaatctttttttaaaatcttcggctacacagtaacatcaattaaaacagaagagtgagtctaagtctgtaatatgctgtaggaccagataagattttgaatgagactaaacttgactgccatattttaagaggaaattgaaactttatggtggagaatggatgagagcaagtctatgatatatatgtagtcattgtataattagaaacaccaaatgctgaatcctatcactgtgttcttgggggccaggccttggatttggttgtcatttaaactccttgaagattatatgtaattataatgagcagaaggcaaataaagtttttgaacaaaagtccttgttttcagtatttaaaatttggtaatatattttctttttcagttaaactatcttccccacaaaaaatattatacttcagttaaactatcttccccacagaaattattatactacgaacaagttatgagtgagactgagaagcttgaagaagctggtttttaagcagctcatataatattttgtgttaaagaaagtgtcattgtttcctgttgggaggcaaataacaacaacaacaaaagaaattgtcatgattctttctgagccaaactgtcacgaaatgttctgtgacagaaccactactcttttttctgccattctgcctactggagagttctatgttgtatttgtttttaatccttgattttaaaaatattaatggttttagtgttgcttagcttcagtttgaagtataactttcactaataactgcaataaaaagaaaagctttgctcttaaa

SEQ ID NO: 108724 - DNA, 1035 bp, Homo sapiens
  Payload ID: 1361
  Gene Symbol: AGO3
  Gene Name: argonaute RISC catalytic component 3
  ENST ID: ENST00000397828
  CDS Start-End: 346-1035
gagcttccggggcggccccgggcaggtcggcggcggcggcccgcagtcgtggaggagcggtgggagcgtcggcggccgcgggcgatgcaacttccggacgggactcccctctgtccgcgcctcacatctccccttcctctcgcctagtcctgtgccgttttccgtccgcgactcttccggcccagagctttcggagtgcggttgctcaggggaagccgtcgccgcccccgcctcggggccgagtgagagtgcccgtcgcgtcgcgccgcgtcgccccccgggccgcctccttgccgccagtggcgggctccgttctccctcgaagcactccccccagctccatgaatggaaatcggctccgcaggacccgctggggcccagcccctactcatggtgcccagaagacctggctatggcaccatgggcaaacccattaaactgctggctaactgttttcaagttgaaatcccaaagattgatgtctacctctatgaggtagatattaaaccagacaagtgtcctaggagagtgaacagggaggtggttgactcaatggttcagcattttaaagtaactatatttggagaccgtagaccagtttatgatggaaaaagaagtctttacaccgccaatccacttcctgtggcaactacaggggtagatttagacgttactttacctggggaaggtggaaaagatcgacctttcaaggtgtcaatcaaatttgtctctcgggtgagttggcacctactgcatgaagtactgacaggacggaccttgcctgagccactggaattagacaagccaatcagcactaaccctgtccatgccgttgatgtggtgctacgacatctgccctccatgaaatacacacctgtggggcgttcatttttctccgctccagaaggatatgaccaccctctgggagggggcagggaagtgtggtttggattccatcagtctgttcggcctgccatgtggaaaatgatgcttaatatcgatgaaagagacctctggcagcagtgtggagaatag

SEQ ID NO: 108725 - DNA, 3599 bp, Homo sapiens
  Payload ID: 1361
  Gene Symbol: AGO3
  Gene Name: argonaute RISC catalytic component 3
  ENST ID: ENST00000634486
  CDS Start-End: 333-527
ggccccgggcaggtcggcggcggcggcccgcagtcgtggaggagcggtgggagcgtcggcggccgcgggcgatgcaacttccggacgggactcccctctgtccgcgcctcacatctccccttcctctcgcctagtcctgtgccgttttccgtccgcgactcttccggcccagagctttcggagtgcggttgctcaggggaagccgtcgccgcccccgcctcggggccgagtgagagtgcccgtcgcgtcgcgccgcgtcgccccccgggccgcctccttgccgccagtggcgggctccgttctccctcgaagcactccccccagctccatgaatggaaatcggctccgcaggacccgctggggcccagcccctactcatggtgcccagaagacctggctatggcaccatgggcaaacccattaaactgctggctaactgttttcaagttgaaatcccaaagattgatgtctacctctatgaggtagatattaaaccagacaagtgtcctaggagagtgaacaggtagatttagacgttactttacctggggaaggtggaaaagatcgacctttcaaggtgtcaatcaaatttgtctctcgggtgagttggcacctactgcatgaagtactgacaggacggaccttgcctgagccactggaattagacaagccaatcagcactaaccctgtccatgccgttgatgtggtgctacgacatctgccctccatgaaatacacacctgtggggcgttcatttttctccgctccagaaggatatgaccaccctctgggagggggcagggaagtgtggtttggattccatcagtctgttcggcctgccatgtggaaaatgatgcttaatatcgatgaaagagacctctggcagcagtgtggagaatagatagaggagaaaaaactaatctgagaagccagttaggaggcttttcaatcactagttcaggtttcagtctacatgttacttccttgagaagcagtgtttgacacccttctcccccaatccagccatcccccaagtctgatttctgccactgccttctacaaagcacaacctgtaattcagttcatgtgtgaagttcttgatattcataatattgatgagcaaccaagacctctgactgattctcatcgggtaaaattcaccaaagagataaaagaaaatacaagatgtacagaacaaggattcaactgctgcccgaagagcatggactcgatcttaacttcaactgctcaggggcccaaagaaatgactgaaaaaatgactagaaagcataataaagttgatgttatagtgaaggtttgaaggttgaagtgactcattgtggaacaatgagacggaaataccgtgtttgtaatgtaacaaggaggcctgccagtcatcaaacctttcctttacagttagaaaacggccaaactgtggagagaacagtagcgcagtatttcagagaaaagtatactcttcagctgaagtacccgcaccttccctgtctgcaagtcgggcaggaacagaaacacacctacctgccactagaagtctgtaatattgtggcagggcaacgatgtatcaagaagctaacagacaatcagacttccactatgatcaaggcaacagcaagatctgcaccagatagacaagaggaaattagcagattggtaagaagtgcaaattatgaaacagatccatttgttcaggagtttcaatttaaagttcgggatgaaatggctcatgtaactggacgcgtacttccagcacctatgctccagtatggaggacggaatcggacagtagcaacaccgagccatggagtatgggacatgcgagggaaacaattccacacaggagttgaaatcaaaatgtgggctatcgcttgttttgccacacagaggcagtgcagagaagaaatattgaagggtttcacagaccagctgcgtaagatttctaaggatgcagggatgcccatccagggccagccatgcttctgcaaatatgcacagggggcagacagcgtagagcccatgttccggcatctcaagaacacatattctggcctacagcttattatcgtcatcctgccggggaagacaccagtgtatgcggaagtgaaacgtgtaggagacacacttttgggtatggctacacaatgtgttcaagtcaagaatgtaataaaaacatctcctcaaactctgtcaaacttgtgcctaaagataaatgttaaactcggagggatcaataatattcttgtacctcatcaaagaccttctgtgttccagcaaccagtgatctttttgggagccgatgtcactcatccacctgctggtgatggaaagaagccttctattgctgctgttgtaggtagtatggatgcacacccaagcagatactgtgccacagtaagagttcagagaccccgacaggagatcatccaggacttggcctccatggtccgggaacttcttattcaattttataagtcaactcggttcaagcctactcgtatcatcttttatcgggatggtgtttcagaggggcagtttaggcaggtattatattatgaactactagcaattcgagaagcctgcatcagtttggagaaagactatcaacctggaataacctacattgtagttcagaagagacatcacactcgattattttgtgctgataggacagaaagggttggaagaagtggcaatatcccagctggaacaacagttgatacagacattacacacccatatgagttcgatttttacctctgtagccatgctggaatacagggtaccagtcgtccttcacactatcatgttttatgggatgataactgctttactgcagatgaacttcagctgctaacttaccagctctgccacacttacgtacgctgtacacgatctgtttctatacctgcaccagcgtattatgctcacctggtagcatttagagccagatatcatcttgtggacaaagaacatgacagtgctgaaggaagtcacgtttcaggacaaagcaatgggcgagatccacaagctcttgccaaggctgtacagattcaccaagataccttacgcacaatgtacttcgcttaaatagtccaagtatattctctgagaggaagtactgaaagatgaattgacatacaacgtatgtttccagtgaagtcaattgagtaaggacacctccagccatacagaaaccaacactgtgtgggggccaaggtctgatccttatgttaatacaaggaagattgtttacttcatcaaggaacacagcatcattatgcaatatgaaaccagccaactgctttttgtgcggtctcctataggaagtatcgcaattgttttgttttcatttcttgtagtctaacccttttaatgcctttacctcaagttgcttggcagcacaactatctttgcaaaaaaaagtaaagaaaaagtaaatgatggtttaaaaaatacacaccttcatgaataatcaaagtgatttttcagaattatgtgtgcaaaaaattaatgtgcattcatatattcttgtaaaaggtgtctgtgtatttttaaaatatatacatccatacttcatatgc

SEQ ID NO: 108726 - DNA, 7116 bp, Homo sapiens
  Payload ID: 1362
  Gene Symbol: AGO4
  Gene Name: argonaute RISC catalytic component 4
  Uniprot ID: Q9HCK5
  ENST ID: ENST00000373210
  CDS Start-End: 246-2831
gcggcggcggcggcggcggcggcggggattgtttttgttgtcgctgaggccggaagagccggagccgggtccctgtccccgggccgggcgccgccgccgccccctgcccagcgcccgcgtctccgcggcgccaccccagcgccaatattccggagatcaagcgttacgcggcggcggcggcggcggcggcggggcccggagcgggaggcgccggggaccggggcgaggcggcccccgccgccgccatggaggcgctgggacccggacctccggctagcctgtttcagccacctcgtcgtcctggccttggaactgttggaaaaccaattcgactgttagccaatcattttcaggttcagattcctaaaatagatgtgtatcactatgatgtggatattaagcctgaaaaacggcctcgtagagtcaacagggaggtagtagatacaatggtgcggcacttcaagatgcaaatatttggtgatcggcagcctgggtatgatggcaaaagaaacatgtacacagcacatccactaccaattggacgggatagggttgatatggaggtgactcttccaggcgagggtaaagaccaaacatttaaagtgtctgttcagtgggtgtcagttgtgagccttcagttgcttttagaagctttggctgggcacttgaatgaagtcccagatgactcagtacaagcacttgatgttatcacaagacaccttccctccatgaggtacaccccagtgggccgttcctttttctcacccccggaaggttactaccaccctctgggagggggcagggaggtctggtttggttttcatcagtctgtgagacctgccatgtggaatatgatgctcaacattgatgtatctgcaactgctttctaccgggctcagcctatcattgagttcatgtgtgaggttttagacattcagaacatcaatgaacagaccaaacctctaacagactcccagcgtgtcaaatttaccaaagaaatcagaggtctcaaagttgaggtgacccactgtggacagatgaaacgaaaataccgagtttgtaatgtgactagacggccagccagtcatcaaacttttcctttgcagctagaaaacggtcaagctatggaatgtacagtagctcaatattttaagcaaaagtatagtctgcaactgaaatacccccatcttccctgtctccaagtgggacaagaacaaaagcatacatacttgccactcgaggtctgtaatatagtggcaggacagcgatgtatcaagaagctcacagacaatcagacttccacaatgatcaaagctacagcaagatctgctcctgacagacaggaagagatcagtagactggtgaagagcaacagtatggtgggtggacctgatccataccttaaagaatttggtattgttgtccacaatgaaatgacagagctcacaggcagggtacttccagcaccaatgctgcaatatggaggccggaataaaacagtagccacacccaaccagggtgtctgggacatgcgaggaaagcagttttatgctggcattgaaattaaagtttgggcagttgcttgttttgcacctcagaaacaatgtagggaagatttactaaagagtttcactgaccagctgcgtaaaatctctaaggatgcaggaatgcccatccagggtcagccatgtttctgcaagtatgcacaaggtgcagacagtgtggagcctatgtttaaacatctgaaaatgacttatgtgggcctacagctaatagtggttatcctgcctggaaagacaccagtatatgcggaggtgaaacgtgttggagatacccttctaggtatggccacacagtgtgtccaggtaaaaaatgtagtgaagacctcacctcaaaccctttccaatctttgcctgaagataaatgcaaaacttggaggaattaacaatgtgcttgtgcctcatcaaaggccctcggtgttccagcagcctgtcatcttcctgggagcggatgtcacacaccccccagcaggggatgggaagaaaccttccattgctgctgtggttggcagtatggatggccaccccagccggtactgtgccaccgttcgggtgcagacttcccggcaggagatctcccaagagctcctctacagtcaagaggtcatccaggacctgactaacatggttcgagagctgctgattcagttctacaaatccacacgcttcaaacccactcggatcatctattaccgtggaggggtatctgagggacaaatgaaacaggtagcttggccagaactaatagcaattcgaaaggcatgtattagcttggaagaagattaccggccaggaataacttatattgtggtgcaaaaaagacatcacacacgactcttctgtgcagataaaacagaaagggtagggaaaagtggcaatgtaccagcaggcactacagtggatagtaccatcacacatccatctgagtttgacttttacctctgtagtcatgcaggaattcagggaaccagccgtccctcacattaccaggtcttgtgggatgacaactgcttcactgcagatgaactccagctactgacttaccagctgtgtcacacctatgtgaggtgcactcgctcagtctctattccagcccctgcatattatgcccggcttgtagcatttagggcaaggtatcatctggtggataaagatcatgacagtgcggaaggcagtcatgtgtcaggacagagcaacggccgggatcctcaggccttggctaaggctgtgcaaatccaccatgatacccagcacacgatgtattttgcctgagagtctcagaaaaagaactcaaccaatttggcaccccatgcagcctcaaaatgtttcaaatgcctaccgcctctagatcgagccacgttgacttcaggtggtcttctaccagcagctcggaatagttgcactgaatctatactttgcagcactgtctgatgcgtcaacaaaattgagccatttttttaaagtaatagatactaatagattatcttttctgatgcactggactgaatttttacctcaatgtgcaaaggctgatcagcctgaactttctaaaggactttacaagaagggtttctatggaatattttgctagctgtggtgttcaccgcatccctctagtcttagaagagaagattattccttttttctgtagtcattgagtggggtatatgcataagtgggagagaaaaaccaaacaatctacttcagttcagtgtaactatttaattgtgtgggtccatagactttttaatgaagatttctgactttgccactgtaaatgcctttaatgagcattaatttttgaaagttttacagagttttattagttttactactttatcttattgatctctgcagacttgtgctggtgcaagtacatgctgacaggcaatttgcactatatttggctgcagattcaaataggcagttctcttatttggtcgacttttgtgaatgtgtgacataaacagatgtaatgcatgtcacagtgacggagataacactgccatgataaaagtactcatgtttcccctatttggaaaaaaaaattgcttttagtatttttccaagttttcaaaagtgcccattttatgctgctgtgtggtttgttaaatctaaatgatttttaaacttttctcatagaaacttaactttggcaataaacattttttaaggtctctcctcttccttccccaacaatgtagttttctagatgagatttcagtatgattttatcagctatttcttatatatcataatctggcaatttctgaaaccagtcagaaaagacatatatttccatgcctttttaaagaattatttttacctgttttatattcacagttggtgtcctgtcactttgttttaaaataagctagaaccaggatgcttccttattggaaaggctttgccagtccttaaggtacaatgagtgatgctgcaacttgcaaatgtaccagcatttaaaatttcttttcctgggaatcaaggtaactcacacgactacttgcagtacaaattttttgcttctctttcgacatgaaatgtacttggtgggttttccttccttttattaaactaaaactgtgtggaaaaggttgatttttcttaatagattctggattccactcacagggagatgggattcctttcttgtccaaacaaagggagttgctctaaagcgagcatcagttaaaatgtaggggaaaatgtattctgtatgtagtgtagataatactttgtgaatggacaacagttacatagtgtcttggtagcaccagccagtgtttcccagcccagagtttactgacttgtaattctctatccaggacatcaggagtgagggatggaaaaggggataaaaggcctggagccacactctatatggctgaggaaggagctagggaaagagatagacacaatggggtgaaaacaattttgccgcccctgcctggaaactgctggtggggaaatgatggtgaagggtgtttgcttgaactcatgagacggtccaaatctcataaactagccttctcaaaatcccagcaatataaagcactgtttttcttcagtcgtttaaataaacttgtaaatacattgaagtttacatttccatgtgctgttgatcaacggcgccacctgtgtttgctgagactggtctctgagagagttttatgtcgatcgaggcctgttgctcattaagctgagtgcagacgtccttaatccctgcagatagtgggatgaaagcaagttctgtaaaatgaagcacaacatagccaggagtgaagagatggcagatgttaatttcttaaaattttccttttttttttttttttttgcaaatacctcacttggataatacaaatcaggacatgttggtgaggggctggctgcttggctgctgcttttattcacacttgttcagggagagcacagagaatacccttcagcatggccactctggacccaagaggaggaaaaaacggaagcttttttaggagaaggaggacttgctggaatccaagatgtgaagaactcttggtgactggctggctggccagcgggcaccacacctgcacttgagtgcctcgggcttgcttattaataacgcacagaagaagcatcacttctcaccatctcctggcatgtatggagcagggagcaaggctatgttcccgaaagccctgattagcttgtcttgctctacgctcgacctcgaacaatacagcttgtaagacctcagtcagtcctggtacactggggtaaatcagtgtggtggtggaagaaaagccgggaggcctatttttataggaaaatagtaccattaaaggtgcaatgctgtcattttggacaaaaggaaagaaatttggaagagctgggattattggcaaaaacttgctgaggggtgaatctttagagctaatcactgcagaatcagagttgcagcaatatgattgcaagcaagtctgaatgcatagttttactttaattcggcttgacaatttgaataggtaaccccctcgggactgactgaatcgttatgcatgtgtcaatcaatgggaggtgtgcattctctagaagtagttttaggctgtttggtttggttttggttttgttttttaaatgcagcctgttgaggcactgtcatgtggtgtgaaagatttaaatgtagcaacgctaaagagtaataatttggggataagaagtggggacattggccgggcgcggtggctcacgcctgtaattccagcactttgggaggcctaggtgggcggatcagctgaggtcgagagttcgaggccagtctgaccaacatggtgaaaccccatctctactaaaaatacagaaaattagctgggtctggtggtggatgcctgtaatcccagctactcgggaggctgaggcaggagaattgcttgaacccaggaggtggacggtgcagtgagctattactccagcctgggcaacaagagcgaaactctgtctcaaaaaaaaaaaggggggggggggacattaagagagtggtgatgacccaaatgttgaaccaattatgttttggtggtggtgttcttagctgttgaatcctgaatggtttataaagtgaactagctggcttaatgcagccagcgttctgggcagcagaacatattcattcttactgtaaattctatttgctgcttccaaaggtgatgattttcaagcagacatgttctatatggtctgtgttttaggatctggtgcccagcctctatcagagcttgcctacctggcaaagctgcctacccttcaagtgggaaaatataatccactgtttaacaaggctcaccctctccaccctgtcctaacgaccttttgtgaatgtgctgtgatattttcttgctcaatagcaaggtggtagctctgctttcattttaagaaagtggaggctgagggcattgtatcaatactgttgcaactccaagaagttttccttgtaaaattaaaggaaagatcttgttattgattaaccattttcttatgccttgctattgacatattcatgctctttctacgtctagtggctgaaaatgtttgcatttgttcatttgactaatggtgtgatttttgtttctatattattagacctgtaatgttttaaaatgtattttattaaatttggactggatgtatgtctctagcaatacgaggtactttctaaactattaagggaggggttgtatcctcatgttgagataagatgatggtcgtttaaattttgcaattttttttggcctgcagggatattttgtgtttatgtgtccaaaaaaggaataaattggcattcttgtgccaaaagttgtttttcctgtcaattgtctaataagtatgcagtacactgtaatggcaacatacatggttgctttataaaaacagtttcctcagtatgagaaattttacaaagaacagtggaaaaactttgtgtttttaactcttgggtctccctatttttaaaaattgctatttggtatacaattattatgtgtcaattaaaactaaaataaaacttttaaaaaagaaa

SEQ ID NO: 108727 - DNA, 1876 bp, Homo sapiens
  Payload ID: 1363
  Gene Symbol: ARHGAP19-SLIT1
  Gene Name: ARHGAP19-SLIT1 readthrough (NMD candidate)
  ENST ID: ENST00000479633
  CDS Start-End: 11-1564
gctgacgaagatggcgactgaggcacagagtgaaggggaggtgccagcccgcgaatccggccggagtgatgccatctgcagttttgtgatctgcaatgattcttcccttcgaggtcagcccattatctttaatcctgacttttttgtggagaaactccgacatgagaaacctgagattttcactgagttggtggtcagcaatatcacaaggctcatcgatttacctggaactgagttggctcagctgatgggggaagtggaccttaagttgcctggcggggctggcccagcatcaggattcttccggtctctcatgtctctcaagcgaaaggaaaaaggagtgatatttgggtccccactgacggaggaaggcattgcccagatataccaactgattgagtatctacacaaaaacttgcgagtagagggtttgtttagagtaccgggtaatagtgtccgacagcagattttaagggatgctctcaataatggaactgacattgacttggaatcaggggaatttcactcaaatgatgttgccactttgctgaagatgtttctaggagagttgccggagcctctgctgacacataaacacttcaatgcacacctcaaaatcgctgatttgatgcagtttgatgataaaggaaacaagaccaatataccagacaaggaccggcaaattgaggctctccagttgctcttcctcattctccctcctcctaatcgtaatttgctgaagttattgcttgatctcctataccagacagcaaagaaacaagacaagaacaagatgtcagcctataaccttgcccttatgtttgcaccccatgtcctgtggccaaaaaatgtcactgcaaatgaccttcaggagaatatcacaaagttaaacagtgggatggcttttatgattaaacactcccagaaactttttaaggctcctgcttacattcgggagtgtgcgagattgcactatttgggatccagaactcaggcatcaaaggatgaccttgacctcatagcttcatgtcatactaagtcctttcagctggcaaagtctcagaaacggaaccgggtagattcctgccctcaccaggaggagacccagcaccatacggaagaggcactgagagagctgtttcaacacgttcatgatatgccagagtcagcaaagaagaaacaacttattagacagtttaataagcaatcattgacccagacaccagggcgagaaccttctacttcccaggtacaaaagagggctcgttcgcgctccttcagtgggcttattaagcggaaggtcctgggaaatcagatgatgtcagaaaagaaaaagaagaaccctactccagaatctgtggccattggtgaattgaagggaaccagcaaagaaaataggaacttattattttctggctctccagctgtcacgatgacaccaacaagattgaagtggtctgaagggaagaaagaggggaaaaaagggaactcaatggcaacaacatcactcggatccataagaatgactttgcggggctcaagcagctgcgggtgctgcagctgatggagaaccagattggagcagtggaacgtggtgcttttgatgacatgaaggagctggagcggctgcgactgaaccgaaaccagctgcacatgttaccggaactgctgttccagaacaaccaggctttgtcaagactgatctatggctcagagaggtgatttgccttggaccacagagcagcttgacaatagggttggaattagacaccaggccttctaggggccctgaagagcctgaaaatggtcttaaaccttgacctaggaatctcatatttgggcatctgccctaaagaaataataaagcatgagcaca

SEQ ID NO: 108728 - DNA, 1598 bp, Homo sapiens
  Payload ID: 1364
  Gene Symbol: ARIH2OS
  Gene Name: ariadne homolog 2 opposite strand
  Uniprot ID: Q8N7S6
  ENST ID: ENST00000408959
  CDS Start-End: 237-1109
ctccacaggcgggcgttaaaccgcgcgggcagcgctgcgagagctcccaaagatgactcgagtggtgagccccgaggcggcgcgtttccccgccgcgccagacagggagagagggcctagatgtgccggcgccggttggtcagaggcggtggcctctgacctttccgagagctgagaaggcggcgggaggaaaaaaggcagacacacgctgggcgcccggccgctgacggcgggtaatgctcggacaacgtgccggcgacggggagcgcccgggcctcccgggcgacggcgaaggcggagtcccggcccggccagggaggcgcgcggagaggcccccccagcggccagccaaggtaaacaaggccgtgacgtgcgccgcgcacttaccgggagctgcggcctcgcggccgctgagcccgaacaagccagaccgggtcaggccgggccagagggaccggattggggcgaagcggcagcggaggcggcgggccgacgccggtcaagcccgcgctgcttcctccagaagagtcgtccccacagctccggaagtgcttggcgccgttgcgtcacttccggatcggggtcgacccacggtcgctcgggtcgcgacaggctcccggctagagggcctgtttagcgccgcctccttgaaacttagcgctctgacccagagtctgaccagggtacggcaggcgccgaccgcgtctggagccactattcgcctaccagcgtctcccgtcgagatgtttttaaccagcgcgtttctcaccggcttctcatttcactgtttgtactccgggatcgggcacggagaagacatcctggcgtcagtggagcagataaccattgtttctcggccgctatctggtcagaggggagctgggccgggaaattctgcctacaccccgaggcggtcgcagggtggccccagagccgcaaccacaccaggctttcgcttcccctgccgaggcctcgttcgccgcgcagttctccgacttacggtcaccgtgcaagattgcatcttaactgccttgcttgcagtttcttttcacagtataggagttgtcatcatgacttccagttaccttctgggaccggttgtcaaatgatgtggctagagacggaggctcactcagattgttgctgcaccacaatggaaatgccagtatgaagccgctgatgttaggaaggctccaggttgtgcaattccatagacaacaaatcaaatcatttccaaccatactggagtcgcgtatatacatattcaagacacctgtgcaggccgggcgcggtggctcaagcctgtaatcccagcactttgggaggccgaggcgagtggatcacgaggtcaggagatcgagaccatcctggctaacacggtgaaaccccgtctgtactaaaagtacaaaaaaattagccggacgtggtggcgggcgcctgtagtcccagctactcgggaggctgaggcaggagaatggcgtgaacccgggaggcggagcttgcagtgagtcgagatggcgccactgcactccagcctgggcgacagagcgagactctgtctcaaaataaaataaaataaaataaaaaataaaacaaat

SEQ ID NO: 108729 - DNA, 21681 bp, Homo sapiens
  Payload ID: 1365
  Gene Symbol: ARIH1
  Gene Name: ariadne RBR E3 ubiquitin protein ligase 1
  Uniprot ID: Q9Y4X5
  ENST ID: ENST00000379887
  CDS Start-End: 315-1988
gctcagtagcgatagcagcggccgtggaggtggcgttggggactgttttctctcggaggccggagcggagccgcgtctgactgaggcgggcagcaagcggccccctcgctccctccctccctcctccgcgccctccccgccgccaccagccgtcaaacgccaaccgccgctcctggggaggagccgcggctcgcggggccggagccaggcctgcgtccggacatcagccggagccggagcgagagccggggcctcggcgtccccgccctctccccgcctcggccagcgtccgccgggcccccgcgcgtcgcgccatggactcggacgagggctacaactacgagttcgacgaggacgaggagtgcagtgaggaggacagcggcgccgaggaggaggaggacgaagacgacgacgagccggacgatgataccctggatctgggcgaggtggagctggtggagcccgggctgggcgtcggcggggagcgggacggactgctgtgcggggagacgggcggtggcggcggcagcgctctggggcccggcggtggcggcggcggcggcggcggcggtggtggtggcgggccggggcatgagcaggaggaggattaccgctacgaggtgctcacggccgagcagattctacaacacatggtggaatgtatccgggaggtcaacgaggtcatccagaatccagcaactatcacaagaatactccttagccacttcaattgggataaagagaagctaatggaaaggtactttgatggaaacctggagaagctctttgctgagtgtcatgtaattaatccaagtaaaaagtctcgaacacgccagatgaatacaaggtcatcagcacaggatatgccttgtcagatctgctacttgaactaccctaactcgtatttcactggccttgaatgtggacataagttttgtatgcagtgctggagtgaatatttaactaccaaaataatggaagaaggcatgggtcagactatttcgtgtcctgctcatggttgtgatatcttagtggatgacaacacagttatgcgcctgatcacagattcaaaagttaaattaaagtatcagcatttaataacaaatagctttgtagagtgcaatcgactgttaaagtggtgtcctgccccagattgccaccatgttgttaaagtccaatatcctgatgctaaacctgttcgctgcaaatgtgggcgccaattttgctttaactgtggagaaaattggcatgatcctgttaaatgtaagtggttaaagaaatggattaaaaagtgtgatgatgacagtgaaacctccaattggattgcagccaacacaaaggaatgtcccaaatgccatgtcacaattgagaaggatggtggttgtaatcacatggtctgtcgtaaccagaattgtaaagcagagttttgctgggtgtgtcttggcccatgggaaccacatggatctgcctggtacaactgtaaccgctataatgaggatgatgcaaaggcagcaagagatgcacaggagcgatctagggcagccctgcagaggtacctgttctactgtaatcgctatatgaaccacatgcagagcctgcgctttgagcacaaactatatgctcaggtgaaacagaaaatggaggagatgcagcagcacaacatgtcctggattgaggtgcagttcctgaagaaggcagttgatgtcctctgccagtgtcgtgccacactcatgtacacttatgtcttcgctttctacctcaaaaagaataaccagtccattatctttgagaataaccaagcagatctagagaatgccacagaggtgctctcgggctaccttgaacgagatatttcccaagattctctgcaggatataaagcagaaagtacaagacaagtacagatactgtgagagtcgacgaagggttttgttacagcatgtgcatgaaggctatgaaaaagatctgtgggagtacattgaggactgagaatggccctgcataaaatgaactctgaaaactttaccatctagagtgctcatgcaattaaaacaaaacaaacacaaacaaggaggcactaagcctattctgacaccactggtctgtagtaccagaattgttttgttaatggaaagtttaagtaaattatattgtaataaaaaggtagataaaccattgtacaacagtattctaggccaccaacaaaagtgtgacagacacactaaaagccctccaactttaacttgtaacgtagcttcattctcaaagctgactccttttttttctttttccttttcctgagtgtagtacagttaaaatttcaaacagctccttgacactgcttttcatgttcaaaccagccattttgttgtactttggtaaaggacctcttccccttcctcccctacacatacagatacacccacacacagactgactctctttctctcataccccaaggtcatgagtgaatgatgcttagttccttgtaaagaaaatcttgggatggggaaaggggtaggcagcaagaggattcaacaaacgaaaaacataaaaactttgtatatgacttttaaaacaagaggacaacacagtatttttcaaaattgtatatagcgcatatgcatggacaaagcaagcgtggcacgtgtttgcataatgtttaattacaaaaaaatatttattctttaaaaatcttcaagattatgtctatttgctgtgcattttctttcagtttgcttatctttcccgggttggggttgggataaaggtgtgtcggtttagcacctctggaagacctatctagagctctttcactttcctgaggttattttgccctttctggtgttggtatgtctgttgccggccatgggcctcatgccttgaattcctgctcttgatcagggacaagggaggtcaagctctgactaatgccatgacctgattaaggggtacagcagggagttttgttgctacagctcatgaattaacctgtcccaacctaatccccctccatggcatcatgcctctacccaagcctttgtgtgcccatgttatgcacacagctgtaggcattcttaagtcccctgtcgcatccagtggaagcattttaaaatttcttttactttttggttttcccttaattgctgcttttcagattttagttatggctcgtctgctcaccccttctctacattagggtgtcaaagagaatgttttgctttaaatataaatagccattcatttagtctcagattgtgaatttaaaatggtggataccgaaattgcttgtgtgtgttgctgtgggtttggtttgaaggcaaacacccctagaacatgatattcccatctagtgcatttaaatagaaatcactgagtttgctgcttttttattgtcagcagataggagaattaataatgcattttagctgtgatgtccatttttatgaaattcctactaagagctatgttaaaagtaaaggatggtggtggttgtattaactatatacctgtttaggccattctggctgtggtatttttcaataggtcagcatctgtaaatctgtcagttttatacaggagtgcagagtgaactaggcaactagattaagaggtctaaatatgaaataccagttgaggctgaggacctcttcgtcttcctttaaatgtcttttgcctagggagtgtttaccatttgtgaggcagctttgtctgctcttacactgtacatcctattactccattgggaagtaggttcactttcctctggccttttgcctaagttaggctttgctgaatcaaccctacttttccttttagaaaaggttgttacaggagatttactggcaactgttcttttcccatcaaaaatcagtgaatgtttgctgagtataaatgctgcttccttaaaccacttgtcgctttaggatcaactttacctgtaccttttctcctttcctcccttgccacctcaggtgcaaatctgaactcagtgtctgcttcttccattttctcgtctctctcccctcttcccccattatccatatgacattattttacttcaaatgacagcatcaatcttaaaaagatatacattaaaactaaggagtttttttaaagaaagcctgaataagttcctttccctggtaactttgaaaagcagtcagagttgctatatagatatatgtggctcctttaaaatgctttgtgtatgtgtggtgtttaaaaaaaaaaaatcttaccagttaactttgcagtgtctaggtttgagtgtcataaatccacgtgttcctgttgcaacaaatacccaaaaattgtgtgtgcacttcctaataccagtcttcacccatggaggaacagtgctttttagagatgctttctatttcaatgttggcatactgcctgagggtattgcagttgtgggtgcattccctaatttgtatgatcaagatgaactggcccttttctacttccaagcttttaacagataccaccatatttgacagaattcccagagtgaattgcttgtgttattagtagattcagtgcccccagctgggataggcaagccatgacagcttccctgtttcacctacagaagtcttatctgagggatctattcacagtaagcaccaaggtctccatgtcttgaggtcagtttcattgtcttttgaaaagtgcatgcttcatttgaacaattcattcagcagcagatggactttcagtgatttaaaataaaattttgatccaaagctcaggacacaaaccacagtggtaaaattgagtagcatataatatcagactaaattatctgtaattttccacaacccagattgtatgtgttttatgtgtgtttaaataaatatgttagatacacgtgtatacatacacccatatacaacagatccaagactggctgacttcatttgaaatggttgaatctgctgtgtaataaagtggttcaaccatgattaggaactgaaatttagtagaagagggaaaaggagttaatgtaacaaattattttagctacaaaccccggtaatagagcacttgggggatgggatggggtgggttggtgagacaatcagaatggtaaattgattaaatgctcctaaccctgtaattttgtgcatagagcaccctatgctgtggaaataactgttcttagatttcattgtaactggactgttcaggttgcccagagggaaagaacattcctaattctaataaaataaacttttattttgttattccattagttacttatgtttatttttatagttaaaaaatgactaaaggtggctaatagccacccgtattatgtgccttattcactgttcccacttaatataaaatgtcaaaaattggttgtttctttgcagggaactgtgaatgagcccattcccccaacatttaacttggttaatgaagctttcagagcattttctgaaagatttccaatttctgcatctcagatattgaatttaaattgtttgtgttgtaacagtgatacaaaaatgttcaatagctctttgaatgccactttttttaaagaaaatactttaaaagtcattcttagctaacctcaaaactcctttacattactttcattttagctcactcttaaagctgatactgttatatagggatgaagggagagttttcttaaagaaggtcccaaagttgaagatcgtttgtcattgatactctggccaagtccaggttttaggacaatttaatttactcttatttggatctgtaattatgggagtttatcacttttcctcttcaaagcacttcaacttactgtctaaaacaagtggagaagaaattgccattttttataaaggaggaagataaggctcactgaggttaaataactccctcaatttttcatttccttctacctgaaacttaacatcatgctacctctttgtatcatattttgttattctggtcacagaatgacctagtattctgtaccagggaaggtagttcttaactatattgtacttttaaaccacattaaagactattataaatgcctatcactgctactgttagaggttgctctatactatctctgatctttcatttgttgcagtttgcaacacagtagttgagaataagtggtttagtatgatttgcttaatagtacccaagtaatttgcagttgttggtttagttattcaaatgaatttccattgtaaagaattttggatagtctgcaggaaattgttacaggatgcacagaacatcccatatccattggatctcagcctttgaggctttaaaaagatgataagcagtgagttttatgagaaaattttggctccttcagaaacaggaagataagtgggcccctcagatttttcatatatctttggggataaagttggttatatctggtttattttagggattttgcttctgtagttacccaagatcaaatagccaactcagaaatactcagttggatatcaatcaaatagtgcctaccaggggagtaaacagacaacttttaggtttttagtttttgcttttgtgtggagttgagtccaatttttaaggcaactattgttgacctttctctaggcggtagcatttaggatgggaaaaaataatatgagttatgtgcgaaaagcagttttcaggctatcatttagggccacagatatgcttatttaggactattttcagggtaggagccagttaaagtttgtatatcagtcacacattgatatgtagcagctctatcaataccacaacaaccttattaccatagtaattcaggggtctcaagtaatccaggagtctcaaactgaaatgtcaacaagagccaagtaaatattttagaaatagagtaccctggagtagatgggctctgagaggagcctgtgaaatccagacttcatgtgaattctcttaattaaatgtgggccaaagaaaacccggccatgggcagtttttttttcccagcttctactagtcttggcttgcaacaatgccactgtccatctggcattacctagaccagtgatacttaaacttgactgcgaattggaatcactgagaagctttaaaaaatattagtgcctgagtgttactttatggagattatgatttaattgctttgggtaggcatcagtaatttttgtaaagccctttacgcattctcacccctaattccagccggtgattctcacatgcagactaggttgagatccttgatctagactgccttctatagttgcaaaaagagaatataggcgagcaactccagatcataagggacaaaatgattcaaggcaaattgactggctcagaatagggcctcactggaggccctagttgagtgggttttgtggaatggtgcctcccaagggtctggtgtgcagtgcccaatttggttttttgttggttttctggtaagtggtccaccttggagaaaatcacaaaactaaaagtcttaccaagaagtagaactgacaagcagccatgttgattggcagtacattctcttaccaagggggagaaatctatctagggaaaataatacagagtctgagcaaaggaagttgagtggttataagcaaaactgtcattaaagctagttgcgtcaagtctgcacaattccacgagcacttaagagtttacaagtttctcatgtctatcattcttttgataatcttgtatttttatttcaagtgtggtatagtagtaagaatattggtatttctcagccatagatttcccttttgtaaaatgggaatactaataggaactgtaatttgttgagtgctttttgccagatgccttacttttgtctgtatcttccaagcagccctaaagcaaaatgggcattgttaccctatttttatgaggaaagacactcatatactactaacttactcaaaagttacacattgagtgtataacagggccatgcttgtctgattccatatgttcattctattatgctgctgttgtctgttacataggaatattgtgaggatcaaagaacatgtgaaaacaaaacctagttacaataataagcacaccagtgctaacttgggcaaaagataaggatacagagctgtctcagagactcccaaaggcaggatgagattgggaactagaaaaccattttggacccctaaagtggtattgtctactatctgtacatcattctcttacagctcttactgctgcttttcctgtcagttaccccatagctccaggtattacatgttaactgttcctgacacatgtagacagaaccaatcagatccatggggcaggatcatcaatacaaacatgggtgttgagagcttaacttaatcgggaaggagatcttggagatcatagttcgctgggttcacatcatggaaatcgtctttgacaaaactgaaatgccctgaagttttaattttttaaatacatgtaatgaattggtatatggtagatactcgtggctacttagtatttaccaaatgctttgtttccatctcgtttatttttattttttatttttttaagagacagtcttgctatgttgcccaggctggacttgaactcctagtctcagccaaccccttctgcctcagcctcctgagtagctgggatcataggcatgtgccactgctcctagctcttccatctcagtcttatgatgtagttactattttcattttataaataagaaaatagaagctcaaataaaatgggtagtttccttgaggtcatcctgttagtaagtggtggaatgaagttacaaacctaggttttattggtcagcacacacagtgccgggcactggcagtacagcagtgaacaaaaggtctgttggtttgtctgaagctctcaaccttgattctgcatagactcggtggattgcccaaggccactcaaccagttaatatcagagccagctctgctgtttgaccagtatattattttcaccatgctgtatctgcttctcagtcaccaaaagcaccagctaaaattgtatatagactgattaggggacttccaacctaagattgtcctggaaacttaattcttatcttggctcatctcttcaaaacagatgcctctttcgttggtgacctcagatacactgttcagaagtactcaaagtattccttttttctcacatttgagagtcactctagcattttaatgagttaagcaagccagccctgcatttccaaacccttcccagaagtctaaccttactttgatctgatgacatgggctttttaaaagattactatttttttagaggtggggtctcactatgttgcccaggctggaatataatggctattcacaggcacagttagggtgcactactgccgtgaactccaggactcaagccatcttcctgccacagcctcctgagtaacctaggactataggtgcatgccaccatgcccagctgacaatggctttatatacataatatttcctcagcaacaatttatgtcttatttggcacctgtaaaaccctcttcactgattatgcctgtttaaaggtttggtatttactccaagtcacctgcctttagccatggagtattcaagtttctttcagaatgagaatttggagggtgctcatagaaatataaaacaaggctgggcatggcggcttacaccttgtaatcccagcactttaggaggctgaggcaggtggatcacgaggtcgggagttcgagaccagcctggccaacacagtgaaacctcatctctactaaaaatacaaaaattagccaggcatggtggtgcatgcctgtaattccagctgctcggaaggctgaggcaggagaatcgcttgaacgcgggaggtggagtttgcagtgagccaggatcacaccactgcactccagcctgggcgacagagagactctgtctcaaaaaaaaaaaaaaaaaaaaaaaagaagaagaagaagaaatacaaaaccaactctttatagtagacagtttatcccccagaaagctttttaggctgaaaacgtttctatagattttggatttccttctgatagctaaaatttgtttctgtataacagagtagtgccctataagccagttcagtgcacattaaatggctgttcttagaattatgaatctgaggcttatgcagtgaggctctagctctctggagtcagttggtcaagtgggattcctgaggactgagcaaacacacacagagcaggattttgtcctaagttttcttagggatcctatccaaaaacaccattacttgaatttcccagcttccttttacagggagacttccttgctatgtgtactcccacctcggtatgtcaaatcattttctcagaggaagtacagcataaaataataaccagcatttgtagagcacttcttgtgggccttcttgggcaaatagacattctcatggaatgctctaaaattgttaagttcttgcacttgctctcaagtcatttataatctaattgctggtcttcctggtatgaacaaagatgtttgcttgttaataaattcctaccacatacccagacttgtggtttatttctatctaactagggaaagcactaaagagttttccaataaggaagaatgatctgagtgtctacctgctttggaaaagatgtctgccatggataggaaatgattttgtatcccaaaatcctagtactaatttggagtgttgtaaaggtcagggcagcaaatgctagagagtgggattaatgaaaagttatagtgttctgcatgcctttgaataattaatttttactccatttttactcgcttgcaataaagtaggttaagtgctgtactttaaggaagtccatgtacaagccagtgccttaacaatggtcaaatggttgctcactaaccaatggaaataaatgactgttgtttccacaaaattgctttacagattctaaatgctatctctgggacactggattgtgtgctctttaagataaattccataatcaagggcctggccctgaatagattggagcccaaaaatctcactgaagcaaagagataataggccagtaaagagtgggagacaaacactcctggaataggaagccactactcacctttattttaaattgatatatagaaattaatattacaaaatgcacacatcttaagtgtgaagtttgatgttttgacagttgtatacgtctgtgtaataactaccaaaagaagacataatatgttacaattaacccagaaaattctcaagtacttttaaatcacccctgagcacctccccactccagtgatcacttcttgatttttatcactaaagatttgttgtacctgcttttggattacatataagtggaatcatataataatgtactcttttgcatctggcttctttcactgataatgctttaaagacacgcatactgtatgtattaggacattgttctttattgctgagtagtatttcattctataaatataccacaatttgtttattcattctcctattgaaggacctttaggttgtttccagtttggggcaattatgaataaggatgctatcgatattcttacacagccttttgtttttgttttttgtggatatacatcttcacttgtcttggataaataagagtagaaaattactgggtcatatggtaagtgcatgtttataagaaactgccctcttattctccaaagtggttttaccattttgtactcctatcagtgatgtatgagagttacagttgcttcacatgtctgtcaacatttacactgtcactgttttttatattagccattttagcatatatgaaataactgattttaatttacattacatttccctgattaatgagttgagcactttttcatatgcttatttttcatttgtatatctttcaagaagtgtctttcatgtcttttctcattttaaagttgggtgtctttttattgtaggtgttattctttgtattttgaatataaatcctttgatagatatgctatgattttttaaagactctatgtattcacttattgggatctttcgatgaacaaattttttttataaaatccactttatcagttttttattttatggttttatgacctcaaagtcacaaagaatatattttcttctagaagttttatggtttgggattttatgtttaggtctgtgatccatctcaaattaatttttgtgaacagaatgaggtttggtttttttccaacatggatatacagttgttccagcaacatttacttaaaaagacttttctttacccattagattgacttggtagcttggttaaaaattgatcacgtgtgtgtgtatttctacattttctgttctgttccattaatctatttgtgtatccttacatcagtaccacactttggattattgaaactttctagtaagtctttaaattagtaaatccttcctttttgttatttttcaagatcgctttggttattgtcgattctttggattgtcataaaagttttacaattagctcatcttgtttttcaaacgtagatgtgctgggttagctgtgttcatgccactgcattccagcttgggtgacagcaagaccctgtcaaaaaaaaaaaagaaaagaaaaaactgctagaatcttgatatggggttttgttgagtctataggtcaatttagaatgaacattttaatagtattgagtcagctaattcatgaacatattaagtcttgtcatttatttaggtattaaatttttttctcagcaatgttttgtagcttcccttgcgtaacacttgcttatcttacattagactttttcttaagcatttgatttttaaaatatttttgattttcttttctttttctttttttctttttttttttttgagacggagttttgctcttgttggctaggctggagtgcagtggcgcgatcttggctcactgcaacctccgcctcccgggttcaagcaattctcctgcctcagccttttgagtagctgggattataggcacacaccatcatgcctggctaatttttgtatttttagtacagacggggtttcaccatgttggtcagcctggtctcgagctcctgacctcgtgatccaaccaccttggcctcccaaagtgctgccattacaggcgtgagccaccgcgcctggctaattttcatttttaagttgtttgctgctagtatctagaaatacaattgattttttgtttgtttctttagagatgggtctcactatgttgcccaggttggtcttaaactcctgagctcaagggattctcatgcctcagccacccaagtagctgggactttattcacgtgccagtgtgcctggctgatttttgtatgctgatcttgaatcgtgccaccttgctaaattcatttattctagaaatagttcttgtagactccgtagagttttatattaaatagatacacaacagtgtagtctgcaaataatgtttttacttctttttctgattttatgccttttcttctttttttttttttttttttttttttttgtctttctccactggctacaatatctagtgcaatgtttaacgtgtggtgagagcagacaccttgccttgttttcttaatcttagggataaagattttaatgtttcatcactaagtataatgttaactgtaagtttttcacagaccagcccaaagaagttcctttctattcctaatttgttgataatttttattaggaagggttattaaattttgtgagatgcgtttttagcttttaataagattattatgtatttctctttttattttgttaagatggtatgttacaggggttggcaaactgtggcccatgggccagatccagcccatggacagttttgttgttgctgttttagagacagtctcactcttttgctcaggctgccaggctggagtgcaatgacatgatcatagctcactgcagccttgagctcctggactcaagcgaccctcctgcctcagcctcctgagtagctaggaatacaggtgcatgtcaccacaccaggcaaatttaagaaattttttgtagatcttgccgtgttgcccatgatggtctcaaactcctggcctcaagcaatcctcctgccttggcctcctacagtgctgggattagaggtgtgagccaccacacttggctctcatggactgtttttgtttttgttttgagacagggtctctgtcacgcaggctggagtgtggtggcatgaacgtggctcactgcagcctcaactttcttggctccagcaatcatcctgcctcagcctcccgagtagctgggaccacaggtgtgcgctaccacagctggctaatttttctttttcatttttgtagacatggagtcttgatatgttgcccagattgatctggaactgctaggctcaagtgatcttcctgccttgcactcccgaagtgttggcattacaggcatgagacacagtgcccagcctattgcagtgttttttgttttttctgttttttttttttttttttcatctttgtttttgtttttttgagactgagtcttgctctatctcccaggctgtggtgcagtggtgcaatctgcaacctccgcctcccaggtttaagcgattctcctgcctcagcctcccaagtaagtgggattataggcacatgtcaccaagctcagctaacttttatatttttagtagaaacggggtttcaccatattggccaggctggtcttgaactcctggcctcaggtgatctgcccaccttggcctcccaaagtgctgggattacaggtcactaggcgtagtagggctactacgcctggccctactgcagtttttaataagagatgagttctctcagcttttgtctataagagaatgtccttacttttatttttgaggggtattttagttggatataggactctatgttgaccttttatttcttctttcagtactttaaagaagttattttattgtactcaggcctcatttgtttctggtgagaagtcattcatcattttaatttttatttcctttccgtaatgtgtggttgttctcaatggctgcatctgtgcattatatttacttttcagtagattgactagggaatgtctaggtatgtttttctttgtatagagtttactgaacttcttggatctgtgttgatgtctttcattaatattggttctttcttggccgttatccgtttacatttttctcttgtctcatactctcttgcttctcctcttctttggagattctagttacatgtatattagatgatttgatataaacctacagatctcagatgatttttcccctgccctgttttctttttgttttcagtttggatactttccatttaaccatctttaagttttttgatgctttccaatgttaacctgttaaacttgtttattgaattctccatttaaaaatttttatttttagttatttatggatacatagttgtactgaattattcatttctaatatttttatttctagcatttcattatatttgtatagttacaattttctgctgaaatttcctatttcttcatgcatgttttccacattttccattctactttttagcattttaatcagttattttattgggttttttctgttttttctttcatttttaatcagttattttaaggatccaaactgataattcaacatctgggtcttttctagttctgcttctattgagcccttcctctcccttaccatgaatcttattttcttgcttttgcacgtcttgtatatttgattggatgatggacgttttatgttgaaaaaaaaaagaaattgaagaaaatgtttacttccaaaacagagcatgccctttgtttttttttcaggccacttgaatggtggctcaatctgatgtatatgaattctagactggggcttcactgcagttttagtttgattcagtttgcctctagcttcaaatatttgaaggaacgtagaatcagaactctcatatcaccagggcctgagttttgggcattggcaagattccagagatctgactttgcttcatagctaagccaccagcttttatcaatgtgggagatctttccctactttacaaccttgctgccaggatttttttttttaatcaatgggctggggataggaggatctttctcagctctcatgtgtgccctgcccttttgtagaggaatgcccacaatgcctaggggatgggtttctcagcatttctgaccccatttaggctccaagagtgcctctgttggatttcacaacaatcctgcctcccctttcatttttaaagggtattttgcccttgggagaagtcaagctctctcagcgttccttctattatccacacctttagtgtactacaccttcctgtacctggttatcatctaaggggtaagattggtgggaagccttcctctgtggatttgggtcatctaggttctaatgtcaaaccagcctccaaggggttgtgaaaatgttgttaaatttcagcaggtttctcttttctcccccctgtagtattcctcttcctaccatagttcaactaggaataacaacagctagggggtctcttctctcctatgaaggacttggcactttctggagtttggatcatttaggtttctttggtttttgtttttattttgagacagggtctcactcttacccagcctggagtacagcctgtagtgatctcagctcactacaacctctgccttcctggctcagttgatcctcccacctcagcctcctgagcagctgggactacaggcgtgtaccaccacacccggctaatttttgtattttttgttgagatagggttttaccatgttgcccaggctgatctcaaacttctgagctcaagcgatctgcctgcctcagcaccccaaagtcctggggttacaggcataaaccactgcacccaacctagatttctttgtgtccttagctttctgatgaattaaacatatgttttattttctagctcatctggccttttgttgttgtttgctagagtgggaggtatattccttgtgactttgttcatatcactagtgaatttcagaagtaggagtttatttttttaataaaaaatttttttaggtcaggcacagtgtctcatgcctgtaatcccagcactttgggaggccgaggcaggtggatcacctgagatcaggagtttgagaccagcctggccaacatagtgaaaccccaactctactaaaaatactaaaattagccaggtgtggtggtgggcgcctgtaatcccagctacttgagagactgagtcaggagatttgcttgaacctgggaggcggaggttgcagtgagccgagattgtgccactgcactccagcctgggtgacagagcaagactccctctcaaaaaaaaaaaaaaaaatttttttttaaacacgtctcactgccacccaggcttgagtgccatgacatgatcatagctcactgctggcttgaccttctgggctcaagtgatcctcttgcctcagcctcttgagtagctgggaccacagtcatgtgccaccatgcctggcttttttttttttgtagagtttgggtctcgctatgttgcctgtgatcctcccaccttggttttccaaagtgctgggattaaaggcatgagccaccatgcctggttaggaatgggagtttaaacaatggttttatttacatatttcattagctagtatttttttcttttttgagacagagtctggctctgttgcccaggctggagtgcagtggcacgatctaggctcattgcaacctctgcctcgtgattctcgtgactcagcctcctgagtagctgggattacaggcgcccgccaccacacccagctaatttttgtatttttagtagagacagggtttcaccatgttggccaggttggtctccaactcctgacctcagttgatccacccgcctcagcctcccaaagtgctgggattacaggtgtgagccatcgctcctggcctcattaactgttttcaaaagtaaaagtacatggataatacaaagttaaattttgtagaatcataaagaaaagcaacaccttcccatcttaactcccctagtgcctctactccctccacagagacaaatatcttaccagttggttgtgttttcttttccaaactgtatttctaaaatgtgtcaatatctcttccttttattttttattttttgtagagacaggggtctcactgtgctgcctaggctggtctcaaactcctggcctcctacctcgacttctcatagttctggcgtgagctactgcacctggcctcccccttattatttttttaaacatgaatggaagcatactatattttctacactttatttgttttatgtaactattttaacaacctgaggacttttacaggctgcataatatgtcttaatatggatgtatcttagtttatttaaacagttactggtgatggacatttccatgtttccagtattttttctcacaaacaatgcagtattatgcctttgtccacattcaccattgattgctattgagtatatctgtagcatcaagaataggcatactgaaaatcctccatgaagtccagtgaagcttcatattattttgaagtgatatttcccagtgttggctggactctcaagcgtttgtggtataggttttgggaggactggacacttccaaagagaaataagatgttacagacttgtccagcaggtggcatcagaacaaagctggctatggaccttgtcagtacaaatgataaaacattaaaaatgtaaaaactcaactgtagctccttgtttatacatatattgggggtgttgaaaagttaccgatgcctgattcctcttctatgtcctcagcccccaccataaaaatagataaatgccattttttttgtatgcccagcacagctatatgatttgaataatcttgataagcagggtcacatttgaggagatttgctaagggaaatgaagatccatctgtgacacaagaaacatgttctatgtgatttctgggattttcctgtgaacatacttcttgtttgtttgttttacagtggatctcactctgtcacccaggctggagttcagtggtgcaatcatagctcactgcaaccttgagctcctgggctcaggagagcctctctcctcagtctcccaagtagctaggactacagacacatgccatcatgccaggctcattttaaaattttttgtagagacgggtctcactatgttgctcaggctggtattgaactcctgggctcaagcaatcctcctgcctcagcatctcaaagtgttgggattacaggtgtgaaccatagtatccaacctattatgtttttttaaaaagagattgttctaattatgtatataattaaagtacattaggtttagtgattgcaatttgagaaaccaatgtcctttcttattgaaaaaggccctggtacagaaagtgttctatcttcctcacaagatctgaggtcaaaggagagattttgaaacattatagcaatggcttctagttattgaataaagaatgtcatttgctcctcacaggacccctttcagggagatttcacatattgggaaacagcctcatgagctttctacaaacatctttgtccttaagtcttcccatttcagtaattggctgtaccactcatccagcagctttcaaagtaagaaacctggcaatcttcctttaacatccatttccctttccctcattcccccatatccaatcatgtgtattggaggtttttccacctctaaacttgagaacccatttactttttctccatctcctttgccatcacactagtccaagtgaagtgtttcatcatctcatttgcagcatcctttagtttaccctagattatcaatttttgtccccctcccaattcagtctctactcatgagctaacatgagtttattaagtgttcattctgaccatgccattccttgctcaaaattctctagtgccttcccaatgcccttaaaataaaattcctcatatggcctttgtggatctgcactcctacctcttctcctattgcaaccaaccctgttacctttttctcttttcacactggtcttcattctgtgctgcaaactggctgagattcttccatcctcagggcctttgcacaagttcttcctttgccttagaattctttcctggcctgcacatgtcttcatcccctttccctaagctaatgccttaccctttaggtctcattttaaacatctcttacccaggaaaaatttccctgtccaaacaagtctagattggctccccattgtttgttctaactgttctatatttctccttcttagcatttatcacaattcttggtatgttgtgcttttcactttcttagtcgctattattggagtaggtaatacatccatatagtacaaaattcaaaatgtattaaaggtatagagtaaaaagtcttctcttccctgtccccccgctacccagttctcctctttagaaccacttttagcattttgaatatccttccagaaatattttctaagtatacaagcaattatgtatataatattcctctttatttttgcctttttattaatacagatactatatgcattttctgcactttatctgttaataatatatcttggcaattattcaatattaatatgtaaatagttgcctctttctttttcatgcgccatataatatggacttataatttatttaacctctatctaggttggttttaggcattggttattacaaataatgctgcattgaatacctttgtatgtaaagtcatttcccacatctatgcctatagaataaattactagaattgaaataattcagttaaagattatgtgcatttttaattttggtagttattgccaaactgctctcaatggaagttttatgaattcccactagtgaatgcatttgtcctcacaattatgtcagtgaaatttttgttctttgccaatgcaagaaatggaaagtatctcttggaaactaatttgcatgttttttttccttgcacagttatattttcatatgttaaagagccatttgtatttcttggtgaattgttcataaactttgcttacttattatctaatgtctgactaatttgctacactctaaattcccaattcatacttaagtctcgcccttgcaatttagatgtacaatctgcctcttcagtggtttccacaccaaaaaatccacaggctcctgaattttatatgggcctaagagtcttactgaaaattggaagtcttaaggtgtagtctattttatgcagtgtgaggcctttcatgctctgaaatgtaccactcttgactgactttttcttcttcaccctgtccggcactgtgcccttattagccagagaaatgttccccctttctcccaggaaacgttctgaccttaccctggtccctcaaggactctccttctcccccaaattaactttcaaggagtttctccaacccaaaatggcacccttcctgaaaagatttctagtggatactgttttctgtacctcactacggatgtattttgctgcttggctccccgtctccattttgctatggcaaacatttttttccagaaatatatcagataaaatg

SEQ ID NO: 108730 - DNA, 612 bp, Homo sapiens
  Payload ID: 1365
  Gene Symbol: ARIH1
  Gene Name: ariadne RBR E3 ubiquitin protein ligase 1
  ENST ID: ENST00000564062
  CDS Start-End: 1-612
ctcggacgagggctacaactacgagttcgacgaggacgaggagtgcagtgaggaggacagcggcgccgaggaggaggaggacgaagacgacgacgagccggacgatgataccctggatctgggcgaggtggagctggtggagcccgggctgggcgtcggcggggagcgggacggactgctgtgcggggagacgggcggtggcggcggcagcgctctggggcccggcggtggcggcggcggcggcggcggcggtggtggtggcgggccggggcatgagcaggaggaggattaccgctacgaggtgctcacggccgagcagattctacaacacatggtggaatgtatccgggaggtcaacgaggtcatccagaatccagcaactatcacaagaatactccttagccacttcaattgggataaagagaagctaatggaaaggcgcctgatcacagattcaaaagttaaattaaagtatcagcatttaataacaaatagctttgtagagtgcaatcgactgttaaagtggtgtcctgccccagattgccaccatgttgttaaagtccaatatcctgatgctaaacctgttcgctgcaaatgtgggcgccaattttg

SEQ ID NO: 108731 - DNA, 807 bp, Homo sapiens
  Payload ID: 1365
  Gene Symbol: ARIH1
  Gene Name: ariadne RBR E3 ubiquitin protein ligase 1
  ENST ID: ENST00000570085
  CDS Start-End: 151-654
cgccgctcctggggaggagccgcggctcgcggggccggagccaggcctgcgtccggacatcagccggagccggagcgagagccggggcctcggcgtccccgccctctccccgcctcggccagcgtccgccgggcccccgcgcgtcgcgccatggactcggacgagggctacaactacgagttcgacgaggacgaggagtgcagtgaggaggacagcggcgccgaggaggaggaggacgaagacgacgacgagccggacgatgataccctggatctgggcgaggtggagctggtggagcccgggctgggcgtcggcggggagcgggacggactgctgtgcggggagacgggcggtggcggcggcagcgctctggggcccggcggtggcggcggcggcggcggcggcggtggtggtggcgggccggggcatgagcaggaggaggattaccgctacgaggtgctcacggccgagcagattctacaacacatggtggaatgtatccgggaggtcaacgaggtcatccagaatccagcaactatcacaagaatactccttagccacttcaattgggataaagagaagctaatggaaagtatttcactggccttgaatgtggacataagttttgtatgcagtgctggagtgaatatttaactaccaaaataatggaagaaggcatgggtcagactatttcgtgtcctgctcatggttgtgatatcttagtggatgacaacacagttatgcgcctgatcacagattcaaaagttaaattaaagtatcagcatttaataacaaatagctttgtag

SEQ ID NO: 108732 - DNA, 478 bp, Homo sapiens
  Payload ID: 1365
  Gene Symbol: ARIH1
  Gene Name: ariadne RBR E3 ubiquitin protein ligase 1
  ENST ID: ENST00000561770
  CDS Start-End: 1-142
taatgaggatgatgcaaaggcagcaagagatgcacaggagtgtctcgctttgtcgcccaggctggagtatagtggcatgatctcagctcactgcaacctccacctcctgggttcaagtgattctcctgcctcagcctcctgagtagctgggattacagcgatctagggcagccctgcagaggtacctgttctactgtaatcgctatatgaaccacatgcagagcctgcgctttgagcacaaactatatgctcaggtgaaacagaaaatggaggagatgcagcagcacaacatgtcctggattgaggtgcagttcctgaagaaggcagttgatgtcctctgccagtgtcgtgccacactcatgtacacttatgtcttcgctttctacctcaaaaagaataaccagtccattatctttgagaataaccaagcagatctagagaatgccacagaggtgctctcgggctaccttgaacgaga

SEQ ID NO: 108733 - DNA, 604 bp, Homo sapiens
  Payload ID: 1365
  Gene Symbol: ARIH1
  Gene Name: ariadne RBR E3 ubiquitin protein ligase 1
  ENST ID: ENST00000562891
  CDS Start-End: 1-345
cgatctagggcagccctgcagaggtacctgttctactgtaatcgctatatgaaccacatgcagagcctgcgctttgagcacaaactatatgctcaggtgaaacagaaaatggaggagatgcagcagcacaacatgtcctggattgagaataaccaagcagatctagagaatgccacagaggtgctctcgggctaccttgaacgagatatttcccaagattctctgcaggatataaagcagaaagtacaagacaagtacagatactgtgagagtcgacgaagggttttgttacagcatgtgcatgaaggctatgaaaaagatctgtgggagtacattgaggactgagaatggccctgcataaaatgaactctgaaaactttaccatctagagtgctcatgcaattaaaacaaaacaaacacaaacaaggaggcactaagcctattctgacaccactggtctgtagtaccagaattgttttgttaatggaaagtttaagtaaattatattgtaataaaaaggtagataaaccattgtacaacagtattctaggccaccaacaaaagtgtgacagacacactaaaagccctccaactttaacttgta

SEQ ID NO: 108734 - DNA, 4933 bp, Homo sapiens
  Payload ID: 1366
  Gene Symbol: ARIH2
  Gene Name: ariadne RBR E3 ubiquitin protein ligase 2
  Uniprot ID: O95376
  ENST ID: ENST00000356401
  CDS Start-End: 340-1821
gcaacggcgccaagcacttccggagctgtggggacgactcttctggaggaagcagcgcgggcttgaccggcgtcggcccgccgcctccgctgccgcttcgccccaatccggtccctctggcccggcctgacccggtctggcttgttcgggctcagcggccgcgaggccgcagctcccgatggaaatcatattatgtagaatacttgggtgacatctgcctgagagatctccaagaattacagaagacaaaaatactaatgcatttgagaaagcggtagttttggggggagggggaaaaagcaactgctttcctgatctgcaacttggctggatgctaagatgtcagtggacatgaatagccaggggtctgacagcaatgaagaggactatgacccaaattgtgaggaagaggaagaagaagaagaagacgaccctggggacatagaggactattacgtgggagtagccagcgatgtggagcagcagggggctgatgcctttgatcccgaggagtaccagttcacttgcttgacctacaaggaatctgagggtgccctcaatgagcacatgaccagcttagcttctgtcctaaaggtatctcattcagttgctaaacttatattagttaatttccactggcaagtttcagagatattggacagatacaagtccaattctgctcaactgcttgttgaggctcgagttcagcctaatccatcaaaacatgttcccacatcccatccccctcaccactgtgcagtgtgtatgcagtttgtgcgaaaggaaaacctactctctctggcctgtcagcaccagttttgccgcagctgctgggagcagcactgctcagttctcgtcaaggacggcgtgggcgtgggagtctcttgcatggctcaggactgtccactccgtacaccagaggactttgtgtttccattgcttcccaatgaagaattgagagagaaatacaggcgctacctcttcagggactatgtggagagtcattaccagctccagctgtgccctggtgcagactgccccatggttattcgggtacaggagcctagagctcgccgagtacagtgcaatcggtgcaacgaggtcttctgtttcaagtgtcgtcagatgtatcacgcacccacagactgtgccacaatccggaaatggctcacgaagtgtgcagacgactctgaaacagccaactacattagtgctcacactaaagactgtcccaagtgcaacatctgcattgagaagaatggaggctgcaatcacatgcaatgctccaaatgtaaacacgacttctgctggatgtgtctaggagattggaagactcatggcagtgaatactatgagtgcagtcgttacaaggagaatcctgacatcgtgaaccagagccaacaagcccaggcgagggaagccctcaagaagtacttattctactttgagaggtgggaaaaccacaataaaagcttgcagctagaggcacagacataccagcggattcacgagaagattcaggagagggtcatgaacaatctggggacatggatcgactggcagtacctacagaatgctgccaagctcttggccaagtgtcgatacaccctgcaatacacctacccatatgcatattacatggagtccggacccaggaagaagctgtttgaataccagcaggctcagctggaggctgagatcgaaaacctctcatggaaagtggagcgtgcagacagctatgacagaggggacttggagaaccagatgcatatagcggagcagcggaggagaaccctgctgaaagatttccatgacacctaagttgggatgtggatgtgccggggtgaggaagatgtggctgcaaggtctcccggctgccatactgcatgctgcaggctctgcctttcatgaccccaggcaacagccagggccccactcctgagagacactggcaacacctcttagttgatttctgttttcttctcttttcactttttgtttctaccagggtagaggccatgttgaactggcctcttttcaggacttttatttccccctggatggttgttgggagggagggaaagtgttttctgaatggctattaatagtattagatcattacaacttatgtaactttcaaaggttgtacaattatacaaaaaaaaaaaaaaggcaaactataggataacacagagccctttttgaaaataaattggcattggagtgttttaccctctagctgttttacttagaatgtaacatatgctgcctacccacctcaaaatgtctgtactgcaagagggccctgggcctctgctttccatattcacgtttggccagagttgtagtcccaaagaagagcatgggtggcagatggtagggaattgaactggcctgtgcaatgggcatggagcacaaggggtcacagcatgcctcctgccttaccgtggcagtacggagacagtccagaacatggtcttcttgccacggggtgttgttgtctctggtggtgctgcatgtctgtggctcacctttattcttgaaactgaggtttacctggatctggctactgaggctagagcccacagcagaatggggttgggcctgtggccccccaaactagggggtgtgggttcatcacagtgttgccttttgtctcctaaagatagggatctacttttgaagggaattgttcctcccaaataaatttgctttaccttggtcctttcttttgtgccagtattcaagtggtatagctctgagcagggtcacatttggccaaacctgacactgtcttgctgcattctcctttggcaaacatcagggtcagaattcaggatagcccttcctagggcactggactttctggcatgggggctgtgtttgcacaagttattttcatgttacctggagagtgtccagaggctgctctgaggctgaggtgtgttcccccttgcctggttccagctgtcagagggataccatcctagggtctgggaatccaaggccacgagactccttggtttgtggtccgagatcctgtactaaggagggtctggccagaggaacagaccagcttttgcacaatgaagcgcaagggaacaagtggtttgcctggtgtcctacctgtcctgaacctggtcctgtgggccattgaaaagttagatctgtgatctctggggtttttgtggctttgttcaatgcttccactctagggcaggcagagcagtctatactctcccaagcctgcttgacctccaagtagagctgatacagagatctgtgaatattgtgatagaaattctttggtattcatacatttcagctgcaagtcagcaatttcccaggtaccatgtaagctataaaacagtcattcttaaagacagaggatagctgtgactcatgggatcatgaggtccatggctggttgcaggttccctttttccttcctcaggttttgtctcttcctgtgttgtccccagcaagggagagactgtggggtggattgggagaacagattaggagtatagcaaatgaacccagaatggaacagtggggagctaactgtgaatgaggagagtacctgctgcaggacctggaggtcaggtgtgaatgctgtattggcacagggaataaatatcctggcgtctggagccttcacctctccgtcaagtccttcctgtgatactgccatggcacaggatctgagttgcagctctgcaccctaaatcacaccctgggcattgtctgggctgcagggctgccaggttctgtacttgtgtccagctgtggccctggatgctggagctggagggttttctgtgctcagactgtagcctgtagctcttggcctgtgtagagccccctcctgtgccctcagtggctgtcgtttgttaacatcatcaggaagatgggaaaggtcaggcagaatttttctgccctacaaagggtggaagagaaaggacacagtattttcatgaatttaccatatatctttgtttttcttcaacgaaaaagttaattgaggcaatgtcatctgctcaaagttgagtggtttattcacaataaactgtaagtttctgattataaaaatgtgtctagagtctttcttcatggggtctaggtagtcttctgagcccacaggggtctggccagtgaacaccagaggagtgccttcctatcagtcagccccttcttccagagggctgtggaggccccagtggccaaactcggctctgttttccctttctggctgttgggggagagggcacctgtaagtgatccctgtggaatgaagtagaaaatcctgccagttttccgctctcctctccctcagtacaggctgaatcattccccaccacagatagatcccagggttgtggtagagtactgatataaatgtcccaacccccccattctgagacctccggacccctccaaagcagacatgggaatgtagggctgtggaatatggcagggtgaactccagcttcacgggagccctaagggttatgaagagacaacttggggcagaaacaagtgtggagtctaatctcaagggtgaaggacaggaaatgaggtttggattgattaagggggtccacatttgtggtgtcagaagtggcagtagtgtcagtgataagtagctcaggggtagagtggaggctccatagctgtgggcaacatgcacagggcacctgtggctagaagaggcctcatacattgccagtctgaactccgcagctcttcctctggacctcaggtgtgccaagccccacgcttggcacctgggcatacagtggtatgcaagtgattcacgtgctctagcttccaggagcttccaatccatggggaacatagaaggaattgatcactagtgaatgtttgttttttgttttgagacagtctcgctctatcgcccagactggagtac

SEQ ID NO: 108735 - DNA, 598 bp, Homo sapiens
  Payload ID: 1366
  Gene Symbol: ARIH2
  Gene Name: ariadne RBR E3 ubiquitin protein ligase 2
  ENST ID: ENST00000452882
  CDS Start-End: 276-598
gcaacggcgccaagcacttccggagctgtggggacgactcttctggaggaagcagcgcgggcttgaccggcgtcggcccgccgcctccgctgccgcttcgccccaatccggtccctctggcccggcctgacccggtctggcttgttcgggctcagcggccgcgaggccgcagctcccgaagacaaaaatactaatgcatttgagaaagcggtagttttggggggagggggaaaaagcaactgctttcctgatctgcaacttggctggatgctaagatgtcagtggacatgaatagccaggggtctgacagcaatgaagaggactatgacccaaattgtgaggaagaggaagaagaagaagaagacgaccctggggacatagaggactattacgtgggagtagccagcgatgtggagcagcagggggctgatgcctttgatcccgaggagtaccagttcacttgcttgacctacaaggaatctgagggtgccctcaatgagcacatgaccagcttagcttctgtcctaaaggtatctcattcagttgctaaacttatattagttaatttccactggcaagtttcagagatattggacag

SEQ ID NO: 108736 - DNA, 884 bp, Homo sapiens
  Payload ID: 1366
  Gene Symbol: ARIH2
  Gene Name: ariadne RBR E3 ubiquitin protein ligase 2
  ENST ID: ENST00000420814
  CDS Start-End: 562-884
gacgactcttctggaggaagcagcgcgggcttgaccggcgtcggcccgccgcctccgctgccgcttcgccccaatccggtccctctggcccggcctgacccggtctggcttgttcgggctcagcggccgcgaggccgcagctcccgatggaaatcatattatgtagaatacttgggtgacatctgcctgagagatctccaagaattacagattgagtctcgctctgttgcccaggctggagtgcagtggtgcaatctctgctcactgcaacctccgtctcccgagttcaagcagttctcctgcctcagcctcctgagtagctgggattacaggtgcatgccatcatgcctagctaatttttgtattgttagtagagatggggtttcacgtgttagccaggatggtctggatctcctgacctcgtgatctgcctgcctcggcctcccaaagtgctgggattacagaagacaaaaatactaatgcatttgagaaagcggtagttttggggggagggggaaaaagcaactgctttcctgatctgcaacttggctggatgctaagatgtcagtggacatgaatagccaggggtctgacagcaatgaagaggactatgacccaaattgtgaggaagaggaagaagaagaagaagacgaccctggggacatagaggactattacgtgggagtagccagcgatgtggagcagcagggggctgatgcctttgatcccgaggagtaccagttcacttgcttgacctacaaggaatctgagggtgccctcaatgagcacatgaccagcttagcttctgtcctaaaggtatctcattcagttgctaaacttatattagttaatttccactggcaagtttcagagatattggacag

SEQ ID NO: 108737 - DNA, 753 bp, Homo sapiens
  Payload ID: 1366
  Gene Symbol: ARIH2
  Gene Name: ariadne RBR E3 ubiquitin protein ligase 2
  ENST ID: ENST00000430423
  CDS Start-End: 340-753
gcaacggcgccaagcacttccggagctgtggggacgactcttctggaggaagcagcgcgggcttgaccggcgtcggcccgccgcctccgctgccgcttcgccccaatccggtccctctggcccggcctgacccggtctggcttgttcgggctcagcggccgcgaggccgcagctcccgatggaaatcatattatgtagaatacttgggtgacatctgcctgagagatctccaagaattacagaagacaaaaatactaatgcatttgagaaagcggtagttttggggggagggggaaaaagcaactgctttcctgatctgcaacttggctggatgctaagatgtcagtggacatgaatagccaggggtctgacagcaatgaagaggactatgacccaaattgtgaggaagaggaagaagaagaagaagacgaccctggggacatagaggactattacgtgggagtagccagcgatgtggagcagcagggggctgatgcctttgatcccgaggagtaccagttcacttgcttgacctacaaggaatctgagggtgccctcaatgagcacatgaccagcttagcttctgtcctaaaggtatctcattcagttgctaaacttatattagttaatttccactggcaagtttcagagatattggacagatacaagtccaattctgctcaactgcttgttgaggctcgagttcagcctaatccatcaaaacatgttcccacatcccatccccctcaccac

SEQ ID NO: 108738 - DNA, 2278 bp, Homo sapiens
  Payload ID: 1366
  Gene Symbol: ARIH2
  Gene Name: ariadne RBR E3 ubiquitin protein ligase 2
  Uniprot ID: O95376
  ENST ID: ENST00000449376
  CDS Start-End: 447-1928
acttccggagctgtggggacgactcttctggaggaagcagcgcgggcttgaccggcgtcggcccgccgcctccgctgccgcttcgccccaatccggtccctctggcccggcctgacccggtctggcttgttcgggctcagcggccgcgaggccgcagctcccgatggaaatcatattatgtagaatacttgggtgacatctgcctgagagatctccaagaattacagattgagtctcgctctgttgcccaggctggagtgcagtggtgcaatctctgctcactgcaacctccgtctcccgagttcaagcagttctcctgcctcagcctcctgagtagctgggattacagaagacaaaaatactaatgcatttgagaaagcggtagttttggggggagggggaaaaagcaactgctttcctgatctgcaacttggctggatgctaagatgtcagtggacatgaatagccaggggtctgacagcaatgaagaggactatgacccaaattgtgaggaagaggaagaagaagaagaagacgaccctggggacatagaggactattacgtgggagtagccagcgatgtggagcagcagggggctgatgcctttgatcccgaggagtaccagttcacttgcttgacctacaaggaatctgagggtgccctcaatgagcacatgaccagcttagcttctgtcctaaaggtatctcattcagttgctaaacttatattagttaatttccactggcaagtttcagagatattggacagatacaagtccaattctgctcaactgcttgttgaggctcgagttcagcctaatccatcaaaacatgttcccacatcccatccccctcaccactgtgcagtgtgtatgcagtttgtgcgaaaggaaaacctactctctctggcctgtcagcaccagttttgccgcagctgctgggagcagcactgctcagttctcgtcaaggacggcgtgggcgtgggagtctcttgcatggctcaggactgtccactccgtacaccagaggactttgtgtttccattgcttcccaatgaagaattgagagagaaatacaggcgctacctcttcagggactatgtggagagtcattaccagctccagctgtgccctggtgcagactgccccatggttattcgggtacaggagcctagagctcgccgagtacagtgcaatcggtgcaacgaggtcttctgtttcaagtgtcgtcagatgtatcacgcacccacagactgtgccacaatccggaaatggctcacgaagtgtgcagacgactctgaaacagccaactacattagtgctcacactaaagactgtcccaagtgcaacatctgcattgagaagaatggaggctgcaatcacatgcaatgctccaaatgtaaacacgacttctgctggatgtgtctaggagattggaagactcatggcagtgaatactatgagtgcagtcgttacaaggagaatcctgacatcgtgaaccagagccaacaagcccaggcgagggaagccctcaagaagtacttattctactttgagaggtgggaaaaccacaataaaagcttgcagctagaggcacagacataccagcggattcacgagaagattcaggagagggtcatgaacaatctggggacatggatcgactggcagtacctacagaatgctgccaagctcttggccaagtgtcgatacaccctgcaatacacctacccatatgcatattacatggagtccggacccaggaagaagctgtttgaataccagcaggctcagctggaggctgagatcgaaaacctctcatggaaagtggagcgtgcagacagctatgacagaggggacttggagaaccagatgcatatagcggagcagcggaggagaaccctgctgaaagatttccatgacacctaagttgggatgtggatgtgccggggtgaggaagatgtggctgcaaggtctcccggctgccatactgcatgctgcaggctctgcctttcatgaccccaggcaacagccagggccccactcctgagagacactggcaacacctcttagttgatttctgttttcttctcttttcactttttgtttctaccagggtagaggccatgttgaactggcctcttttcaggacttttatttccccctggatggttgttgggagggagggaaagtgttttctgaatggctattaatagtattagatcattacaacttatgtaactttcaaaggttgtacaattatacaaaaaaaaaaaaaa

SEQ ID NO: 108739 - DNA, 2778 bp, Homo sapiens
  Payload ID: 1366
  Gene Symbol: ARIH2
  Gene Name: ariadne RBR E3 ubiquitin protein ligase 2
  ENST ID: ENST00000452385
  CDS Start-End: 842-1162
ttttgtatttttagtagagatggggtttcgccatgttggccagtctggtcttgaactcctgacctcaagtgatccacccaccttagcctcccacagtgctgggattacaggcatgagtcaccacacccggccagtagaactctttaaacctgaaaaatcagtcaactttgcagactagaggaggatgttgaacacctatgtgtgttttttttttctttaccaactatgcacctatttttcagacacctaaaagtaatgtctgtgaaacagtggttttctttttctacatattacagcaggaagtgttcctatttatgtactgtctgtatcaatactaacggggcatgataagcaaaattttaaactttggtagttaaacctttatgttgcctcccctctgggctgccagctgtggggatgtgcttctcccttaaggactttggcaagaataacaagttcattggaatttgactttctgacatagagcagacagccttgccctgtcatgccaggcctttcatgtgaagttaccatttattagctgcttctgtctctccagggaaggatttcccttttataagcctgggccagggggatgatagtaagattccccatgtgataccagagttggaataggctgtagtgagattagggccaggactgtcccattttgattcttgaatggtttctgttacaacttgtcatggggaaaaagtaacacttattttttttttcctcccttagaagacaaaaatactaatgcatttgagaaagcggtagttttggggggagggggaaaaagcaactgctttcctgatctgcaacttggctggatgctaagatgtcagtggacatgaatagccaggggtctgacagcaatgaagaggactatgacccaaattgtgaggaagaggaagaagaagaagaagacgaccctggggacatagaggactattacgtgggagtagccagcgatgtggagcagcagggggctgatgcctttgatcccgaggagtaccagttcacttgcttgacctacaaggaatctgagggtgccctcaatgagcacatgaccagcttagcttctgtcctaaaggccgttgatgctcactgccatcagctgcatcctccctatggcactggtatctcattcagttgctaaacttatattagttaatttccactggcaagtttcagagatattggacagatacaagtccaattctgctcaactgcttgttgaggctcgagttcagcctaatccatcaaaacatgttcccacatcccatccccctcaccactgtgcagtgtgtatgcagtttgtgcgaaaggaaaacctactctctctggcctgtcagcaccagttttgccgcagctgctgggagcagcactgctcagttctcgtcaaggacggcgtgggcgtgggagtctcttgcatggctcaggactgtccactccgtacaccagaggactttgtgtttccattgcttcccaatgaagaattgagagagaaatacaggcgctacctcttcagggactatgtggagagtcattaccagctccagctgtgccctggtgcagactgccccatggttattcgggtacaggagcctagagctcgccgagtacagtgcaatcggtgcaacgaggtcttctgtttcaagtgtcgtcagatgtatcacgcacccacagactgtgccacaatccggaaatggctcacgaagtgtgcagacgactctgaaacagccaactacattagtgctcacactaaagactgtcccaagtgcaacatctgcattgagaagaatggaggctgcaatcacatgcaatgctccaaatgtaaacacgacttctgctggatgtgtctaggagattggaagactcatggcagtgaatactatgagtgcagtcgttacaaggagaatcctgacatcgtgaaccagagccaacaagcccaggcgagggaagccctcaagaagtacttattctactttgagaggtgggaaaaccacaataaaagcttgcagctagaggcacagacataccagcggattcacgagaagattcaggagagggtcatgaacaatctggggacatggatcgactggcagtacctacagaatgctgccaagctcttggccaagtgtcgatacaccctgcaatacacctacccatatgcatattacatggagtccggacccaggaagaagctgtttgaataccagcaggctcagctggaggctgagatcgaaaacctctcatggaaagtggagcgtgcagacagctatgacagaggggacttggagaaccagatgcatatagcggagcagcggaggagaaccctgctgaaagatttccatgacacctaagttgggatgtggatgtgccggggtgaggaagatgtggctgcaaggtctcccggctgccatactgcatgctgcaggctctgcctttcatgaccccaggcaacagccagggccccactcctgagagacactggcaacacctcttagttgatttctgttttcttctcttttcactttttgtttctaccagggtagaggccatgttgaactggcctcttttcaggacttttatttccccctggatggttgttgggagggagggaaagtgttttctgaatggctattaatagtattagatcattacaacttatgtaactttcaaaggttgtacaattatacaaaaaaaaaaaaaaggcaaactataggataacacagagccctttttgaaaataaattggcattggagtgtttt

SEQ ID NO: 108740 - DNA, 678 bp, Homo sapiens
  Payload ID: 1366
  Gene Symbol: ARIH2
  Gene Name: ariadne RBR E3 ubiquitin protein ligase 2
  ENST ID: ENST00000449729
  CDS Start-End: 424-678
actcttctggaggaagcagcgcgggcttgaccggcgtcggcccgccgcctccgctgccgcttcgccccaatccggtccctctggcccggcctgacccggtctggcttgttcgggctcagcggccgcgaggccgcagctcccggctcaagtgcagtggcgcgatctcacctcactgcaacctctgcctccctggttggagtgattctcctgcctcagccttccgagtagctgggattacaggtgctcgaactcctgacctcagatggaaatcatattatgtagaatacttgggtgacatctgcctgagagatctccaagaattacagaagacaaaaatactaatgcatttgagaaagcggtagttttggggggagggggaaaaagcaactgctttcctgatctgcaacttggctggatgctaagatgtcagtggacatgaatagccaggggtctgacagcaatgaagaggactatgacccaaattgtgaggaagaggaagaagaagaagaagacgaccctggggacatagaggactattacgtgggagtagccagcgatgtggagcagcagggggctgatgcctttgatcccgaggagtaccagttcacttgcttgacctacaaggaatctgagggtgccctcaatgagcacatgaccagcttagcttctgtcctaaag

SEQ ID NO: 108741 - DNA, 560 bp, Homo sapiens
  Payload ID: 1366
  Gene Symbol: ARIH2
  Gene Name: ariadne RBR E3 ubiquitin protein ligase 2
  ENST ID: ENST00000433170
  CDS Start-End: 394-560
tggaggaagcagcgcgggcttgaccggcgtcggcccgccgcctccgctgccgcttcgccccaatccggtccctctggcccggcctgacccggtctggcttgttcgggctcagcggccgcgaggccgcagctcccggctggagtgcagtggtgcagtctcggttcactgcagcctccatctcccagatcaagcaattctcctgccgtagcctcccgagtagctgggattacagatggaaatcatattatgtagaatacttgggtgacatctgcctgagagatctccaagaattacagaagacaaaaatactaatgcatttgagaaagcggtagttttggggggagggggaaaaagcaactgctttcctgatctgcaacttggctggatgctaagatgtcagtggacatgaatagccaggggtctgacagcaatgaagaggactatgacccaaattgtgaggaagaggaagaagaagaagaagacgaccctggggacatagaggactattacgtgggagtagccagcgatgtggagcagcagggggctgatgcctttgatcc

SEQ ID NO: 108742 - DNA, 2876 bp, Homo sapiens
  Payload ID: 1367
  Gene Symbol: ARX
  Gene Name: aristaless related homeobox
  Uniprot ID: Q96QS3
  ENST ID: ENST00000379044
  CDS Start-End: 212-1900
ttgtcctgagcgcggagagggcgagctcgggccgcgggcagggcgggagccggcagccggcaaccaagggaggcagaaaggcacaaagatcgcaataatatccgttataacccgctatctaaccccacccccaacacacacccatccatcccaccctccgggagaggcagccggcgatccgctctctgcgccctgggaaaaagccccagccatgagcaatcagtaccaggaggagggctgctccgagaggcccgagtgcaaaagtaaatctccaactttgctctcctcctactgcatcgacagcatcctgggccggaggagcccgtgcaaaatgcggttgctgggagccgcgcagagcttgcctgctccgctgaccagccgcgccgacccggaaaaggccgtgcaaggctcccctaagagcagcagcgccccgttcgaggccgagctgcacctgccgcccaagctgcggcgcctgtacggcccgggcgggggccgcctccttcagggtgcggcagcggcggcggcggcggcggcggcggcggcggcagcggccgccacggccacggcgggtccacgcggggaggcccctccgccgccaccgccaaccgcgcggcccggggaacggccggacggcgcaggggccgccgcggcagccgcggccgcggccgccgcggcctgggacacgctcaagatcagccaggcgccgcaggtgagcatcagccgcagcaagtcgtaccgcgagaacggggcgcccttcgtgccgccgccgcccgcgctggacgagctgggcggcccggggggcgtcacgcacccggaggagcgcctcggcgtggccggcggcccgggcagcgccccggctgcgggtggtggcaccggcaccgaggacgacgaggaggagctgctggaggacgaagaagatgaggacgaggaagaggaactgctggaggacgacgaggaggagctgctggaggacgacgcccgcgcgctgctcaaggagccccggcgctgtcctgtggccgccactggcgccgtggccgcagcagctgccgctgcagtggccacagagggcggggagctgtcacccaaggaggagctgctgctgcacccggaagacgctgagggcaaggacggcgaggacagcgtgtgcctctctgcgggcagcgactcggaggaggggctgctgaaacgcaaacagaggcgctaccgcaccacgttcaccagctaccagctggaggaactggagcgggccttccagaagacgcactacccggacgtcttcaccagggaggaactggccatgaggctggacttgaccgaggcccgagtccaggtctggttccagaaccgtcgggccaagtggcgcaagcgggagaaggcaggcgcgcagacccacccccctgggctgcccttcccggggccgctctccgccacccacccgctcagcccctacctggacgccagccccttccctccgcaccacccggcgctcgactccgcttggactgccgctgccgccgccgccgccgccgccttcccgagcctacctccgcctccgggctcggccagcctgccgcccagcggggcgccgctgggcctgagcactttcctcggagcggcagtgttccgacacccagctttcatcagcccggcattcggcaggctcttttccacaatggcccccctgaccagcgcgtcgaccgcggccgcgctcctgagacagcccacacccgccgtggagggcgcagtggcatcgggcgccctggccgacccggccacggcggccgcagacagacgcgcctctagcatagccgcgctgaggctcaaggccaaggagcacgcggcgcagctcacgcagctcaacatcctgccgggcaccagcacgggcaaggaggtgtgctaaaggctgccctccacacccgcgccccgcgcgcgccccgaaaggtcacctcactcagcaccactcaagaccaaatggaaacagaggaccagcacactcccgagacggcactgagagagcgcagccgccttcacagcagtctggatgcgggcatggcagccctcggcgctccgggacgtggcacctcctcggctggctgtccacccgcccctgcccctgcccctgctactgccaacctcgctccaactccaacatccactctctcttgttcttactttcctgaaaatatcggggaggttttctcccccagacgcctgatattgaagtaaaaaatttaaaaagcccaacctcttcctcctgacaccccacttagcctttcttttctttctttctttctttcttttttttttttaaatagcattttggcgctcgaagttgatctccccagcgagggccccagcgtgaagccagggcccgggaagcaaatgcgagcctgtaagatagctaacagtgcacttaaaggaaaggggcgtcttgttcttgttctcttctttatcatacaccaaccaaggtttttatatcaaaccaaagggaaataatactctgctagaatatggactgttgaagtcaccaaactgtgattattgattctgtacataccattgttattaaaaaaaaaaaaaaaagaacagagctttgtatatttgaaatgttataacgcaattgcactcagcgtggtatggtaaaagtttgtcctcccgtagattcttactgtgttgtagatacggtagggttcctagacaaatatttatgtactcaagccctttatttaacttattaactgtagaggcttccgaaaccttcaagataaaggcaatggtacagtacttttgtgtaatgtgtaattgttaccacttttccttgctatctagtggagaagtgtcacgctcaaaataaaaaaattatatgtttaacaaaa

SEQ ID NO: 108743 - DNA, 2392 bp, Homo sapiens
  Payload ID: 1368
  Gene Symbol: ARL2-SNX15
  Gene Name: ARL2-SNX15 readthrough (NMD candidate)
  ENST ID: ENST00000301886
  CDS Start-End: 27-368
gcggccgggagggggctccggggaccatggggctcctgaccattctgaagaagatgaagcagaaagagcgggagctgcgactgctcatgcttggcctggacaatgctggaaagacaaccatcctgaagaagttcaatggggaggacatcgacaccatctccccaacgctgggcttcaacatcaagaccctggagcaccgaggattcaagctgaacatctgggatgtgggtggccagaagtccctgcggtcctactggcggaactactttgagagcaccgatggcctcatctgggtagtggacagcgcagaccgccagcgcatgcaggactgccagcgggagctccagagcctgctggtggaggagtgacctgggtttacgcttcaccacagagaaggaacttttcagacgctcccttggccgcgcacccgggatcggaacagcgctgtcacttgcgacaaaatccctaggccagaggaagaagagcgcaggcctggcgaggcggcggcgggcggaggctgggccggaggggtggggacggcgaggaggtggaggccggcgctccgctccgctccagctcggtttcatgtcccgccaggcgaaggatgacttcctgcggcactacacagtgtcggaccccaggactcaccccaagggctacaccgagtacaaagtaaccgcgcagttcatctcaaagaaggacccagaggatgtcaaagaggtggtggtctggaagcggtacagcgacttccgcaagctgcatggagacctggcctacacccaccgcaacctcttccgccgcctcgaggagttccctgctttcccccgggcccaggtgtttggccggtttgaagcctcagtgatcgaggagcggcgaaagggggcagaggacctgcttcgcttcactgtgcacatacctgcgctcaacaacagcccccagctcaaggagttcttccggggtggggaggtgacccgacccttggaggtgtccagggacctacacatcctgccaccccctctgatccccaccccgccccctgatgacccccggctatcccaactgctccctgcagaaaggaggggcctcgaggaattggaggtgccagtggaccccccaccatccagccctgcccaggaggccctggatctcctctttaactgtgagagcaccgaggaggcatctggttcccctgcccgaggccccctcaccgaggctgagcttgccctcttcgaccccttctccaaggaagaaggcgcagcccccagccccacccatgtggctgagctggcaacgatggaggtggagtctgcaaggctggaccaggaaccctgggagccaggagggcaggaggaggaagaggatggggaaggagggcccacccctgcctacctaagccaggccacagagctcatcacccaggccctgcgggatgagaaggcaggcgcttacgctgctgcactccagggctatcgagacggcgtgcacgtcttgcttcagggagtccccagtgacccgttgcctgcccgccaggaaggtgtgaagaagaaggcagctgagtacctgaagcgggcagaggagatcctgcgcctgcacctgtctcaactcccaccctaacagggagtgggccattccctgggactctcgctcctgcactgccagccccttctcctctccccagggcctggccctacctcctggtcttgtaattacaggagccatttctgtaggtaactggaccaagaatgagaaaaataatgaattcttagctccctgattacacctgccaccttggaatcaaggactcacacttctgaccctgcctgtctttttggggtttttttgagttggagtctcgctgtgtcgcccagactggagtgcagtggtgggatcgcggctcactgcaacctccacctcccaggttcaagcagttctcctgtctcagcctccccagtagctgagattgcaggcacatgccaccacgcccagctaatattttgtattttcagtagggacggggttacaccatgttggccaggctggtctcgaactcctgacctcaagtgatccacccgcctcagtctcccaaagtgctgagattacaggcatgagtcactacgcccggcccatgtctgtctgtcttgatgtgtgagcagcagctgtggtcattaaaccattagtttacccctctagaactggggtctgcaaactcccacctgcagccaaatctggcccacctcctttttaatgtaagggctgtgagagtggtttttactttttttaatgattaaaaaaatcaaaataatattctgtgacaatgacaggtgaaatttatatgtgacaagtgaaaattatatgaaatttaagagtccataaataaaatttgttggaacac

SEQ ID NO: 108744 - DNA, 3032 bp, Homo sapiens
  Payload ID: 1369
  Gene Symbol: ARMC1
  Gene Name: armadillo repeat containing 1
  Uniprot ID: Q9NVT9
  ENST ID: ENST00000276569
  CDS Start-End: 246-1094
gaggcgtcaggtcacctgggaagagtctgcagagcctttgcccgccagcgccttcgctctttggctccctgagttagtccggttgcttgcgatcgccgcggccggggctgcgaaccgaagggctcgctccgcgccgcctgggtctctacctcatccgtaggtgtggccctgatggtgtggcaggctctggactcctaaagctctggagcgaatttaagattttattcatgtgcatggcatagaagatgaattcttccacttccaccatgagtgaagagcctgacgctctatcggtagttaaccagttacgggatctagcagcagatccgttaaacagaagagccatcgtccaggatcagggatgtctgcctggccttattttatttatggaccatcccaaccctccagtcgtccactccgctttgcttgctcttcgatacttggcagaatgccgtgcaaacagagaaaagatgaaaggagaactgggtatgatgttgagcttacaaaatgttatacagaaaactacaactccaggagaaacaaaacttctggcctctgaaatctatgacattcttcagtcctccaatatggcagatggtgatagttttaatgagatgaattcacgtcgaaggaaagctcaattttttctgggaactacaaacaaacgtgccaaaacagtggttttgcatatagatggccttgatgatacgtctcggagaaatctatgtgaagaggctttgttaaaaattaaaggtgttattagctttacttttcaaatggctgttcaaaggtgtgtggtgcgaatccgttcagatttgaaagctgaggctttggcatcagcaatagcatcaaccaaggttatgaaagctcagcaagttgtgaaaagtgaaagtggagaagagatgttggtcccattccaagatactcctgtggaagttgaacagaacacagagctacctgactacctgcctgaggatgagagtcccacaaaggaacaggacaaagcggtgtcccgggtcggctcacacccagaaggtggagctagctggcttagcacagctgcaaactttttatccagatcattttattggtgacttcacttttgggctcaaggactgtgtgaaccaacaaggggccagttttccattgttgtggtgaactgtcaagtgcaatttgcaataagttatcatgaaaagtttttagattacacgatcgcatatgctgcatttcacgttttattggacattttaccccactgagtggtaaaaaggacagaggctacagatggagttgctttgtttatgaaagtattttggtttgttttctttcatttaattgcctcatatttaaaaaccatgggtccactgttaaaaccacatgtgtatgtgcagctttacattttattttacgtgaagcatgtgattaggaaaactcattttcttttcaagcctcaggacctacctgaagagaagttttcttgtagctcaagttgtgcatgaattactgaatattttactgtgcttttcttcatgaagggtacatgctttgtactcttcactgaaagctgaaaacatttcttgttaccctcttttgtgcctttttattttgccaaccgtgtttatagaaaggacattactaatgacattttgcagattaaaaacattcatttgaacacagtagtcccctagaaaaacaactctacaaaaattttgcagccttattcattataattttgataaaattaacacaaaatcagtcaagaaggaaacatgtatattagtgaagtgtttttggagactgtttgaatgtgaccaaatgtggttctagttgacttcttttcactttggcttatatcaattcttgagagttaatgtgatcatgatattgcaaacaactataaatggtctctaggccttactttgtgattatacgttatctccggctagaaaaaaataatggtagtaaagaaactgacaaactgaaaataagaaaacaaaaatcaaatgcctataataccataatgccagtttggtatagagtccaactttaaaacatgaattgctcgacagagttctattcagtaggtgtttctttgtattgtcttttgtgaatttattatgaaaatgctgcgttgtgttgaatgaaaaagacccaaattactgcttatgaagaaataaagccagcattgatcacttaatcctgtttctcatgtccagccagaaaaaagaacttcagtgaaggtaagataaataaatacatacacatatgtttttttggtagataagtgctaattacatatatgtaatgctttattaaatttctgaaatatttggtaactaaaattttctttttggaaattaataaatccagatacatattaatgttgatatgagtaaaaacaaataggaagaaattgaaatttcttttcatcaacatgtagagctgctattttactatttggagaatatgatgtgaaaattggacctcaaagggtttccttgtgttttcattgtaaaataccatcatcagtgagagtcttgagttcactaacattgtcaccttctggagagagagttaatggggggcattgaggatgatatttttttacatgtgtttggtttctgattcaagtgacacgcacaaactgaaaaaaaaaaaacaaaaaaagcaacaataactttcagggcacctattgctctaaatgcataatataacttgctgccagaaccagatgtgtttaaaaaagaaaataaaaccaccttctttctatagccattaaagcaaactttactgttctaacaaatttgtattttattttgcattgccacacatctgcttatttaaaaactacatccctttggtagtaatgtttcaggacaagtaggtattacagcttgatgtttgtgtgttctaattctaagagttctttattccagatcatatagagtagttaagacaactgtaacagcattttttgaaatacattgtaaaataataaaaggtaacataattaaaatcgagtggatattata

SEQ ID NO: 108745 - DNA, 2849 bp, Homo sapiens
  Payload ID: 1369
  Gene Symbol: ARMC1
  Gene Name: armadillo repeat containing 1
  Uniprot ID: Q9NVT9
  ENST ID: ENST00000458464
  CDS Start-End: 372-914
ataagcgacagaggcgtcaggtcacctgggaagagtctgcagagcctttgcccgccagcgccttcgctctttggctccctgagttagtccggttgcttgcgatcgccgcggccggggctgcgaaccgaagggctcgctccgcgccgcctgggtctctacctcatccgtaggtgtggccctgatggtgtggcaggctctggactcctaaagctctggagcgaatttaagattttattcatgtgcatggcatagaagatgaattcttccacttccaccatgagtgaagagcctgacgctctatcggtagttaaccagttacgggatctagcagcagatccgttaaacagaagagccatcgtccaggatcagggatgtctgcctggccttattttatttatggaccatcccaaccctccagtcgtccactccgctttgcttgctcttcgatacttggcagaatgccgtgcaaacagagaaaagatgaaaggagaactgggtatgatgttgagcttacaaaatgttatacagaatctcggagaaatctatgtgaagaggctttgttaaaaattaaaggtgttattagctttacttttcaaatggctgttcaaaggtgtgtggtgcgaatccgttcagatttgaaagctgaggctttggcatcagcaatagcatcaaccaaggttatgaaagctcagcaagttgtgaaaagtgaaagtggagaagagatgttggtcccattccaagatactcctgtggaagttgaacagaacacagagctacctgactacctgcctgaggatgagagtcccacaaaggaacaggacaaagcggtgtcccgggtcggctcacacccagaaggtggagctagctggcttagcacagctgcaaactttttatccagatcattttattggtgacttcacttttgggctcaaggactgtgtgaaccaacaaggggccagttttccattgttgtggtgaactgtcaagtgcaatttgcaataagttatcatgaaaagtttttagattacacgatcgcatatgctgcatttcacgttttattggacattttaccccactgagtggtaaaaaggacagaggctacagatggagttgctttgtttatgaaagtattttggtttgttttctttcatttaattgcctcatatttaaaaaccatgggtccactgttaaaaccacatgtgtatgtgcagctttacattttattttacgtgaagcatgtgattaggaaaactcattttcttttcaagcctcaggacctacctgaagagaagttttcttgtagctcaagttgtgcatgaattactgaatattttactgtgcttttcttcatgaagggtacatgctttgtactcttcactgaaagctgaaaacatttcttgttaccctcttttgtgcctttttattttgccaaccgtgtttatagaaaggacattactaatgacattttgcagattaaaaacattcatttgaacacagtagtcccctagaaaaacaactctacaaaaattttgcagccttattcattataattttgataaaattaacacaaaatcagtcaagaaggaaacatgtatattagtgaagtgtttttggagactgtttgaatgtgaccaaatgtggttctagttgacttcttttcactttggcttatatcaattcttgagagttaatgtgatcatgatattgcaaacaactataaatggtctctaggccttactttgtgattatacgttatctccggctagaaaaaaataatggtagtaaagaaactgacaaactgaaaataagaaaacaaaaatcaaatgcctataataccataatgccagtttggtatagagtccaactttaaaacatgaattgctcgacagagttctattcagtaggtgtttctttgtattgtcttttgtgaatttattatgaaaatgctgcgttgtgttgaatgaaaaagacccaaattactgcttatgaagaaataaagccagcattgatcacttaatcctgtttctcatgtccagccagaaaaaagaacttcagtgaaggtaagataaataaatacatacacatatgtttttttggtagataagtgctaattacatatatgtaatgctttattaaatttctgaaatatttggtaactaaaattttctttttggaaattaataaatccagatacatattaatgttgatatgagtaaaaacaaataggaagaaattgaaatttcttttcatcaacatgtagagctgctattttactatttggagaatatgatgtgaaaattggacctcaaagggtttccttgtgttttcattgtaaaataccatcatcagtgagagtcttgagttcactaacattgtcaccttctggagagagagttaatggggggcattgaggatgatatttttttacatgtgtttggtttctgattcaagtgacacgcacaaactgaaaaaaaaaaaacaaaaaaagcaacaataactttcagggcacctattgctctaaatgcataatataacttgctgccagaaccagatgtgtttaaaaaagaaaataaaaccaccttctttctatagccattaaagcaaactttactgttctaacaaatttgtattttattttgcattgccacacatctgcttatttaaaaactacatccctttggtagtaatgtttcaggacaagtaggtattacagcttgatgtttgtgtgttctaattctaagagttctttattccagatcatatagagtagttaagacaactgtaacagcattttttgaaatacattgtaaaataataaaaggtaacataattaaaatcgagtggatatt

SEQ ID NO: 108746 - DNA, 1050 bp, Homo sapiens
  Payload ID: 1369
  Gene Symbol: ARMC1
  Gene Name: armadillo repeat containing 1
  ENST ID: ENST00000518908
  CDS Start-End: 480-1050
cagcgccttcgctctttggctccctgagttagtccggttgcttgcgatcgccgcggccggggctgcgaaccgaagggctcgctccgcgccgcctgggtctctacctcatccgtaggtgtggccctgatggtgtggcaggctctggactcctaaagctctggagcggtatgtggggtccacgggcggcagacaaagcagtggagccgggaaggccgcgggaagcggcccctgtaccgaggcagcgaatccgcctgggaggggcgccccgcctgcctcttgtcagatccagtagtgggtcccagtgaggcgctttagcacgctctacccccacgtgtcccgtgaatctgttagctttgctcatttcttctttgtcccccctcacatctgacttttactaaccccagtattattaatgggtgtcatctcatcttttcatctctccagaatttaagattttattcatgtgcatggcatagaagatgaattcttccacttccaccatgagtgaagagcctgacgctctatcggtagttaaccagttacgggatctagcagcagatccgttaaacagaagagccatcgtccaggatcagggatgtctgcctggccttattttatttatggaccatcccaaccctccagtcgtccactccgctttgcttgctcttcgatacttggcagaatgccgtgcaaacagagaaaagatgaaaggagaactgggtatgatgttgagcttacaaaatgttatacagaaaactacaactccaggagaaacaaaacttctggcctctgaaatctatgacattcttcagtcctccaatatggcagatggtgatagttttaatgagatgaattcacgtcgaaggaaagctcaattttttctgggaactacaaacaaacgtgccaaaacagtggttttgcatatagatggccttgatgatacgtctcggagaaatctatgtgaagaggctttgttaaaaattaaaggtgttattagctttacttttcaaatggctgttcaaaggtgtgtggtgcgaatccgttcagatt

SEQ ID NO: 108747 - DNA, 686 bp, Homo sapiens
  Payload ID: 1369
  Gene Symbol: ARMC1
  Gene Name: armadillo repeat containing 1
  ENST ID: ENST00000519352
  CDS Start-End: 316-686
agagcctttgcccgccagcgccttcgctctttggctccctgagttagtccggttgcttgcgatcgccgcggccggggctgcgaaccgaagggctcgctccgcgccgcctgggtctctacctcatccgtaggtgtggccctgatggtgtggcaggctctggactcctaaagctctggagcggaacctttaactgaccagagtgctcattaaacgatgagaagtattctttgtcatagaatgatttgtttgtccaagttgaactaaacaagagaaagtaaagaatttaagattttattcatgtgcatggcatagaagatgaattcttccacttccaccatgagtgaagagcctgacgctctatcggtagttaaccagttacgggatctagcagcagatccgttaaacagaagagccatcgtccaggatcagggatgtctgcctggccttattttatttatggaccatcccaaccctccagtcgtccactccgctttgcttgctcttcgatacttggcagaatgccgtgcaaacagagaaaagatgaaaggagaactgggtatgatgttgagcttacaaaatgttatacagaaaactacaactccaggagaaacaaaacttctggcctctgaaatctatgacattcttcagtcctccaatatggcagatggtgatagttttaatgagat

SEQ ID NO: 108748 - DNA, 887 bp, Homo sapiens
  Payload ID: 1369
  Gene Symbol: ARMC1
  Gene Name: armadillo repeat containing 1
  ENST ID: ENST00000528721
  CDS Start-End: 210-518
tttgcccgccagcgccttcgctctttggctccctgagttagtccggttgcttgcgatcgccgcggccggggctgcgaaccgaagggctcgctccgcgccgcctgggtctctacctcatccgtaggtgtggccctgatggtgtggcaggctctggactcctaaagctctggagcgaatttaagattttattcatgtgcatggcatagaagatgaattcttccacttccaccatgagtgaagagcctgacgctctatcggtagttaaccagttacgggatctagcagcagatccgttaaacagaagagccatcgtccaggatcagggatgtctgcctggccttattttatttatggaccatcccaaccctccagtcgtccactccgctttgcttgctcttcgatacttggcagaatgccgtgcaaacagagaaaagatgaaaggagaactgggtatgatgttgagcttacaaaatgttatacagaatctcggagaaatctatgtgaagaggctttgttaaaaattaaaggtgttattagctttacttttcaaatggctgttcaaaggtgtgtggtgcgaatccgttcagatttgaaagctgaggctttggcatcagcaatagcatcaaccaaggttatgaaagctcagcaagttgtgaaaagtgaaagtggagaagagatgttggtcccattccaagatactcctgtggaagttgaacagaacacagagctacctgactacctgcctgaggatgagagtcccacaaaggaacaggacaaagcggtgtcccgggtcggctcacacccagaaggtggagctagctggcttagcacagctgcaaactttttatccagatcattttattggtgacttcacttttgggctcaag

SEQ ID NO: 108749 - DNA, 1668 bp, Homo sapiens
  Payload ID: 1370
  Gene Symbol: ARMC10
  Gene Name: armadillo repeat containing 10
  ENST ID: ENST00000306450
  CDS Start-End: 324-569
ggaagctcggctctgggttgcgggccccggcgtctccgcgtggggcgcaccgtccgacccccccctcccggtgtgcagcgccccgcaccgccccgcctcgcctgggagaagccgccgggacgcgccgggctggagtgggcggttataggctttgagctaggccgtttccgggaggcggagctcagaccccatttcctttctccacatccaggtcaggtggcgtttgctgtggcggctaggcccgcgtgcgctggagacctccgcgctggcccccgcgagcctcctgccctggcccggcgctgcggctctgccgcggcggcagcatgggtggcccccggggcgcgggctgggtggcggcgggcctgctgctcggcgcgggcgcctgctactgcatttacaggctgacccggggtcggcggcggggcgaccgcgagctcgggatacgctcttcgaagtccgcagatgagaaaactgagacccccaaaaatagtaagtgttcattggatgggtgtacctcgtttttaaaaggagaagcaaaatgttatcagcatttgagaagacttaactgatggttcatatgatgatgttctaaatgctgaacaacttcagaaactcctttacctgctggagtcaacggaggatcctgtaattattgaaagagctttgattactttgggtaacaatgcagccttttcagttaaccaagtaagtacctcaactcagcaagcaagctctttccattcttacacactagcggtaattgtgaccctgaataaattacttaacctctcagaccctcaatttcctcatctgtgcaatgtggctacttatacttaaaacataatgtttgtttacttctgaaaaacacagcctaatagtgatatgattattaatgtgattatagatccctatgaagttggtcactggcatcacattcgctattattcgtgaattgggtggtattccaattgttgcaaacaaaatcaaccattccaaccagagtattaaagagaaagctttaaatgcactaaataacctgagtgtgaatgttgaaaatcaaatcaagataaagatatacatcagtcaagtatgtgaggatgtcttctctggtcctctgaactctgctgtgcagctggctggactgacattgttgacaaacatgactgttaccaatgaccaccagcacatgcttcacagttacattacagacctgttccaggtgttacttactggaaatggaaacacgaaggtgcaagttttgaaactgcttttgaatttgtctgaaaatccagccatgacagaaggacttctccgtgcccaagtggattcatcattcctttccctttatgacagccacgtagcaaaggagattcttcttcgagtacttacgctatttcagaatataaagaactgcctcaaaatagaaggccatttagctgtgcagcctactttcactgaaggttcattgtttttcctgttacatggagaagaatgtgcccagaaaataagagctttagttgatcaccatgatgcagaggtgaaggaaaaggttgtaacaataatacccaaaatctgattggtcatatttttccaaagagtaatgcagtctggatataaacgtattttctgtcttccttataaggggattctcccagctgctaaatttaa

SEQ ID NO: 108750 - DNA, 2635 bp, Homo sapiens
  Payload ID: 1370
  Gene Symbol: ARMC10
  Gene Name: armadillo repeat containing 10
  Uniprot ID: Q8N2F6
  ENST ID: ENST00000323716
  CDS Start-End: 393-1424
accgccccgcgctccgctgccaggggcgggagggaggaatggttgcttcacgccccgggggaagagacgggaagctcggctctgggttgcgggccccggcgtctccgcgtggggcgcaccgtccgacccccccctcccggtgtgcagcgccccgcaccgccccgcctcgcctgggagaagccgccgggacgcgccgggctggagtgggcggttataggctttgagctaggccgtttccgggaggcggagctcagaccccatttcctttctccacatccaggtcaggtggcgtttgctgtggcggctaggcccgcgtgcgctggagacctccgcgctggcccccgcgagcctcctgccctggcccggcgctgcggctctgccgcggcggcagcatgggtggcccccggggcgcgggctgggtggcggcgggcctgctgctcggcgcgggcgcctgctactgcatttacaggctgacccggggtcggcggcggggcgaccgcgagctcgggatacgctcttcgaagtccgcaggtgccctggaagaagggacgtcagagggtcagttgtgcgggcgctcggcccggcctcagacgggaggtacctgggagtcacagtggtccaagacctcgcagcctgaagacttaactgatggttcatatgatgatgttctaaatgctgaacaacttcagaaactcctttacctgctggagtcaacggaggatcctgtaattattgaaagagctttgattactttgggtaacaatgcagccttttcagttaaccaagctattattcgtgaattgggtggtattccaattgttgcaaacaaaatcaaccattccaaccagagtattaaagagaaagctttaaatgcactaaataacctgagtgtgaatgttgaaaatcaaatcaagataaagatatacatcagtcaagtatgtgaggatgtcttctctggtcctctgaactctgctgtgcagctggctggactgacattgttgacaaacatgactgttaccaatgaccaccagcacatgcttcacagttacattacagacctgttccaggtgttacttactggaaatggaaacacgaaggtgcaagttttgaaactgcttttgaatttgtctgaaaatccagccatgacagaaggacttctccgtgcccaagtggattcatcattcctttccctttatgacagccacgtagcaaaggagattcttcttcgagtacttacgctatttcagaatataaagaactgcctcaaaatagaaggccatttagctgtgcagcctactttcactgaaggttcattgtttttcctgttacatggagaagaatgtgcccagaaaataagagctttagttgatcaccatgatgcagaggtgaaggaaaaggttgtaacaataatacccaaaatctgattggtcatatttttccaaagagtaatgcagtctggatataaacgtattttctgtcttccttataaggggattctcccagctgctaaatttaaacagtaaatatcacattttgtcattaacacagctataacttgccgtggttctcagatttattttggactattttgatgccaagtgaatataagagcttgtactgaaaccatttatttctttctattttgctatttgcaaatgcttgttatcttccctacatgaagtggcagtaacctttttcacatttaagctacccttctaccttttgaagtgatttgcagttactcatctgagacagcatcagtatttgactaaatcattgtttcacaactgaatagtcttgttcttttagtagcaacgaaatcctaagctcttgaggccattcacctgccaacctgaccatactgctttcaaaagtcttttctcatcagtagaatctattttggtcacttctagtcaatgaaaaatgtaaacttttaggagagaatgtttcttaggactcacccactccattcaatgttatatataaaatagtgtgatcaatcacaatgtccatctttagacagttggttaaataaattatctggtctttgaaaagaccgtgctgggcgcggtggctcttgcctgtaatcccagcactttgggaggctgaggcgggcagatcacctgagatcgggagtttgagaccaagcctgaccaatatggagaaaccctgtctctactaagaacacaaaattagctgggcatggtggtgcatgcctgtaatcccagctacttgggaggccgaggcaggagaattgcttgaacccgggaggcagaggttgcagtgagctgagatagcgccattgcactccagcctgggcaacaagagcaaaactctgtctcaaaaaaaaaaaaaaatgatggagctccgaatgtgcttaagtggaaagatatctatgaaatatggtggttttttaaaacacaaaaattatagaatatgggatcccgtgtgtgtgtgtgtgtgtttgaatgaaaaatgcttatgtattgacagaacacttctagaatgatacccaaactcctggagtgggagtggggaatgccttctacgtacacactgttctactgtttgaattttttaatatgagcccaaattgtataatctttttttaataaaggggagaaaaatcacttac

SEQ ID NO: 108751 - DNA, 1581 bp, Homo sapiens
  Payload ID: 1370
  Gene Symbol: ARMC10
  Gene Name: armadillo repeat containing 10
  ENST ID: ENST00000323735
  CDS Start-End: 348-929
cttcacgccccgggggaagagacgggaagctcggctctgggttgcgggccccggcgtctccgcgtggggcgcaccgtccgacccccccctcccggtgtgcagcgccccgcaccgccccgcctcgcctgggagaagccgccgggacgcgccgggctggagtgggcggttataggctttgagctaggccgtttccgggaggcggagctcagaccccatttcctttctccacatccaggtcaggtggcgtttgctgtggcggctaggcccgcgtgcgctggagacctccgcgctggcccccgcgagcctcctgccctggcccggcgctgcggctctgccgcggcggcagcatgggtggcccccggggcgcgggctgggtggcggcgggcctgctgctcggcgcgggcgcctgctactgcatttacaggctgacccggggtcggcggcggggcgaccgcgagctcgggatacgctcttcgaagtccgcaggtgccctggaagaagggacgtcagagggtcagttgtgcgggcgctcggcccggcctcagacgggaggtacctgggagtcacagtggtccaagacctcgcagcctgaagacttaactgatggttcatatgatgatgttctaaatgctgaacaacttcagaaactcctttacctgctggagtcaacggaggatcctgtaattattgaaagagctttgattactttgggtaacaatgcagccttttcagttaaccaagctattattcgtgaattgggtggtattccaattgttgcaaacaaaatcaaccattccaaccagagtattaaagagaaagctttaaatgcactaaataacctgagtgtgaatgttgaaaatcaaatcaagataaagccaaggattacctttagaggaatggagaataagacagaagagggagggacctgaactagccaataagaggtgcaagttttgaaactgcttttgaatttgtctgaaaatccagccatgacagaaggacttctccgtgcccaagtggattcatcattcctttccctttatgacagccacgtagcaaaggagattcttcttcgagtacttacgctatttcagaatataaagaactgcctcaaaatagaaggccatttagctgtgcagcctactttcactgaaggttcattgtttttcctgttacatggagaagaatgtgcccagaaaataagagctttagttgatcaccatgatgcagaggtgaaggaaaaggttgtaacaataatacccaaaatctgattggtcatatttttccaaagagtaatgcagtctggatataaacgtattttctgtcttccttataaggggattctcccagctgctaaatttaaacagtaaatatcacattttgtcattaacacagctataacttgccgtggttctcagatttattttggactattttgatgccaagtgaatataagagcttgtactgaaaccatttatttctttctattttgctatttgcaaatgcttgttatcttccctacatgaagtggcagtaacctttttcacatttaagctacccttctaccttttgaagtgattt

SEQ ID NO: 108752 - DNA, 2445 bp, Homo sapiens
  Payload ID: 1370
  Gene Symbol: ARMC10
  Gene Name: armadillo repeat containing 10
  Uniprot ID: Q8N2F6
  ENST ID: ENST00000428183
  CDS Start-End: 393-1247
accgccccgcgctccgctgccaggggcgggagggaggaatggttgcttcacgccccgggggaagagacgggaagctcggctctgggttgcgggccccggcgtctccgcgtggggcgcaccgtccgacccccccctcccggtgtgcagcgccccgcaccgccccgcctcgcctgggagaagccgccgggacgcgccgggctggagtgggcggttataggctttgagctaggccgtttccgggaggcggagctcagaccccatttcctttctccacatccaggtcaggtggcgtttgctgtggcggctaggcccgcgtgcgctggagacctccgcgctggcccccgcgagcctcctgccctggcccggcgctgcggctctgccgcggcggcagcatgggtggcccccggggcgcgggctgggtggcggcgggcctgctgctcggcgcgggcgcctgctactgcatttacaggctgacccggggtcggcggcggggcgaccgcgagctcgggatacgctcttcgaagtccgcaggtgccctggaagaagggacgtcagagggtcagttgtgcgggcgctcggcccggcctcagacgggaggtacctgggagtcacagtggtccaagacctcgcagcctgaagacttaactgatggttcatatgatgatgttctaaatgctgaacaacttcagaaactcctttacctgctggagtcaacggaggatcctgtaattattgaaagagctttgattactttgggtaacaatgcagccttttcagttaaccaagctattattcgtgaattgggtggtattccaattgttgcaaacaaaatcaaccattccaaccagagtattaaagagaaagctttaaatgcactaaataacctgagtgtgaatgttgaaaatcaaatcaagataaaggtgcaagttttgaaactgcttttgaatttgtctgaaaatccagccatgacagaaggacttctccgtgcccaagtggattcatcattcctttccctttatgacagccacgtagcaaaggagattcttcttcgagtacttacgctatttcagaatataaagaactgcctcaaaatagaaggccatttagctgtgcagcctactttcactgaaggttcattgtttttcctgttacatggagaagaatgtgcccagaaaataagagctttagttgatcaccatgatgcagaggtgaaggaaaaggttgtaacaataatacccaaaatctgattggtcatatttttccaaagagtaatgcagtctggatataaacgtattttctgtcttccttataaggggattctcccagctgctaaatttaaacagtaaatatcacattttgtcattaacacagctataacttgccgtggttctcagatttattttggactattttgatgccaagtgaatataagagcttgtactgaaaccatttatttctttctattttgctatttgcaaatgcttgttatcttccctacatgaagtggcagtaacctttttcacatttaagctacccttctaccttttgaagtgatttgcagttactcatctgagacagcatcagtatttgactaaatcattgtttcacaactgaatagtcttgttcttttagtagcaacgaaatcctaagctcttgaggccattcacctgccaacctgaccatactgctttcaaaagtcttttctcatcagtagaatctattttggtcacttctagtcaatgaaaaatgtaaacttttaggagagaatgtttcttaggactcacccactccattcaatgttatatataaaatagtgtgatcaatcacaatgtccatctttagacagttggttaaataaattatctggtctttgaaaagaccgtgctgggcgcggtggctcttgcctgtaatcccagcactttgggaggctgaggcgggcagatcacctgagatcgggagtttgagaccaagcctgaccaatatggagaaaccctgtctctactaagaacacaaaattagctgggcatggtggtgcatgcctgtaatcccagctacttgggaggccgaggcaggagaattgcttgaacccgggaggcagaggttgcagtgagctgagatagcgccattgcactccagcctgggcaacaagagcaaaactctgtctcaaaaaaaaaaaaaaatgatggagctccgaatgtgcttaagtggaaagatatctatgaaatatggtggttttttaaaacacaaaaattatagaatatgggatcccgtgtgtgtgtgtgtgtgtttgaatgaaaaatgcttatgtattgacagaacacttctagaatgatacccaaactcctggagtgggagtggggaatgccttctacgtacacactgttctactgtttgaattttttaatatgagcccaaattgtataatctttttttaataaaggggag

SEQ ID NO: 108753 - DNA, 2443 bp, Homo sapiens
  Payload ID: 1370
  Gene Symbol: ARMC10
  Gene Name: armadillo repeat containing 10
  Uniprot ID: Q8N2F6
  ENST ID: ENST00000425331
  CDS Start-End: 393-1247
accgccccgcgctccgctgccaggggcgggagggaggaatggttgcttcacgccccgggggaagagacgggaagctcggctctgggttgcgggccccggcgtctccgcgtggggcgcaccgtccgacccccccctcccggtgtgcagcgccccgcaccgccccgcctcgcctgggagaagccgccgggacgcgccgggctggagtgggcggttataggctttgagctaggccgtttccgggaggcggagctcagaccccatttcctttctccacatccaggtcaggtggcgtttgctgtggcggctaggcccgcgtgcgctggagacctccgcgctggcccccgcgagcctcctgccctggcccggcgctgcggctctgccgcggcggcagcatgggtggcccccggggcgcgggctgggtggcggcgggcctgctgctcggcgcgggcgcctgctactgcatttacaggctgacccggggtcggcggcggggcgaccgcgagctcgggatacgctcttcgaagtccgcagaagacttaactgatggttcatatgatgatgttctaaatgctgaacaacttcagaaactcctttacctgctggagtcaacggaggatcctgtaattattgaaagagctttgattactttgggtaacaatgcagccttttcagttaaccaagctattattcgtgaattgggtggtattccaattgttgcaaacaaaatcaaccattccaaccagagtattaaagagaaagctttaaatgcactaaataacctgagtgtgaatgttgaaaatcaaatcaagataaagatatacatcagtcaagtatgtgaggatgtcttctctggtcctctgaactctgctgtgcagctggctggactgacattgttgacaaacatgactgttaccaatgaccaccagcacatgcttcacagttacattacagacctgttccaggtgttacttactggaaatggaaacacgaaggtggattcatcattcctttccctttatgacagccacgtagcaaaggagattcttcttcgagtacttacgctatttcagaatataaagaactgcctcaaaatagaaggccatttagctgtgcagcctactttcactgaaggttcattgtttttcctgttacatggagaagaatgtgcccagaaaataagagctttagttgatcaccatgatgcagaggtgaaggaaaaggttgtaacaataatacccaaaatctgattggtcatatttttccaaagagtaatgcagtctggatataaacgtattttctgtcttccttataaggggattctcccagctgctaaatttaaacagtaaatatcacattttgtcattaacacagctataacttgccgtggttctcagatttattttggactattttgatgccaagtgaatataagagcttgtactgaaaccatttatttctttctattttgctatttgcaaatgcttgttatcttccctacatgaagtggcagtaacctttttcacatttaagctacccttctaccttttgaagtgatttgcagttactcatctgagacagcatcagtatttgactaaatcattgtttcacaactgaatagtcttgttcttttagtagcaacgaaatcctaagctcttgaggccattcacctgccaacctgaccatactgctttcaaaagtcttttctcatcagtagaatctattttggtcacttctagtcaatgaaaaatgtaaacttttaggagagaatgtttcttaggactcacccactccattcaatgttatatataaaatagtgtgatcaatcacaatgtccatctttagacagttggttaaataaattatctggtctttgaaaagaccgtgctgggcgcggtggctcttgcctgtaatcccagcactttgggaggctgaggcgggcagatcacctgagatcgggagtttgagaccaagcctgaccaatatggagaaaccctgtctctactaagaacacaaaattagctgggcatggtggtgcatgcctgtaatcccagctacttgggaggccgaggcaggagaattgcttgaacccgggaggcagaggttgcagtgagctgagatagcgccattgcactccagcctgggcaacaagagcaaaactctgtctcaaaaaaaaaaaaaaatgatggagctccgaatgtgcttaagtggaaagatatctatgaaatatggtggttttttaaaacacaaaaattatagaatatgggatcccgtgtgtgtgtgtgtgtgtttgaatgaaaaatgcttatgtattgacagaacacttctagaatgatacccaaactcctggagtgggagtggggaatgccttctacgtacacactgttctactgtttgaattttttaatatgagcccaaattgtataatctttttttaataaagggg

SEQ ID NO: 108754 - DNA, 805 bp, Homo sapiens
  Payload ID: 1370
  Gene Symbol: ARMC10
  Gene Name: armadillo repeat containing 10
  ENST ID: ENST00000434153
  CDS Start-End: 106-805
ggcgtttgctgtggcggctaggcccgcgtgcgctggagacctccgcgctggcccccgcgagcctcctgccctggcccggcgctgcggctctgccgcggcggcagcatgggtggcccccggggcgcgggctgggtggcggcgggcctgctgctcggcgcgggcgcctgctactgcatttacaggctgacccggggtcggcggcggggcgaccgcgagctcgggatacgctcttcgaagtccgcaggtgccctggaagaagggacgtcagagggtcagttgtgcgggcgctcggcccggcctcagacgggaggtacctgggagtcacagtggtccaagacctcgcagcctgaagacttaactgatggttcatatgatgatgttctaaatgctgaacaacttcagaaactcctttacctgctggagtcaacggaggatcctgtaattattgaaagagctttgattactttgggtaacaatgcagccttttcagttaaccaaatccctatgaagttggtcactggcatcacattcgctattattcgtgaattgggtggtattccaattgttgcaaacaaaatcaaccattccaaccagagtattaaagagaaagctttaaatgcactaaataacctgagtgtgaatgttgaaaatcaaatcaagataaaggtggattcatcattcctttccctttatgacagccacgtagcaaaggagattcttcttcgagtacttacgctatttcagaatataaagaactgcctcaaaatagaaggccatttagctgtgcagcctactttcactgaag

SEQ ID NO: 108755 - DNA, 2347 bp, Homo sapiens
  Payload ID: 1370
  Gene Symbol: ARMC10
  Gene Name: armadillo repeat containing 10
  Uniprot ID: Q8N2F6
  ENST ID: ENST00000454559
  CDS Start-End: 393-1142
accgccccgcgctccgctgccaggggcgggagggaggaatggttgcttcacgccccgggggaagagacgggaagctcggctctgggttgcgggccccggcgtctccgcgtggggcgcaccgtccgacccccccctcccggtgtgcagcgccccgcaccgccccgcctcgcctgggagaagccgccgggacgcgccgggctggagtgggcggttataggctttgagctaggccgtttccgggaggcggagctcagaccccatttcctttctccacatccaggtcaggtggcgtttgctgtggcggctaggcccgcgtgcgctggagacctccgcgctggcccccgcgagcctcctgccctggcccggcgctgcggctctgccgcggcggcagcatgggtggcccccggggcgcgggctgggtggcggcgggcctgctgctcggcgcgggcgcctgctactgcatttacaggctgacccggggtcggcggcggggcgaccgcgagctcgggatacgctcttcgaagtccgcagaagacttaactgatggttcatatgatgatgttctaaatgctgaacaacttcagaaactcctttacctgctggagtcaacggaggatcctgtaattattgaaagagctttgattactttgggtaacaatgcagccttttcagttaaccaagctattattcgtgaattgggtggtattccaattgttgcaaacaaaatcaaccattccaaccagagtattaaagagaaagctttaaatgcactaaataacctgagtgtgaatgttgaaaatcaaatcaagataaaggtgcaagttttgaaactgcttttgaatttgtctgaaaatccagccatgacagaaggacttctccgtgcccaagtggattcatcattcctttccctttatgacagccacgtagcaaaggagattcttcttcgagtacttacgctatttcagaatataaagaactgcctcaaaatagaaggccatttagctgtgcagcctactttcactgaaggttcattgtttttcctgttacatggagaagaatgtgcccagaaaataagagctttagttgatcaccatgatgcagaggtgaaggaaaaggttgtaacaataatacccaaaatctgattggtcatatttttccaaagagtaatgcagtctggatataaacgtattttctgtcttccttataaggggattctcccagctgctaaatttaaacagtaaatatcacattttgtcattaacacagctataacttgccgtggttctcagatttattttggactattttgatgccaagtgaatataagagcttgtactgaaaccatttatttctttctattttgctatttgcaaatgcttgttatcttccctacatgaagtggcagtaacctttttcacatttaagctacccttctaccttttgaagtgatttgcagttactcatctgagacagcatcagtatttgactaaatcattgtttcacaactgaatagtcttgttcttttagtagcaacgaaatcctaagctcttgaggccattcacctgccaacctgaccatactgctttcaaaagtcttttctcatcagtagaatctattttggtcacttctagtcaatgaaaaatgtaaacttttaggagagaatgtttcttaggactcacccactccattcaatgttatatataaaatagtgtgatcaatcacaatgtccatctttagacagttggttaaataaattatctggtctttgaaaagaccgtgctgggcgcggtggctcttgcctgtaatcccagcactttgggaggctgaggcgggcagatcacctgagatcgggagtttgagaccaagcctgaccaatatggagaaaccctgtctctactaagaacacaaaattagctgggcatggtggtgcatgcctgtaatcccagctacttgggaggccgaggcaggagaattgcttgaacccgggaggcagaggttgcagtgagctgagatagcgccattgcactccagcctgggcaacaagagcaaaactctgtctcaaaaaaaaaaaaaaatgatggagctccgaatgtgcttaagtggaaagatatctatgaaatatggtggttttttaaaacacaaaaattatagaatatgggatcccgtgtgtgtgtgtgtgtgtttgaatgaaaaatgcttatgtattgacagaacacttctagaatgatacccaaactcctggagtgggagtggggaatgccttctacgtacacactgttctactgtttgaattttttaatatgagcccaaattgtataatctttttttaataaaggggagaaaaatc

SEQ ID NO: 108756 - DNA, 688 bp, Homo sapiens
  Payload ID: 1370
  Gene Symbol: ARMC10
  Gene Name: armadillo repeat containing 10
  ENST ID: ENST00000431642
  CDS Start-End: 1-558
cgtgaattgggtggtattccaattgttgcaaacaaaatcaaccattccaaccagagtattaaagagaaagctttaaatgcactaaataacctgagtgtgaatgttgaaaatcaaatcaagataaagatatacatcagtcaagtatgtgaggatgtcttctctggtcctctgaactctgctgtgcagctggctggactgacattgttgacaaacatgactgttaccaatgaccaccagcacatgcttcacagttacattacagacctgttccaggtgttacttactggaaatggaaacacgaaggtggattcatcattcctttccctttatgacagccacgtagcaaaggagattcttcttcgagtacttacgctatttcagaatataaagaactgcctcaaaatagaaggccatttagctgtgcagcctactttcactgaaggttcattgtttttcctgttacatggagaagaatgtgcccagaaaataagagctttagttgatcaccatgatgcagaggtgaaggaaaaggttgtaacaataatacccaaaatctgattggtcatatttttccaaagagtaatgcagtctggatataaacgtattttctgtcttccttataaggggattctcccagctgctaaatttaaacagtaaatatcacattttgtcattaacacagctataa

SEQ ID NO: 108757 - DNA, 2524 bp, Homo sapiens
  Payload ID: 1370
  Gene Symbol: ARMC10
  Gene Name: armadillo repeat containing 10
  Uniprot ID: Q8N2F6
  ENST ID: ENST00000441711
  CDS Start-End: 393-1319
accgccccgcgctccgctgccaggggcgggagggaggaatggttgcttcacgccccgggggaagagacgggaagctcggctctgggttgcgggccccggcgtctccgcgtggggcgcaccgtccgacccccccctcccggtgtgcagcgccccgcaccgccccgcctcgcctgggagaagccgccgggacgcgccgggctggagtgggcggttataggctttgagctaggccgtttccgggaggcggagctcagaccccatttcctttctccacatccaggtcaggtggcgtttgctgtggcggctaggcccgcgtgcgctggagacctccgcgctggcccccgcgagcctcctgccctggcccggcgctgcggctctgccgcggcggcagcatgggtggcccccggggcgcgggctgggtggcggcgggcctgctgctcggcgcgggcgcctgctactgcatttacaggctgacccggggtcggcggcggggcgaccgcgagctcgggatacgctcttcgaagtccgcagaagacttaactgatggttcatatgatgatgttctaaatgctgaacaacttcagaaactcctttacctgctggagtcaacggaggatcctgtaattattgaaagagctttgattactttgggtaacaatgcagccttttcagttaaccaagctattattcgtgaattgggtggtattccaattgttgcaaacaaaatcaaccattccaaccagagtattaaagagaaagctttaaatgcactaaataacctgagtgtgaatgttgaaaatcaaatcaagataaagatatacatcagtcaagtatgtgaggatgtcttctctggtcctctgaactctgctgtgcagctggctggactgacattgttgacaaacatgactgttaccaatgaccaccagcacatgcttcacagttacattacagacctgttccaggtgttacttactggaaatggaaacacgaaggtgcaagttttgaaactgcttttgaatttgtctgaaaatccagccatgacagaaggacttctccgtgcccaagtggattcatcattcctttccctttatgacagccacgtagcaaaggagattcttcttcgagtacttacgctatttcagaatataaagaactgcctcaaaatagaaggccatttagctgtgcagcctactttcactgaaggttcattgtttttcctgttacatggagaagaatgtgcccagaaaataagagctttagttgatcaccatgatgcagaggtgaaggaaaaggttgtaacaataatacccaaaatctgattggtcatatttttccaaagagtaatgcagtctggatataaacgtattttctgtcttccttataaggggattctcccagctgctaaatttaaacagtaaatatcacattttgtcattaacacagctataacttgccgtggttctcagatttattttggactattttgatgccaagtgaatataagagcttgtactgaaaccatttatttctttctattttgctatttgcaaatgcttgttatcttccctacatgaagtggcagtaacctttttcacatttaagctacccttctaccttttgaagtgatttgcagttactcatctgagacagcatcagtatttgactaaatcattgtttcacaactgaatagtcttgttcttttagtagcaacgaaatcctaagctcttgaggccattcacctgccaacctgaccatactgctttcaaaagtcttttctcatcagtagaatctattttggtcacttctagtcaatgaaaaatgtaaacttttaggagagaatgtttcttaggactcacccactccattcaatgttatatataaaatagtgtgatcaatcacaatgtccatctttagacagttggttaaataaattatctggtctttgaaaagaccgtgctgggcgcggtggctcttgcctgtaatcccagcactttgggaggctgaggcgggcagatcacctgagatcgggagtttgagaccaagcctgaccaatatggagaaaccctgtctctactaagaacacaaaattagctgggcatggtggtgcatgcctgtaatcccagctacttgggaggccgaggcaggagaattgcttgaacccgggaggcagaggttgcagtgagctgagatagcgccattgcactccagcctgggcaacaagagcaaaactctgtctcaaaaaaaaaaaaaaatgatggagctccgaatgtgcttaagtggaaagatatctatgaaatatggtggttttttaaaacacaaaaattatagaatatgggatcccgtgtgtgtgtgtgtgtgtttgaatgaaaaatgcttatgtattgacagaacacttctagaatgatacccaaactcctggagtgggagtggggaatgccttctacgtacacactgttctactgtttgaattttttaatatgagcccaaattgtataatctttttttaataaaggggagaaaaatc

SEQ ID NO: 108758 - DNA, 2266 bp, Homo sapiens
  Payload ID: 1370
  Gene Symbol: ARMC10
  Gene Name: armadillo repeat containing 10
  Uniprot ID: Q8N2F6
  ENST ID: ENST00000541300
  CDS Start-End: 393-1070
accgccccgcgctccgctgccaggggcgggagggaggaatggttgcttcacgccccgggggaagagacgggaagctcggctctgggttgcgggccccggcgtctccgcgtggggcgcaccgtccgacccccccctcccggtgtgcagcgccccgcaccgccccgcctcgcctgggagaagccgccgggacgcgccgggctggagtgggcggttataggctttgagctaggccgtttccgggaggcggagctcagaccccatttcctttctccacatccaggtcaggtggcgtttgctgtggcggctaggcccgcgtgcgctggagacctccgcgctggcccccgcgagcctcctgccctggcccggcgctgcggctctgccgcggcggcagcatgggtggcccccggggcgcgggctgggtggcggcgggcctgctgctcggcgcgggcgcctgctactgcatttacaggctgacccggggtcggcggcggggcgaccgcgagctcgggatacgctcttcgaagtccgcagaagacttaactgatggttcatatgatgatgttctaaatgctgaacaacttcagaaactcctttacctgctggagtcaacggaggatcctgtaattattgaaagagctttgattactttgggtaacaatgcagccttttcagttaaccaagctattattcgtgaattgggtggtattccaattgttgcaaacaaaatcaaccattccaaccagagtattaaagagaaagctttaaatgcactaaataacctgagtgtgaatgttgaaaatcaaatcaagataaaggtggattcatcattcctttccctttatgacagccacgtagcaaaggagattcttcttcgagtacttacgctatttcagaatataaagaactgcctcaaaatagaaggccatttagctgtgcagcctactttcactgaaggttcattgtttttcctgttacatggagaagaatgtgcccagaaaataagagctttagttgatcaccatgatgcagaggtgaaggaaaaggttgtaacaataatacccaaaatctgattggtcatatttttccaaagagtaatgcagtctggatataaacgtattttctgtcttccttataaggggattctcccagctgctaaatttaaacagtaaatatcacattttgtcattaacacagctataacttgccgtggttctcagatttattttggactattttgatgccaagtgaatataagagcttgtactgaaaccatttatttctttctattttgctatttgcaaatgcttgttatcttccctacatgaagtggcagtaacctttttcacatttaagctacccttctaccttttgaagtgatttgcagttactcatctgagacagcatcagtatttgactaaatcattgtttcacaactgaatagtcttgttcttttagtagcaacgaaatcctaagctcttgaggccattcacctgccaacctgaccatactgctttcaaaagtcttttctcatcagtagaatctattttggtcacttctagtcaatgaaaaatgtaaacttttaggagagaatgtttcttaggactcacccactccattcaatgttatatataaaatagtgtgatcaatcacaatgtccatctttagacagttggttaaataaattatctggtctttgaaaagaccgtgctgggcgcggtggctcttgcctgtaatcccagcactttgggaggctgaggcgggcagatcacctgagatcgggagtttgagaccaagcctgaccaatatggagaaaccctgtctctactaagaacacaaaattagctgggcatggtggtgcatgcctgtaatcccagctacttgggaggccgaggcaggagaattgcttgaacccgggaggcagaggttgcagtgagctgagatagcgccattgcactccagcctgggcaacaagagcaaaactctgtctcaaaaaaaaaaaaaaatgatggagctccgaatgtgcttaagtggaaagatatctatgaaatatggtggttttttaaaacacaaaaattatagaatatgggatcccgtgtgtgtgtgtgtgtgtttgaatgaaaaatgcttatgtattgacagaacacttctagaatgatacccaaactcctggagtgggagtggggaatgccttctacgtacacactgttctactgtttgaattttttaatatgagcccaaattgtataatctttttttaataaagggg

SEQ ID NO: 108759 - DNA, 1667 bp, Homo sapiens
  Payload ID: 1370
  Gene Symbol: ARMC10
  Gene Name: armadillo repeat containing 10
  ENST ID: ENST00000633112
  CDS Start-End: 1-462
gctattattcgtgaattgggtggtattccaattgttgcaaacaaaatcaaccattccaaccagagtattaaagagaaagctttaaatgcactaaataacctgagtgtgaatgttgaaaatcaaatcaagataaaggtgcaagttttgaaactgcttttgaatttgtctgaaaatccagccatgacagaaggacttctccgtgcccaagtggattcatcattcctttccctttatgacagccacgtagcaaaggagattcttcttcgagtacttacgctatttcagaatataaagaactgcctcaaaatagaaggccatttagctgtgcagcctactttcactgaaggttcattgtttttcctgttacatggagaagaatgtgcccagaaaataagagctttagttgatcaccatgatgcagaggtgaaggaaaaggttgtaacaataatacccaaaatctgattggtcatatttttccaaagagtaatgcagtctggatataaacgtattttctgtcttccttataaggggattctcccagctgctaaatttaaacagtaaatatcacattttgtcattaacacagctataacttgccgtggttctcagatttattttggactattttgatgccaagtgaatataagagcttgtactgaaaccatttatttctttctattttgctatttgcaaatgcttgttatcttccctacatgaagtggcagtaacctttttcacatttaagctacccttctaccttttgaagtgatttgcagttactcatctgagacagcatcagtatttgactaaatcattgtttcacaactgaatagtcttgttcttttagtagcaacgaaatcctaagctcttgaggccattcacctgccaacctgaccatactgctttcaaaagtcttttctcatcagtagaatctattttggtcacttctagtcaatgaaaaatgtaaacttttaggagagaatgtttcttaggactcacccactccattcaatgttatatataaaatagtgtgatcaatcacaatgtccatctttagacagttggttaaataaattatctggtctttgaaaagaccgtgctgggcgcggtggctcttgcctgtaatcccagcactttgggaggctgaggcgggcagatcacctgagatcgggagtttgagaccaagcctgaccaatatggagaaaccctgtctctactaagaacacaaaattagctgggcatggtggtgcatgcctgtaatcccagctacttgggaggccgaggcaggagaattgcttgaacccgggaggcagaggttgcagtgagctgagatagcgccattgcactccagcctgggcaacaagagcaaaactctgtctcaaaaaaaaaaaaaaatgatggagctccgaatgtgcttaagtggaaagatatctatgaaatatggtggttttttaaaacacaaaaattatagaatatgggatcccgtgtgtgtgtgtgtgtgtttgaatgaaaaatgcttatgtattgacagaacacttctagaatgatacccaaactcctggagtgggagtggggaatgccttctacgtacacactgttctactgtttgaattttttaatatgagcccaaattgtataatctttttttaataaaggggagaaaaatc

SEQ ID NO: 108760 - DNA, 688 bp, Homo sapiens; identical to SEQ ID NO: 108756
  Payload ID: 1370
  Gene Symbol: ARMC10
  Gene Name: armadillo repeat containing 10
  ENST ID: ENST00000631892
  CDS Start-End: 1-558

SEQ ID NO: 108761 - DNA, 1660 bp, Homo sapiens
  Payload ID: 1370
  Gene Symbol: ARMC10
  Gene Name: armadillo repeat containing 10
  ENST ID: ENST00000633975
  CDS Start-End: 1-462
gctattattcgtgaattgggtggtattccaattgttgcaaacaaaatcaaccattccaaccagagtattaaagagaaagctttaaatgcactaaataacctgagtgtgaatgttgaaaatcaaatcaagataaaggtgcaagttttgaaactgcttttgaatttgtctgaaaatccagccatgacagaaggacttctccgtgcccaagtggattcatcattcctttccctttatgacagccacgtagcaaaggagattcttcttcgagtacttacgctatttcagaatataaagaactgcctcaaaatagaaggccatttagctgtgcagcctactttcactgaaggttcattgtttttcctgttacatggagaagaatgtgcccagaaaataagagctttagttgatcaccatgatgcagaggtgaaggaaaaggttgtaacaataatacccaaaatctgattggtcatatttttccaaagagtaatgcagtctggatataaacgtattttctgtcttccttataaggggattctcccagctgctaaatttaaacagtaaatatcacattttgtcattaacacagctataacttgccgtggttctcagatttattttggactattttgatgccaagtgaatataagagcttgtactgaaaccatttatttctttctattttgctatttgcaaatgcttgttatcttccctacatgaagtggcagtaacctttttcacatttaagctacccttctaccttttgaagtgatttgcagttactcatctgagacagcatcagtatttgactaaatcattgtttcacaactgaatagtcttgttcttttagtagcaacgaaatcctaagctcttgaggccattcacctgccaacctgaccatactgctttcaaaagtcttttctcatcagtagaatctattttggtcacttctagtcaatgaaaaatgtaaacttttaggagagaatgtttcttaggactcacccactccattcaatgttatatataaaatagtgtgatcaatcacaatgtccatctttagacagttggttaaataaattatctggtctttgaaaagaccgtgctgggcgcggtggctcttgcctgtaatcccagcactttgggaggctgaggcgggcagatcacctgagatcgggagtttgagaccaagcctgaccaatatggagaaaccctgtctctactaagaacacaaaattagctgggcatggtggtgcatgcctgtaatcccagctacttgggaggccgaggcaggagaattgcttgaacccgggaggcagaggttgcagtgagctgagatagcgccattgcactccagcctgggcaacaagagcaaaactctgtctcaaaaaaaaaaaaaaatgatggagctccgaatgtgcttaagtggaaagatatctatgaaatatggtggttttttaaaacacaaaaattatagaatatgggatcccgtgtgtgtgtgtgtgtgtttgaatgaaaaatgcttatgtattgacagaacacttctagaatgatacccaaactcctggagtgggagtggggaatgccttctacgtacacactgttctactgtttgaattttttaatatgagcccaaattgtataatctttttttaataaaggggag

SEQ ID NO: 108762 - DNA, 1844 bp, Homo sapiens
  Payload ID: 1370
  Gene Symbol: ARMC10
  Gene Name: armadillo repeat containing 10
  ENST ID: ENST00000632615
  CDS Start-End: 1-639
gctattattcgtgaattgggtggtattccaattgttgcaaacaaaatcaaccattccaaccagagtattaaagagaaagctttaaatgcactaaataacctgagtgtgaatgttgaaaatcaaatcaagataaagatatacatcagtcaagtatgtgaggatgtcttctctggtcctctgaactctgctgtgcagctggctggactgacattgttgacaaacatgactgttaccaatgaccaccagcacatgcttcacagttacattacagacctgttccaggtgttacttactggaaatggaaacacgaaggtgcaagttttgaaactgcttttgaatttgtctgaaaatccagccatgacagaaggacttctccgtgcccaagtggattcatcattcctttccctttatgacagccacgtagcaaaggagattcttcttcgagtacttacgctatttcagaatataaagaactgcctcaaaatagaaggccatttagctgtgcagcctactttcactgaaggttcattgtttttcctgttacatggagaagaatgtgcccagaaaataagagctttagttgatcaccatgatgcagaggtgaaggaaaaggttgtaacaataatacccaaaatctgattggtcatatttttccaaagagtaatgcagtctggatataaacgtattttctgtcttccttataaggggattctcccagctgctaaatttaaacagtaaatatcacattttgtcattaacacagctataacttgccgtggttctcagatttattttggactattttgatgccaagtgaatataagagcttgtactgaaaccatttatttctttctattttgctatttgcaaatgcttgttatcttccctacatgaagtggcagtaacctttttcacatttaagctacccttctaccttttgaagtgatttgcagttactcatctgagacagcatcagtatttgactaaatcattgtttcacaactgaatagtcttgttcttttagtagcaacgaaatcctaagctcttgaggccattcacctgccaacctgaccatactgctttcaaaagtcttttctcatcagtagaatctattttggtcacttctagtcaatgaaaaatgtaaacttttaggagagaatgtttcttaggactcacccactccattcaatgttatatataaaatagtgtgatcaatcacaatgtccatctttagacagttggttaaataaattatctggtctttgaaaagaccgtgctgggcgcggtggctcttgcctgtaatcccagcactttgggaggctgaggcgggcagatcacctgagatcgggagtttgagaccaagcctgaccaatatggagaaaccctgtctctactaagaacacaaaattagctgggcatggtggtgcatgcctgtaatcccagctacttgggaggccgaggcaggagaattgcttgaacccgggaggcagaggttgcagtgagctgagatagcgccattgcactccagcctgggcaacaagagcaaaactctgtctcaaaaaaaaaaaaaaatgatggagctccgaatgtgcttaagtggaaagatatctatgaaatatggtggttttttaaaacacaaaaattatagaatatgggatcccgtgtgtgtgtgtgtgtgtttgaatgaaaaatgcttatgtattgacagaacacttctagaatgatacccaaactcctggagtgggagtggggaatgccttctacgtacacactgttctactgtttgaattttttaatatgagcccaaattgtataatctttttttaataaaggggagaaaaatc

SEQ ID NO: 108763 - DNA, 1850 bp, Homo sapiens
  Payload ID: 1370
  Gene Symbol: ARMC10
  Gene Name: armadillo repeat containing 10
  ENST ID: ENST00000632917
  CDS Start-End: 1-639
gctattattcgtgaattgggtggtattccaattgttgcaaacaaaatcaaccattccaaccagagtattaaagagaaagctttaaatgcactaaataacctgagtgtgaatgttgaaaatcaaatcaagataaagatatacatcagtcaagtatgtgaggatgtcttctctggtcctctgaactctgctgtgcagctggctggactgacattgttgacaaacatgactgttaccaatgaccaccagcacatgcttcacagttacattacagacctgttccaggtgttacttactggaaatggaaacacgaaggtgcaagttttgaaactgcttttgaatttgtctgaaaatccagccatgacagaaggacttctccgtgcccaagtggattcatcattcctttccctttatgacagccacgtagcaaaggagattcttcttcgagtacttacgctatttcagaatataaagaactgcctcaaaatagaaggccatttagctgtgcagcctactttcactgaaggttcattgtttttcctgttacatggagaagaatgtgcccagaaaataagagctttagttgatcaccatgatgcagaggtgaaggaaaaggttgtaacaataatacccaaaatctgattggtcatatttttccaaagagtaatgcagtctggatataaacgtattttctgtcttccttataaggggattctcccagctgctaaatttaaacagtaaatatcacattttgtcattaacacagctataacttgccgtggttctcagatttattttggactattttgatgccaagtgaatataagagcttgtactgaaaccatttatttctttctattttgctatttgcaaatgcttgttatcttccctacatgaagtggcagtaacctttttcacatttaagctacccttctaccttttgaagtgatttgcagttactcatctgagacagcatcagtatttgactaaatcattgtttcacaactgaatagtcttgttcttttagtagcaacgaaatcctaagctcttgaggccattcacctgccaacctgaccatactgctttcaaaagtcttttctcatcagtagaatctattttggtcacttctagtcaatgaaaaatgtaaacttttaggagagaatgtttcttaggactcacccactccattcaatgttatatataaaatagtgtgatcaatcacaatgtccatctttagacagttggttaaataaattatctggtctttgaaaagaccgtgctgggcgcggtggctcttgcctgtaatcccagcactttgggaggctgaggcgggcagatcacctgagatcgggagtttgagaccaagcctgaccaatatggagaaaccctgtctctactaagaacacaaaattagctgggcatggtggtgcatgcctgtaatcccagctacttgggaggccgaggcaggagaattgcttgaacccgggaggcagaggttgcagtgagctgagatagcgccattgcactccagcctgggcaacaagagcaaaactctgtctcaaaaaaaaaaaaaaatgatggagctccgaatgtgcttaagtggaaagatatctatgaaatatggtggttttttaaaacacaaaaattatagaatatgggatcccgtgtgtgtgtgtgtgtgtttgaatgaaaaatgcttatgtattgacagaacacttctagaatgatacccaaactcctggagtgggagtggggaatgccttctacgtacacactgttctactgtttgaattttttaatatgagcccaaattgtataatctttttttaataaaggggagaaaaatcacttac

SEQ ID NO: 108764 - DNA, 274 bp, Homo sapiens
  Payload ID: 1370
  Gene Symbol: ARMC10
  Gene Name: armadillo repeat containing 10
  ENST ID: ENST00000631681
  CDS Start-End: 1-274
gctattattcgtgaattgggtggtattccaattgttgcaaacaaaatcaaccattccaaccagagtattaaagagaaagctttaaatgcactaaataacctgagtgtgaatgttgaaaatcaaatcaagataaaggtggattcatcattcctttccctttatgacagccacgtagcaaaggagattcttcttcgagtacttacgctatttcagaatataaagaactgcctcaaaatagaaggccatttagctgtgcagcctactttcactgaag

SEQ ID NO: 108765 - DNA, 841 bp, Homo sapiens
  Payload ID: 1370
  Gene Symbol: ARMC10
  Gene Name: armadillo repeat containing 10
  ENST ID: ENST00000631819
  CDS Start-End: 1-189
gctattattcgtgaattgggtggtattccaattgttgcaaacaaaatcaaccattccaaccagagtattaaagagaaagctttaaatgcactaaataacctgagtgtgaatgttgaaaatcaaatcaagataaagccaaggattacctttagaggaatggagaataagacagaagagggagggacctgaactagccaataagaggtgcaagttttgaaactgcttttgaatttgtctgaaaatccagccatgacagaaggacttctccgtgcccaagtggattcatcattcctttccctttatgacagccacgtagcaaaggagattcttcttcgagtacttacgctatttcagaatataaagaactgcctcaaaatagaaggccatttagctgtgcagcctactttcactgaaggttcattgtttttcctgttacatggagaagaatgtgcccagaaaataagagctttagttgatcaccatgatgcagaggtgaaggaaaaggttgtaacaataatacccaaaatctgattggtcatatttttccaaagagtaatgcagtctggatataaacgtattttctgtcttccttataaggggattctcccagctgctaaatttaaacagtaaatatcacattttgtcattaacacagctataacttgccgtggttctcagatttattttggactattttgatgccaagtgaatataagagcttgtactgaaaccatttatttctttctattttgctatttgcaaatgcttgttatcttccctacatgaagtggcagtaacctttttcacatttaagctacccttctaccttttgaagtgattt

SEQ ID NO: 108766 - DNA, 1169 bp, Homo sapiens
  Payload ID: 1371
  Gene Symbol: ARMC12
  Gene Name: armadillo repeat containing 12
  Uniprot ID: Q5T9G4
  ENST ID: ENST00000288065
  CDS Start-End: 28-1131
acctgggcccagggcaacactgaagacatgggcaagagcatcccccaatacctggggcaactggacatccgcaaaagcgtagtcagcctggccacaggcgccggggcgatctacctgctctacaaggccatcaaggctggcataaaatgcaaaccacccctctgtagcaactcacccatctgcatcgcccgtgagtgtccgggccctggggagagggctctgccccaggaggcacctgctcccgaggcctctgctgtgggagggcccaaaggcctggcagtcgagcgagagcggcacgggcgggactcaggtgagctccggaggctcctcaactctttggagtgcaaacaggatgagtatgccaagagcatgatcctgcacagtatcactcgctgtgtgtacttgctggaggctgaggcctctgcttgtactacggatgacatcgtgttgctgggctacatgctggatgacaaggacaacagtgtcaaaacccaagctctgaatacacttaaagctttctctggcatcagaaaattcaggctcaaaatccaggaacactccatcaaagtactcgaactgatctccaccatctgggacacggaactgcacattgcgggcctcagactcctcaacaaccttccactgcccgactatgtgcatccacagctgcgacgggtgatgcctgccttgatggagatcctgcagtcagactacatcctggcacaggtgcaagccgtacgactgctgagctacctggcacagaagaatgaccttctctatgacattctcaactgccaggttcactccaacttcctaaacctgttccagcccacacagtcagggagtctcctgtatgaggtactggtgtttgctgagcggctgagtgagggccggaacgcaccccactaccacgtggtgaaatggcattacaacgaacagtccctgcatgaatccctctttggggaagagtcccgactggcagaccgactacttgccctggtcatccaccctgaggaagatgttcagatccaggcctgcaaggtcattgtcagcctgcagtatccccaggacttgagagcccggccctcctcctgccagcccagtcgttcctactttaaaaacacggaataaaattaaggagagccaataaatgagtataggagagaaac

SEQ ID NO: 108767 - DNA, 1254 bp, Homo sapiens
  Payload ID: 1371
  Gene Symbol: ARMC12
  Gene Name: armadillo repeat containing 12
  Uniprot ID: Q5T9G4
  ENST ID: ENST00000373866
  CDS Start-End: 23-1045
ggcccagggcaacactgaagacatgggcaagagcatcccccaatacctggggcaactggacatccgcaaaagcgtagtcagcctggccacaggcgccggggcgatctacctgctctacaaggccatcaaggctggcataaaatgcaaaccacccctctgtagcaactcacccatctgcatcgcccgcctggcagtcgagcgagagcggcacgggcgggactcaggtgagctccggaggctcctcaactctttggagtgcaaacaggatgagtatgccaagagcatgatcctgcacagtatcactcgctgtgtgtacttgctggaggctgaggcctctgcttgtactacggatgacatcgtgttgctgggctacatgctggatgacaaggacaacagtgtcaaaacccaagctctgaatacacttaaagctttctctggcatcagaaaattcaggctcaaaatccaggaacactccatcaaagtactcgaactgatctccaccatctgggacacggaactgcacattgcgggcctcagactcctcaacaaccttccactgcccgactatgtgcatccacagctgcgacgggtgatgcctgccttgatggagatcctgcagtcagactacatcctggcacaggtgcaagccgtacgactgctgagctacctggcacagaagaatgaccttctctatgacattctcaactgccaggttcactccaacttcctaaacctgttccagcccacacagtcagggagtctcctgtatgaggtactggtgtttgctgagcggctgagtgagggccggaacgcaccccactaccacgtggtgaaatggcattacaacgaacagtccctgcatgaatccctctttggggaagagtcccgactggcagaccgactacttgccctggtcatccaccctgaggaagatgttcagatccaggcctgcaaggtcattgtcagcctgcagtatccccaggacttgagagcccggccctcctcctgccagcccagtcgttcctactttaaaaacacggaataaaattaaggagagccaataaatgagtataggagagaaacttgaagtttcttgaagctcgaatgtctgttggtggccttccagggctgggtggagatttcattcagcataacctctgctccagagtgtggtacagcatgggcttatctctcaaaacacatccccacttctatgtttgggggactagctcccctcttctcttgctgcttttc

SEQ ID NO: 108768 - DNA, 1111 bp, Homo sapiens
  Payload ID: 1371
  Gene Symbol: ARMC12
  Gene Name: armadillo repeat containing 12
  Uniprot ID: Q5T9G4
  ENST ID: ENST00000373869
  CDS Start-End: 78-1070
agagttctggttccggaaggccccccacaggtgccttgggcctagctctcacctgggcccagggcaacactgaagacatgggcaagagcatcccccaatacctggggcaactggacatccgcaaaagcgtagtcagcctggccacaggcgccggggcgatctacctgctctacaaggccatcaaggctggcataaaatgcaaaccacccctctgtagcaactcacccatctgcatcgcccgcctggcagtcgagcgagagcggcacgggcgggactcaggtgagctccggaggctcctcaactctttggagtgcaaacaggatgagtatgccaagagcatgatcctgcacagtatcactcgctgtgtgtacttgctggaggctgaggcctctgcttgtactacggatgacatcgtgttgctgggctacatgctggatgacaaggacaacagtgtcaaaacccaagctctgaatacacttaaagctttctctggcatcagaaaattcaggctcaaaatccaggaacactccatcaaagtactcgaactgatctccaccatctgggacacggaactgcacattgcgggcctcagactcctcaacaaccttccactgcccgactatgtgcatccacagctgcgacgggtgatgcctgccttgatggagatcctgcagtcagactacatcctggcacaggtgcaagccgtacgactgctgagctacctggcacagaagaatgaccttctctatgacattctcaactgccagcccacacagtcagggagtctcctgtatgaggtactggtgtttgctgagcggctgagtgagggccggaacgcaccccactaccacgtggtgaaatggcattacaacgaacagtccctgcatgaatccctctttggggaagagtcccgactggcagaccgactacttgccctggtcatccaccctgaggaagatgttcagatccaggcctgcaaggtcattgtcagcctgcagtatccccaggacttgagagcccggccctcctcctgccagcccagtcgttcctactttaaaaacacggaataaaattaaggagagccaataaatgagtataggagagaaacttg

SEQ ID NO: 108769 - DNA, 480 bp, Homo sapiens
  Payload ID: 1371
  Gene Symbol: ARMC12
  Gene Name: armadillo repeat containing 12
  ENST ID: ENST00000471400
  CDS Start-End: 18-185
agggcaacactgaagacatgggcaagagcatcccccaatacctggggcaactggacatccgcaaaagcgtagtcagcctggccacaggcgccggggcgatctacctgctctacaaggccatcaaggctggcataaaatgcaaaccacccctctgtagcaactcacccatctgcatcgccccctgaactgggctggggtggctgtctaggcctggcagtcgagcgagagcggcacgggcgggactcaggtgagctccggaggctcctcaactctttggagtgcaaacaggatgagtatgccaagagcatgatcctgcacagtatcactcgctgtgtgtacttgctggaggctgaggcctctgcttgtactacggatgacatcgtgttgctgggctacatgctggatgacaaggacaacagtgtcaaaacccaagctctgaatacacttaaagctttctctggcatcagaaaattcaggctc

SEQ ID NO: 108770 - DNA, 836 bp, Homo sapiens
  Payload ID: 1372
  Gene Symbol: ARMC2
  Gene Name: armadillo repeat containing 2
  ENST ID: ENST00000237512
  CDS Start-End: 169-836
gctggctgcggggcgaagtgggagggtggccgggcggggtgaggatgctgctgcgccctgccctggccgggaccgtggaggagcgggcactgccgtgggtgggggagccgctgtccgagcgggagggtgtggtgtctatctgaagaatattttactttcaaaggaaagatgctgtctccaaatgataaaatgttaggaaaactggatccattttatcaaccttcagtgtccaagcagaagaccagtgcagaaatcataagtgaagcaagaaatgcattaagaacagttagaacccaaagaccatttacaccacaggaggctcaaagaaaactattcggacctgcatcctcaagaacatcagaaaatagacctccttcctccttcagcctccatgcatccagttttgagtcatctgattccaggcctatctctggcacacgtcttagtccactagagctgaaaccgaaagttccagcatctcccaccagagaggaggattcctgcttttcctttcctaagcccccagtggaccctgcgaagattagaagagtaagcaacgccagggctcgcttattcagggctgcctcccagcgggcccttctgccggacagatcccttcctccctccgactcaaagaagacagtggaatccaaagaaacagttatgatgggggactctatggtgaaaataaatgggatttatttaacaaaatcaaatgctatttgccacttaaagagtcacccacttcagctaactgatgatggaggcttcagtgaaataaaggagcaagaaatgttcaaaggaacaacatctttaccatctcatctcaagaatgg

SEQ ID NO: 108771 - DNA, 3663 bp, Homo sapiens
  Payload ID: 1372
  Gene Symbol: ARMC2
  Gene Name: armadillo repeat containing 2
  Uniprot ID: Q8NEN0
  ENST ID: ENST00000368972
  CDS Start-End: 597-2705
aggcccagtggccgagcggcgtcgtggggttaccccgcccgcgccagcgctgcatccctggccgctacccggggagagccggaggatgaattgaacctcgcagccgctgctatctccagtgctcatcacagggtgtggtgtctatctgaagaatattttactttcaaaggaaagatgctgtctccaaatgataaaatgttaggaaaactggatccattttatcaaccttcagtgtccaagcagaagaccagtgcagaaatcataagtgaagcaagaaatgcattaagaacagttagaacccaaagaccatttacaccacaggaggctcaaagaaaactattcggacctgcatcctcaagaacatcagaaaatagacctccttcctccttcagaaaccgaaagttccagcatctcccaccagagaggaggattcctgcttttcctttcctaagcccccagtggaccctgcgaagattagaagagtaagcaacgccagggctcgcttattcagggctgcctcccagcgggcccttctgccggacagatcccttcctccctccgactcaaagaagacagtggaatccaaagaaacagttatgatgggggactctatggtgaaaataaatgggatttatttaacaaaatcaaatgctatttgccacttaaagagtcacccacttcagctaactgatgatggaggcttcagtgaaataaaggagcaagaaatgttcaaaggaacaacatctttaccatctcatctcaagaatggaggggaccaggggaagagacatgcgagggcctcatcatgccccagtagctcagacctgagcaggctgcaaaccaaagcagtcccaaaagctgacctgcaagaagaggacgcagaaatagaagtagacgaagtcttttggaatacaaggattgtaccgattttgcgtgaattagaaaaggaagaaaacattgaaacggtttgtgctgcttgcacacaacttcatcatgctttagaggaaggaaacatgcttggaaataaatttaagggaagaagtattctcctgaagaccctgtgtaaactagttgatgttggttcagactcgctcagccttaaacttgcaaaaataattctagcacttaaagtgagtagaaagaatcttcttaatgtctgcaaacttatatttaaaattagcaggaatgagaagaatgattctttgattcaaaatgacagcattctggaatcattattggaggtactaagaagtgaagacctgcaaactaacatggaagcttttttatactgtatggggtctataaagttcatttctggaaatctgggatttcttaatgaaatgatcagcaaaggtgctgtggaaatactgataaatttgataaaacaaataaatgagaacatcaagaaatgtggtacatttttgcctaattcgggccacttgctagtccaggtgactgctacattgagaaacttggttgattcatcattagtaagaagtaagttcctaaacatcagtgcccttccccagctctgcacggcaatggaacagtacaagggtgacaaggacgtctgtaccaatattgccagaatattcagcaaacttacttcttaccgtgactgctgcacagccttggccagctattccagatgttatgccttatttctgaatctaattaacaaataccagaagaagcaggatttagtcgtccgtgttgtttttattcttggcaacctgacggcaaaaaataaccaggctcgtgaacaattttccaaagagaaagggagcatccaaactctgctgtcattattccagacgttccatcagctggatctgcattcccagaagccggtgggccaacgaggcgagcagcacagggcgcagaggccgccgtcagaggcagaggacgtgctcatcaagctgactcgtgtgctggccaacattgccatccacccgggcgtgggcccggtgctggccgccaacccggggatagtgggcctgctcctgaccacgctggaatacaagtcacttgatgattgtgaggagctggtgatcaatgctacagcgacaatcaacaatttatcttactaccaagtgaagaattccataattcaagacaaaaagctatatattgctgaattgctcttaaagcttcttgtcagtaacaacatggatggaatcctggaggctgtgcgtgttttcggaaatctctcccaggaccatgatgtctgcgatttcattgtgcagaacaatgtccacaggttcatgatggcgctgctggatgctcagcatcaggatatctgcttttctgcctgtggtgttctcctcaatctcactgtggataaagacaagcgtgtcatcttgaaagaaggaggtggcattaaaaagttagtggactgtttaagagatttgggtcctactgattggcagctggcctgcttggtttgtaaaactttatggaacttcagtgaaaacatcactaatgcttcgtcatgttttggaaatgaagacaccaacacactcttactcttgctctcatcatttttagatgaagaactagcactggatggcagttttgatccagacctaaaaaactatcacaaactccattgggaaacagaattcaaacctgtggcacagcagcttctaaaccgaattcagagacatcacaccttcctggaacccctgcccattccctctttctaacatgatgcagattaacagtagaaacgagaactcacgtctccctcattcttaagaactggtaacaaacgtgaacatttttttcagcattaacaaatgtggaaagtttttcaagaactggttttagtgagtagctgaagtattttttaaaattaagcatttcttcttgttaggtattatggaaaaatgaatatacacattatatttcctgttgagagaaatgtaagatgaaaatatgtgcattttcaagtaaatgactttttcttctattctctattaaacaatttagttctagtcttaaaatcttgatttaacaattttggaattgaagtgttcataagttaaatgaactgtgcaatgaaggctgttagattatatagaaagaagggtaggcaacatgagtggaacacgttacaacataggatctgtactaattcttactatgtcaaataataaatgctctcattaggtaccagtatttttttggtctttatattaagagaaggagtaagcagaaaaacttaaagaaaactgctttgggccatctgttctttattaaataagtaaaatagataaaatgagagtatattttcatttgaaataaaatgactggactaagacagtccttctaattgtaactctctgtgtttgacaggtgaggtaatgtattagaaagaatgcaggcttaggtgaatggtatacctgaatctgaatccatgctctcccctgctagctttgtgggcctggagcaagtaacttaatttcttgagctgcaactgcaaaatgggaatcatatcaattttactgtagtgtagtttggaacaaaccattaaatgggcaaatggcccagtccagtgtatcatgtggagtgggtgttcaagaacattatgatggcaagcactttcttagcttgccatcctttgtaggatgagtttggcctttgaataaatgattaaagagc

SEQ ID NO: 108772 - DNA, 3241 bp, Homo sapiens
  Payload ID: 1372
  Gene Symbol: ARMC2
  Gene Name: armadillo repeat containing 2
  Uniprot ID: Q8NEN0
  ENST ID: ENST00000392644
  CDS Start-End: 169-2772
agtggccgagcggcgtcgtggggttaccccgcccgcgccagcgctgcatccctggccgctacccggggagagccggaggatgaattgaacctcgcagccgctgctatctccagtgctcatcacagggtgtggtgtctatctgaagaatattttactttcaaaggaaagatgctgtctccaaatgataaaatgttaggaaaactggatccattttatcaaccttcagtgtccaagcagaagaccagtgcagaaatcataagtgaagcaagaaatgcattaagaacagttagaacccaaagaccatttacaccacaggaggctcaaagaaaactattcggacctgcatcctcaagaacatcagaaaatagacctccttcctccttcagcctccatgcatccagttttgagtcatctgattccaggcctatctctggcacacgtcttagtccactagagctgaaaccgaaagttccagcatctcccaccagagaggaggattcctgcttttcctttcctaagcccccagtggaccctgcgaagattagaagagtaagcaacgccagggctcgcttattcagggctgcctcccagcgggcccttctgccggacagatcccttcctccctccgactcaaagaagacagtggaatccaaagaaacagttatgatgggggactctatggtgaaaataaatgggatttatttaacaaaatcaaatgctatttgccacttaaagagtcacccacttcagctaactgatgatggaggcttcagtgaaataaaggagcaagaaatgttcaaaggaacaacatctttaccatctcatctcaagaatggaggggaccaggggaagagacatgcgagggcctcatcatgccccagtagctcagacctgagcaggctgcaaaccaaagcagtcccaaaagctgacctgcaagaagaggacgcagaaatagaagtagacgaagtcttttggaatacaaggattgtaccgattttgcgtgaattagaaaaggaagaaaacattgaaacggtttgtgctgcttgcacacaacttcatcatgctttagaggaaggaaacatgcttggaaataaatttaagggaagaagtattctcctgaagaccctgtgtaaactagttgatgttggttcagactcgctcagccttaaacttgcaaaaataattctagcacttaaagtgagtagaaagaatcttcttaatgtctgcaaacttatatttaaaattagcaggaatgagaagaatgattctttgattcaaaatgacagcattctggaatcattattggaggtactaagaagtgaagacctgcaaactaacatggaagcttttttatactgtatggggtctataaagttcatttctggaaatctgggatttcttaatgaaatgatcagcaaaggtgctgtggaaatactgataaatttgataaaacaaataaatgagaacatcaagaaatgtggtacatttttgcctaattcgggccacttgctagtccaggtgactgctacattgagaaacttggttgattcatcattagtaagaagtaagttcctaaacatcagtgcccttccccagctctgcacggcaatggaacagtacaagggtgacaaggacgtctgtaccaatattgccagaatattcagcaaacttacttcttaccgtgactgctgcacagccttggccagctattccagatgttatgccttatttctgaatctaattaacaaataccagaagaagcaggatttagtcgtccgtgttgtttttattcttggcaacctgacggcaaaaaataaccaggctcgtgaacaattttccaaagagaaagggagcatccaaactctgctgtcattattccagacgttccatcagctggatctgcattcccagaagccggtgggccaacgaggcgagcagcacagggcgcagaggccgccgtcagaggcagaggacgtgctcatcaagctgactcgtgtgctggccaacattgccatccacccgggcgtgggcccggtgctggccgccaacccggggatagtgggcctgctcctgaccacgctggaatacaagtcacttgatgattgtgaggagctggtgatcaatgctacagcgacaatcaacaatttatcttactaccaagtgaagaattccataattcaagacaaaaagctatatattgctgaattgctcttaaagcttcttgtcagtaacaacatggatggaatcctggaggctgtgcgtgttttcggaaatctctcccaggaccatgatgtctgcgatttcattgtgcagaacaatgtccacaggttcatgatggcgctgctggatgctcagcatcaggatatctgcttttctgcctgtggtgttctcctcaatctcactgtggataaagacaagcgtgtcatcttgaaagaaggaggtggcattaaaaagttagtggactgtttaagagatttgggtcctactgattggcagctggcctgcttggtttgtaaaactttatggaacttcagtgaaaacatcactaatgcttcgtcatgttttggaaatgaagacaccaacacactcttactcttgctctcatcatttttagatgaagaactagcactggatggcagttttgatccagacctaaaaaactatcacaaactccattgggaaacagaattcaaacctgtggcacagcagcttctaaaccgaattcagagacatcacaccttcctggaacccctgcccattccctctttctaacatgatgcagattaacagtagaaacgagaactcacgtctccctcattcttaagaactggtaacaaacgtgaacatttttttcagcattaacaaatgtggaaagtttttcaagaactggttttagtgagtagctgaagtattttttaaaattaagcatttcttcttgttaggtattatggaaaaatgaatatacacattatatttcctgttgagagaaatgtaagatgaaaatatgtgcattttcaagtaaatgactttttcttctattctctattaaacaatttagttctagtcttaaaatcttgatttaacaattttggaattgaagtgttcataagttaaatgaactgtgcaatgaaggctgttagattatatagaaagaagggtaggcaacatgagtggaacacgttacaacataggatctgtactaattcttactatgtcaaataataaatgctctcattaggta

SEQ ID NO: 108773 - DNA, 555 bp, Homo sapiens
  Payload ID: 1372
  Gene Symbol: ARMC2
  Gene Name: armadillo repeat containing 2
  ENST ID: ENST00000414610
  CDS Start-End: 1-257
cccttcctccctccgactcaaagaagacagtggaatccaaagaaacagttatgatgggggactctatggtgaaaataaatgggatttatttaacaaaatcaaatgctatttgccacttaaagagtcacccacttcagctaactgatgatggaggcttcagtgaaataaaggagcaagaaatgttcaaaggaacaacatctttaccatctcatctcaagaatggaggccctcactgtagattgtggaatgatgactaaggcttgaaagccttactaataaactatcgagtgctcttagtattgttggaatcaaaaataagaaaagagggcttctggttaaaggcacaaaggcattctccagtaatccaatgaaagcagcaaagaatgaaaaacagagaagtaaatttcatcaatgaaacaacaacaaaaaaatggctacgaccctgaactacacaacatgaagcaaactttacactgcagtataggcttgatttttgttggtctgtctagcaaacaggccttctcacattgtgtaataaatgctgctcagtccgta

SEQ ID NO: 108774 - DNA, 2811 bp, Homo sapiens
  Payload ID: 1373
  Gene Symbol: ARMC3
  Gene Name: armadillo repeat containing 3
  Uniprot ID: Q5W041
  ENST ID: ENST00000298032
  CDS Start-End: 85-2703
tagcaacgaggcacaacaagggactgggggttcgtctgctgggtttgcggagcagctagctactcggcgggatctcccggcaggatgggtaaaaagataaagaaggaagtagagcctcctcctaaggatgtgtttgacccattaatgattgaaagcaaaaaagcagcaactgtggtgttaatgcttaattctccagaagaggaaattttggctaaagcatgtgaagccatttataaatttgctttaaaaggtgaggaaaataaaacaaccctccttgaacttggagctgtggaacctttaactaagctactcacccatgaagacaaaattgtaagaagaaatgctactatgatatttggaatcctggcttctaataatgatgttaaaaaattgttaagggagttagatgtcatgaattctgtcattgcccagctcgctccagaagaagaagtagttatccatgagtttgctagtctttgtctagcaaacatgtctgcagagtacaccagtaaagtgcaaatatttgaacatgggggattagagccactcatcagactactgagtagccctgacccggatgtaaagaagaactctatggaatgcatttacaacttggtgcaggattttcagtgtcgagctaaacttcaagaactaaatgcaatacctcctatcttagatctcttgaagtcagaatatccagtgattcagttgttggctctcaaaaccttaggtgttattgcaaatgataaggagtctcgaacaatgctaagagacaatcaaggattggaccatcttattaagatcctagaaactaaggaattgaatgaccttcatatagaagcacttgcagtgatagccaattgccttgaagacatggatactatggtgcagattcagcagacagggggtcttaaaaagctcctgtcatttgcagaaaactctacaattcctgatattcagaagaatgcagcaaaagccattactaaagcagcttatgatcctgaaaatagaaaactttttcatgaacaagaggttgaaaagtgccttgtagcccttttgggttctgaaaatgatggaactaaaattgctgcttcccaagctatttcagcaatgtgtgagaattcaggcagcaaagattttttcaataatcaggggattccacagttaattcagttgctaaaaagtgacaatgaagaggtacgggaagcagcagctctagccctggcaaacctaaccacttgcaaccctgctaatgcaaacgctgctgctgaagctgatggtattgatccattaataaacctcctgtctagtaaacgagatggagccattgccaacgctgctacagtattaacaaacatggccatgcaggagcccctgcgcctgaacatacagaatcacgacatcatgcatgccatcatcagcccactgcgttctgcaaacacagtcgtgcagagcaaagctgctctcgctgtcaccgcaactgcgtgtgacgttgaagcccggactgagttaagaaattctggtggattggagcccctggtagagctgctacgctccaagaatgatgaagtgaggaagcacgccagttgggcagtgatggtctgtgctggtgacgagctgacggccaatgaattatgcaggctcggggctttagatatccttgaagaagttaacgtatcaggaactcggaaaaataaattcagtgaggcagcttataataagttgctcaataacaatctttccctgaaatacagccagactggctatttgtcatcaagtaacataattaacgatggattctatgattatggtcggataaatcccggcaccaaactgttgcctttgaaggagctctgcttacaagaaccaagtgacctacgggctgtactcttaatcaacagtaaatcttacgtttctccaccttcatctatggaagataaatcagatgttggttatggacgaagtatttcttcttcatcttccttaagaagatcaagtaaagaaaagaacaaaaaaaatagttatcattttagtgctggatttggatctcccatagaagacaaatcagagccagcttctggacgaaatactgttctcagcaaaagcgccaccaaagaaaaaggatggaggaaaagcaaaggaaaaaaagaagaggaaaaagtgaaagaggaggaagaggttatggtggtaccaaaatttgttggtgaaggaagctctgacaaagaatggtgtcctccctctgaccctgatttctctatgtatgtgtatgaggtgaccaaatcaatactgccaataaccaatattaaggaacagattgaggatctggcaaagtatgtagcagaaaaaatgggtggtaagattccaaaagagaaactacctgatttcagctgggaacttcacataagtgaactgaaatttcaacttaaatccaatgttataccgattggacatgtcaaaaaaggaatcttctaccatcgagctttgcttttcaaggctctggctgatagaattggcattggttgctccctagttcgcggagagtacggtagagcgtggaatgaagtcatgctgcagaatgactctcggaagggagtgattgggggcctccccgctcctgagatgtacgtgattgacctcatgttccatccaggtggactgatgaagttgagaagtcgagaggctgatctttacagattcatttaagccatcagacgaacacaagagaggctcaaacaagaaattcactgtgtacactctctaagacattctccaaattgattttatctctttaaataaaaactttaaataaaa

SEQ ID NO: 108775 - DNA, 3258 bp, Homo sapiens
  Payload ID: 1373
  Gene Symbol: ARMC3
  Gene Name: armadillo repeat containing 3
  ENST ID: ENST00000376528
  CDS Start-End: 385-2214
tagcaacgaggcacaacaagggactgggggttcgtctgctgggtttgcggagcagctagctactcggcgggatctcccggcaggatgggtaaaaagataaagaaggaagtagagcctcctcctaaggatgtggtgaggaaaataaaacaaccctccttgaacttggagctgtggaacctttaactaagctactcacccatgaagacaaaattgtaagaagaaatgctactatgatatttggaatcctggcttctaataatgatgttaaaaaattgttaagggagttagatgtcatgaattctgtcattgcccagctcgctccagaaggaattgaatgaccttcatatagaagcacttgcagtgatagccaattgccttgaagacatggatactatggtgcagattcagcagacagggggtcttaaaaagctcctgtcatttgcagaaaactctacaattcctgatattcagaagaatgcagcaaaagccattactaaagcagcttatgatcctgaaaatagaaaactttttcatgaacaagaggttgaaaagtgccttgtagcccttttgggttctgaaaatgatggaactaaaattgctgcttcccaagctatttcagcaatgtgtgagaattcaggcagcaaagattttttcaataatcaggggattccacagttaattcagttgctaaaaagtgacaatgaagaggtacgggaagcagcagctctagccctggcaaacctaaccacttgcaaccctgctaatgcaaacgctgctgctgaagctgatggtattgatccattaataaacctcctgtctagtaaacgagatggagccattgccaacgctgctacagtattaacaaacatggccatgcaggagcccctgcgcctgaacatacagaatcacgacatcatgcatgccatcatcagcccactgcgttctgcaaacacagtcgtgcagagcaaagctgctctcgctgtcaccgcaactgcgtgtgacgttgaagcccggactgagttaagaaattctggtggattggagcccctggtagagctgctacgctccaagaatgatgaagtgaggaagcacgccagttgggcagtgatggtctgtgctggtgacgagctgacggccaatgaattatgcaggctcggggctttagatatccttgaagaagttaacgtatcaggaactcggaaaaataaattcagtgaggcagcttataataagttgctcaataacaatctttccctgaaatacagccagactggctatttgtcatcaagtaacataattaacgatggattctatgattatggtcggataaatcccggcaccaaactgttgcctttgaaggagctctgcttacaagaaccaagtgacctacgggctgtactcttaatcaacagtaaatcttacgtttctccaccttcatctatggaagataaatcagatgttggttatggacgaagtatttcttcttcatcttccttaagaagatcaagtaaagaaaagaacaaaaaaaatagttatcattttagtgctggatttggatctcccatagaagacaaatcagagccagcttctggacgaaatactgttctcagcaaaagcgccaccaaagaaaaaggatggaggaaaagcaaaggaaaaaaagaagaggaaaaagtgaaagaggaggaagaggttatggtggtaccaaaatttgttggtgaaggaagctctgacaaagaatggtgtcctccctctgaccctgatttctctatgtatgtgtatgaggtgaccaaatcaatactgccaataaccaatattaaggaacagattgaggatctggcaaagtatgtagcagaaaaaatgggtggtaagattccaaaagagaaactacctgatttcagctgggaacttcacataagtgaactgaaatttcaacttaaatccaatgttataccgattggacatgtcaaaaaaggaatcttctaccatcgagctttgcttttcaaggctctggctgatagaattggcattggttgctccctagttcgcggagagtacggtagagcgtggaatgaagtcatgctgcagaatgactctcggaagggagtgattgggggcctccccgctcctgagatgtacgtgattgacctcatgttccatccaggtggactgatgaagttgagaagtcgagaggctgatctttacagattcatttaagccatcagacgaacacaagagaggctcaaacaagaaattcactgtgtacactctctaagacattctccaaattgattttatctctttaaataaaaactttaaataaaagtattagaaatgttttctctgcgtagaaattaggaagcttggagtgaactttgctgtgcttctgatttcaggcttttggcaagagttctgtcttattaggtcattttccgctcactgaccctcacataaagctgattgttgtcgaaattcatccagcccactgtgtcctgaggagcgtctctgtcatttaggaatcacatgtagcactcagctgctgcacccaggacaacactgtggcctcatgactgtcatctttcatgcccagaatgcttcaggcatgctcagttaagcaaactaagtgaatttttagtatttgcaatcaccttgtctcagtttcatttaagattttgatagtttagatagaataaacacagatctgagtgttacaaattcctttctaaaaatttttgtttctatttttaaaaattcatcattaaaaacactttaatatagtgaattaaaaatatttctaaagtatatttccataaaatggttttggtttcatcttgtctgtgttagcttggaaacataccttcagctaaaaacaattctgatttgctcttccacattttaatgctgggccattaatatattattttcaatttatagaactaaaaaatttttattttttggaaaactttgaagcataaaggtagagcaaatctttgctgaggaattgtgttttagtattgagcacaaaatggggagtaaattcacatttcaaatgataagacaaaaactactaatgtggttaatctcgtgaagtacatattgcctagtcacgcttaaagtccagtgttgacctgtatagtcattttcctagaagacgttttaaagtgaatttgattttagaaattaaagctaagattattttgtattaatttgtaatttcaaataatataattctttatttcagaataaatttatttcaaatgg

SEQ ID NO: 108776 - DNA, 2779 bp, Homo sapiens
  Payload ID: 1373
  Gene Symbol: ARMC3
  Gene Name: armadillo repeat containing 3
  Uniprot ID: Q5W041
  ENST ID: ENST00000409983
  CDS Start-End: 72-2669
caacaagggactgggggttcgtctgctgggtttgcggagcagctagctactcggcgggatctcccggcaggatgggtaaaaagataaagaaggaagtagagcctcctcctaaggatgtgtttgacccattaatgattgaaagcaaaaaagcagcaactgtggtgttaatgcttaattctccagaagaggaaattttggctaaagcatgtgaagccatttataaatttgctttaaaaggtgaggaaaataaaacaaccctccttgaacttggagctgtggaacctttaactaagctactcacccatgaagacaaaattgtaagaagaaatgctactatgatatttggaatcctggcttctaataatgatgttaaaaaattgttaagggagttagatgtcatgaattctgtcattgcccagctcgctccagaagaagaagtagttatccatgagtttgctagtctttgtctagcaaacatgtctgcagagtacaccagtaaagtgcaaatatttgaacatgggggattagagccactcatcagactactgagtagccctgacccggatgtaaagaagaactctatggaatgcatttacaacttggtgcaggattttcagtgtcgagctaaacttcaagaactaaatgcaatacctcctatcttagatctcttgaagtcagaatatccagtgattcagttgttggctctcaaaaccttaggtgttattgcaaatgataaggagtctcgaacaatgctaagagacaatcaaggattggaccatcttattaagatcctagaaactaaggaattgaatgaccttcatatagaagcacttgcagtgatagccaattgccttgaagacatggatactatggtgcagattcagcagacagggggtcttaaaaagctcctgtcatttgcagaaaactctacaattcctgatattcagaagaatgcagcaaaagccattactaaagcagcttatgatcctgaaaatagaaaactttttcatgaacaagaggttgaaaagtgccttgtagcccttttgggttctgaaaatgatggaactaaaattgctgcttcccaagctatttcagcaatgtgtgagaattcaggcagcaaagattttttcaataatcaggggattccacagttaattcagttgctaaaaagtgacaatgaagaggtacgggaagcagcagctctagccctggcaaacctaaccacttgcaaccctgctaatgcaaacgctgctgctgaagctgatggtattgatccattaataaacctcctgtctagtaaacgagatggagccattgccaacgctgctacagtattaacaaacatggccatgcaggagcccctgcgcctgaacatacagaatcacgacatcatgcatgccatcatcagcccactgcgttctgcaaacacagtcgtgcagagcaaagctgctctcgctgtcaccgcaactgcgtgtgacgttgaagcccggactgagttaagaaattctggtggattggagcccctggtagagctgctacgctccaagaatgatgaagtgaggaagcacgccagttgggcagtgatggtctgtgctggtgacgagctgacggccaatgaattatgcaggctcggggctttagatatccttgaagaagttaacgtatcaggaactcggaaaaataaattcagtgaggcagcttataataagttgctcaataacaatctttccctgaaatacagccagactggctatttgtcatcaagtaacataattaacgatggattctatgattatggtcggataaatcccggcaccaaactgttgcctttgaaggagctctgcttacaagaaccaagtgacctacgggctgtactcttaatcaacagtaaatcttacgtttctccaccttcatctatggaagataaatcagatgttggttatggacgaagtatttcttcttcatcttccttaagaagatcaagtaaagaaaagaacaatgctggatttggatctcccatagaagacaaatcagagccagcttctggacgaaatactgttctcagcaaaagcgccaccaaagaaaaaggatggaggaaaagcaaaggaaaaaaagaagaggaaaaagtgaaagaggaggaagaggttatggtggtaccaaaatttgttggtgaaggaagctctgacaaagaatggtgtcctccctctgaccctgatttctctatgtatgtgtatgaggtgaccaaatcaatactgccaataaccaatattaaggaacagattgaggatctggcaaagtatgtagcagaaaaaatgggtggtaagattccaaaagagaaactacctgatttcagctgggaacttcacataagtgaactgaaatttcaacttaaatccaatgttataccgattggacatgtcaaaaaaggaatcttctaccatcgagctttgcttttcaaggctctggctgatagaattggcattggttgctccctagttcgcggagagtacggtagagcgtggaatgaagtcatgctgcagaatgactctcggaagggagtgattgggggcctccccgctcctgagatgtacgtgattgacctcatgttccatccaggtggactgatgaagttgagaagtcgagaggctgatctttacagattcatttaagccatcagacgaacacaagagaggctcaaacaagaaattcactgtgtacactctctaagacattctccaaattgattttatctctttaaataaaaactttaaataaaagt

SEQ ID NO: 108777 - DNA, 2479 bp, Homo sapiens
  Payload ID: 1373
  Gene Symbol: ARMC3
  Gene Name: armadillo repeat containing 3
  Uniprot ID: Q5W041
  ENST ID: ENST00000409049
  CDS Start-End: 45-2111
gggtttgcggagcagctagctactcggcgggatctcccggcaggatgggtaaaaagataaagaaggaagtagagcctcctcctaaggatgtgtttgacccattaatgattgaaagcaaaaaagcagcaactgtggtgttaatgcttaattctccagaagaggaaattttggctaaagcatgtgaagccatttataaatttgctttaaaaggtgaggaaaataaaacaaccctccttgaacttggagctgtggaacctttaactaagctactcacccatgaagacaaaattgtaagaagaaatgctactatgatatttggaatcctggcttctaataatgatgttaaaaaattgttaagggagttagatgtcatgaattctgtcattgcccagctcgctccagaagaagaagtagttatccatgagtttgctagtctttgtctagcaaacatgtctgcagagtacaccagtaaagtgcaaatatttgaacatgggggattagagccactcatcagactactgagtagccctgacccggatgtaaagaagaactctatggaatgcatttacaacttggtgcaggattttcagtgtcgagctaaacttcaagaactaaatgcaatacctcctatcttagatctcttgaagtcagaatatccagtgattcagttgttggctctcaaaaccttaggtgttattgcaaatgataaggagtctcgaacaatgctaagagacaatcaaggattggaccatcttattaagatcctagaaactaaggaattgaatgaccttcatatagaagcacttgcagtgatagccaattgccttgaagacatggatactatggtgcagattcagcagacagggggtcttaaaaagctcctgtcatttgcagaaaactctacaattcctgatattcagaagaatgcagcaaaagccattactaaagcagcttatgatcctgaaaatagaaaactttttcatgaacaagaggttgaaaagtgccttgtagcccttttgggttctgaaaatgatggaactaaaattgctgcttcccaagctatttcagcaatgtgtgagaattcaggcagcaaagattttttcaataatcaggggattccacagttaattcagttgctaaaaagtgacaatgaagaggtacgggaagcagcagctctagccctggcaaacctaaccacttgcaaccctgctaatgcaaacgctgctgctgaagctgatggtattgatccattaataaacctcctgtctagtaaacgagatggagccattgccaacgctgctacagtattaacaaacatggccatgcaggagcccctgcgcctgaacatacagaatcacgacatcatgcatgccatcatcagcccactgcgttctgcaaacacagtcgtgcagagcaaagctgctctcgctgtcaccgcaactgcgtgtgacgttgaagcccggactgagttaagaaattctggtggattggagcccctggtagagctgctacgctccaagaatgatgaagtgaggaagcacgccagttgggcagtgatggtctgtgctggtgacgagctgacggccaatgaattatgcaggctcggggctttagatatccttgaagaagttaacgtatcaggaactcggaaaaataaattcagtgaggcagcttataataagttgctcaataacaatctttccctgaaatacagccagactggctatttgtcatcaagtaacataattaacgatggattctatgattatggtcggataaatcccggcaccaaactgttgcctttgaaggagctctgcttacaagaaccaagtgacctacgggctgtactcttaatcaacagtaaatcttacgtttctccaccttcatctatggaagataaatcagatgttggttatggacgaagtatttcttcttcatcttccttaagaagatcaagtaaagaaaagaacaaaaaaaatagttatcattttagtgctggatttggatctcccatagaagacaaatcagagccagcttctggacgaaatactgttctcagcaaaagcgccaccaaagaaaaaggatggagctcactccccacttcaagataaaccctgaagcactcctaggatttaagaggattgttggcatgaggagaacacagagactttggattcagacacaactgggccttggtcttctgaattgtaaatgaaaatgatgatccctgcctcaaagagctgctgtaagaggagagatggtgtcaggaaagtgcctgaccatcacctagcacacttaggggctcaatgtgcgtcccttctctcttcccttcttagcctttggtccattgaggggtagattagccatagccctgttgtcctgttgcctgtcttttggtcaacccttcttgtcttatgactattaaaactttggactcctggaaatagaataaaatattttaactgcattcgtctgaaaa

SEQ ID NO: 108778 - DNA, 525 bp, Homo sapiens
  Payload ID: 1373
  Gene Symbol: ARMC3
  Gene Name: armadillo repeat containing 3
  ENST ID: ENST00000447081
  CDS Start-End: 170-525
actcggcgggatctcccggcaggatgggtaaaaagataaagaaggaagtagagcctcctcctaaggatgtggtgaggaaaataaaacaaccctccttgaacttggagctgtggaacctttaactaagctactcacccatgaagacaaaattgtaagaagaaatgctactatgatatttggaatcctggcttctaataatgatgttaaaaaattgttaagggagttagatgtcatgaattctgtcattgcccagctcgctccagaagaagaagtagttatccatgagtttgctagtctttgtctagcaaacatgtctgcagagtacaccagtaaagtgcaaatatttgaacatgggggattagagccactcatcagactactgagtagccctgacccggatgtaaagaagaactctatggaatgcatttacaacttggtgcaggattttcagtgtcgagctaaacttcaagaactaaatgcaatacctcctatcttagatctcttgaagtcagaatatccagtgat

SEQ ID NO: 108779 - DNA, 3572 bp, Homo sapiens
  Payload ID: 1374
  Gene Symbol: ARMC4
  Gene Name: armadillo repeat containing 4
  Uniprot ID: Q5T2S8
  ENST ID: ENST00000305242
  CDS Start-End: 94-3228
atacggtgcaacgggtccgcgggaatcttggatgcgcggaggtcccgagaccaggtgcgtgtgctaagctcaggtctgagcacggtggatcccatgggtgtggctctgaggaaattgacgcagtggactgctgccggacatggaactggaatcctcgaaatcacccctctaaatgaagcgatattgaaagaaattattgtgtttgtggagagttttatctataaacatcctcaagaggcaaaatttgtttttgtggaaccacttgaatggaacacaagtttggcgccctcagcatttgaatcaggttatgttgtcagtgaaacaacagtcaaatcagaagaagttgataaaaatggacagcctttgctatttctctctgtaccacaaattaaaattaggagctttgggcagctgtcacgcttgttacttattgccaaaactgggaagttgaaggaagcccaagcatgtgttgaagctaacagagaccccatagtaaaaatcctgggctctgattataatacaatgaaagaaaactcaattgcattaaatattcttggcaaaattaccagagatgatgatcctgaaagtgaaattaagatgaagattgctatgctgcttaagcaattggatctgcacctcctcaatcattctctaaaacatatttcattagaaataagtttaagtcccatgacggtgaagaaggatatagaactgctcaaacgtttctcaggaaaaggaaaccaaacagtcttggaatctattgaatatacctcagattatgaattttcaaatggatgtcgagccccaccgtggagacaaattcgtggggaaatttgttatgtgctggtgaaacctcacgatggtgagactctgtgcattacttgcagtgcaggaggagtatttttaaatggtggcaaaacagatgatgaaggggacgttaattatgagagaaaaggttcaatttataaaaaccttgtcacatttttaagagaaaaatcaccaaaattttcagaaaatatgtctaaattgggaattagcttcagtgaagaccagcaaaaggaaaaggatcagcttggcaaagcccccaagaaggaagaagcagctgccctccgcaaagacatttctggttcagacaaaaggtcactggagaagaaccaaattaatttttggaggaatcaaatgaccaagagatgggaaccaagcttaaactggaagaccactgttaattacaaaggcaaaggctcagcaaaagaaatccaagaggacaaacacacaggaaaacttgaaaaaccaagaccatctgtttcacacggaagagcacaattacttcggaagagtgctgaaaagattgaggaaactgttagcgatagctcctcagaaagtgaggaagatgaagaaccacctgaccatcgtcaggaagcaagtgcagatttgccatcagaatattggcaaattcagaagctggtgaaatatttaaagggaggaaatcaaacagctacagtgattgcgttgtgttcaatgagggatttcagcttagctcaagaaacctgccagttggccatcagagatgttggaggcctggaagtgctgataaatttgcttgaaaccgatgaagtcaaatgtaagattggttcattaaaaatactgaaggaaatcagtcataatcctcaaatcagacagaatattgttgaccttgggggcttaccaattatggtgaatatacttgattctccacacaagagtctaaaatgtttggcagccgagactatcgcgaatgttgccaagtttaaaagagcacggcgggtggtgaggcagcacgggggtatcaccaaactggttgctctactagactgtgcacatgattccacaaaacctgcccaatcgagtctgtatgaggccagagacgtggaagtggctcgctgtggggcactggccctgtggagctgcagtaagagtcatacgaataaagaagccatccgcaaagctgggggcattcctctgttggctcggctgctgaagacttctcatgaaaacatgctaattccagtggtggggacattgcaagagtgtgcatcagaggaaaactaccgggctgcaatcaaagcagaaaggatcattgaaaaccttgtcaagaacctaaatagtgagaatgagcagctgcaggagcactgcgccatggccatttaccagtgtgctgaagataaggaaacccgggacctcgttaggctgcacggaggacttaagcccttggccagtctactcaataacactgacaataaagagcggttagctgctgtcacaggggctatatggaaatgttccatcagcaaagagaatgttaccaagtttcgggaatacaaagccattgaaaccttggtgggacttctaacagatcagcctgaagaagtacttgtgaatgtggttggggccttgggagaatgctgccaagaacgtgaaaaccgagtcattgtccggaaatgtggtggcattcaaccacttgtgaacctccttgttggaataaaccaagctcttcttgtgaatgttacaaaagcagttggtgcttgtgcagtagaacctgaaagtatgatgataattgatcgcttagatggagttcgtttgttgtggtccctgctgaaaaatcctcacccagacgtgaaggccagcgcagcatgggcactctgtccatgcatcaaaaatgcaaaggatgctggggaaatggttcgttcctttgttggtggtttggaacttattgtcaatttactgaaatcagataacaaagaagttctggcaagtgtatgtgctgccattaccaacatagcaaaagatcaagaaaatttagctgttatcacagatcatggagttgttcctttattgtccaaactggcaaatacaaataacaataaattgagacatcatctagcagaagctatttcacgttgctgtatgtggggcaggaatagagtggccttcggtgagcacaaagcagtggctccactagtgcgttatctgaaatcaaatgacaccaacgtgcatcgggcgacagctcaggccttgtaccaactctcagaagacgccgataactgcatcaccatgcatgagaatggtgcagtaaagcttctactggatatggttgggtcccctgaccaggatctccaggaagctgcagctggttgtatatccaatatccgcaggctggctcttgctacagagaaggcaagatacacttgaaatttaaatggacattacaagctatcaaattctacatgacacaggacatgtcactcccatggccagaaagcctaaattgggaaacagttgttagcaaaccctttcaaccatctaaatgaaaacacacaaattgaaaatgcacagaatgtttttcatctgaaaattgcatggagacttttgtttctatttaatgttttcgagatatgacatgtgataagatggaaagccaataaacctgtgataagtttctaagaatatgagaatatacgtatatgatgtatttttagttcagtgatgcttttgtatttgtggcgattttaataaaaaggatatggccttcccaa

SEQ ID NO: 108780 - DNA, 1737 bp, Homo sapiens
  Payload ID: 1374
  Gene Symbol: ARMC4
  Gene Name: armadillo repeat containing 4
  ENST ID: ENST00000434029
  CDS Start-End: 1-1170
ctgtcacgcttgttacttattgccaaaactgggaagttgaaggaagcccaagcatgtgttgaagctaacagagaccccatagtaaaaatcctgggctctgattataatacaatgaaagaaaactcaattgcattaaatattcttggcaaaattaccagagatgatgatcctgaaagtgaaattaagatgaagattgctatgctgcttaagcaattggatctgcacctcctcaatcattctctaaaacatatttcattagaaataagtttaagtcccatgacggtgaagaaggatatagaactgctcaaacgtttctcaggaaaaggaaaccaaacagtcttggaatctattgaatatacctcagattatgaattttcaaatggatgtcgagccccaccgtggagacaaattcgtggggaaatttgttatgtgctggtgaaacctcacgatggtgagactctgtgcattacttgcagtgcaggaggagtatttttaaatggtggcaaaacagatgatgaaggggacgttaattatgagagaaaaggttcaatttataaaaaccttgtcacatttttaagagaaaaatcaccaaaattttcagaaaatatgtctaaattgggaattagcttcagtgaagaccagcaaaaggaaaaggatcagcttggcaaagcccccaagaaggaagaagcagctgccctccgcaaagacatttctggttcagacaaaaggtcactggagaagaaccaaattaatttttggaggaatcaaatgaccaagagatgggaaccaagcttaaactggaagaccactgttaattacaaaggcaaaggctcagcaaaagaaatccaagaggacaaacacacaggaaaacttgaaaaaccaagaccatctgtttcacacggaagagcacaattacttcggaagagtgctgaaaagattgaggaaactgttagcgatagctcctcagaaagtgaggaagatgaagaaccacctgaccatcgtcaggaagcaagtgcagatttgccatcagaatattggcaaattcagaagctggtgaaatatttaaagcaaaaggaaacaagtcaaaatggcagaaacaaaagatggatcaggaagcagaataccagagtaattagaagcatgatctttgacgttggaaagaccagttgagttgaaattctgccgcttactcaatggccttgggtgatgatgctgtaccctaattctaaaggaagcaatgaacccccttttcagctaccttactgataagcacttatgttctgccttctgctatcctgatggttcaggttgtctgtcttactatctacttcttgagtagagagaccacattaaatttattgctgtatctcgcagggcatcttgctagtgtgcacaggctcgcctccctacctctgccccgatggtgtgaaggggagagggcgaggttccttagtggcagggctttgctgttcttcactctcagccccctgaaagcagttcttcctgcctctgagcctgtctttccttctgctgttaacttctttcctacttttcttgcatccctctctcttccttttcctgccgtctttcttgtagacatactagttgattgctgtatttgctgactttatatggatattattttttcctctggccaaaattgttttaaaatcttgcaaggaaaatgtcttgcttttgatcacttccagagattaaaggagatggtttgttaatgtc

SEQ ID NO: 108781 - DNA, 308 bp, Homo sapiens
  Payload ID: 1374
  Gene Symbol: ARMC4
  Gene Name: armadillo repeat containing 4
  ENST ID: ENST00000486279
  CDS Start-End: 138-308
ggtccttcaagaagttactatatgaatgcacttggggaaaccagagctaccagaatcatgttcttcagtcatcattgtgatgatgcagatattgtcacttgcgtgtgctaagctcaggtctgagcacggtggatcccatgggtgtggctctgaggaaattgacgcagtggactgctgccggacatggaactggaatcctcgaaatcacccctctaaatgaagcgatattgaaagaaattattgtgtttgtggagagttttatctataaacatcctcaagaggcaaaatttgtttttgtggaaccactt

SEQ ID NO: 108782 - DNA, 3612 bp, Homo sapiens
  Payload ID: 1375
  Gene Symbol: ARMC5
  Gene Name: armadillo repeat containing 5
  Uniprot ID: Q96C12
  ENST ID: ENST00000268314
  CDS Start-End: 530-3337
tcctctgaccgagcgagggctccccgtctgcggcgcggtcaggaccccgcactttcggcccggctcggggttctcggagtccgtcccaaggccgggccgcaccaccgctggggggcagcgaagcgagcctagaggagaaaaggcggtccccgccgagtgcacgccgggggcggggcacggcacgaaggctccgtggtcggacttctgggctgttcggaggccctggcccacctggagggccctggaagagtttccagcgcttcccgaggtaggcgtgagaagctcgacgcggaccacatctccctcatgcaccgcccgcacgtcccaggatgcgctgcgattaaggtactgccgcgcctcgtgtgcaaggacagacttccggggtcgagaactacaacttccgacttgcatcactgcggtggcgctaaacagcgtcagcgaggcggtgcccgacgatttccctgtcttccagttccgctccctgggatcagcggcgagaagcggggcggagtctgaggcccgagccaagatggcggctgcgaagccaaccctcacggactcgctctcgttctgcctcgcgcagctcgcggcggcggccggggaggctctgggtggggaaaaggacccagcgaccaacgagacacccctgagccgcgcgctcctagccctccgcacgcgccacatcaaggcagcggggggaatcgagcgcttccgggcacgcggcgggctccgccccctactcgcgctgctacggcgagcggctgcagcgggttccgccccgtcccaggcaggccccggctccgccccctcgtcggccgcgtcgggagcttctagccccgcccccgcgtcgggccccgccccctccgctgtgtcgtcgtctagtcctacgccgccagtgcgcctgcgcaagacgctggacttggcgctcagcatcctagccgattgctgtacggaaggggcgtgccggaccgaagtgcgcagactcggaggcatactccctttggtgaccattcttcagtgcatgaagacagacagcatccagaaccgaacggcccgtgccctggggaacttagccatggaacctgagagctgtggggacatccactgtgctggtgctgttcccctgcttgtggagagcctgacagcctgccaggactcgcagtgcctacagagcgtggtgcgtgccctccgtaacctggcagactcaccccagcaccgcctggccttggcacagcagggagcagtgcgtccgctggccgagctcctggccactgccccagatgctgcactgaccttagccctcgtccgtgccctcctggaactcagccgaggctgctcccgggcctgtgctgagcagctaagtctgggtgggggattgggcccactcgtcagcctggcttcccaccccaagcgggcagtacgcgagggaaccattctgatcctcgccaacctgtgtgcccagggcctgattcggcctgcactgggcaatgctggtggcgtggaggtgctggtagatgagctccggcagcgccgggatcctaatggagctagcccaacctcccagcagcccctggtgcgggctgtgtgcctcctatgtcgtgaggccatcaaccgggcccgactgcgggatgctggtggcttggatctactgatgggcctgctgcgggaccctcgtgcaagcgcatggcaccctcgtattgtggctgcccttgtggggtttctgtatgacactggggccctgggccggctgcaggctctgggacttgtgcctctcctggctgggcagctgtgtggtgaggctggtgaggaggaagaagagggaagagaagctgcttcctgggactttcctgaggagaggacccctgagcgggcacagggtggaagcttccggagcctcaggtcgtggctgatctccgagggctatgccacaggccctgatgacatctcccccgactggtctcctgagcagtgtccgccggagcccatggagccggccagccccgccccgaccccgacctcgctgcgggcaccacgcacccaacgcactccgggccgcagccccgccgccgccatcgaggagccttggggacgcgaagggccagccctgctgctgctgtcgcgcttttcccaggcccctgacccaagtggggcacttgtgaccggcccggcgctgtacggcctgctgacctatgtgaccggcgcaccgggcccgcccagcccacgtgcactgcgcattctgtcacgcctcacctgcaaccctgcctgcctcgaggccttcgtgcgcagctatggcgcggcgctgctgcgggcctggctggtgctgggggtggcgcctgacgattggccggcaccacgtgcccggcccactctccacagccggcaccgagagctgggggagaggctactgcagaacctgacggttcaggctgagtcgccctttggggttggggccctgacgcacctgctgctctctgggagccctgaggaccgagtggcctgcgcgctgaccctgcccttcatctgccggaagccctctctgtggcgccggctgcttctggagcagggtggtctccggctcctccttgcggcgctgacccggccggccccacacccgctcttcctcttctttgccgcggactccctttcctgcctccaagacctggtgtctcccactgtgagcccagctgtcccacaggcagtccccatggacctagactcaccttccccttgcctctatgaacctctgctgggcccagcccctgtcccagctcccgacctgcacttcctgctggactcaggcctccagctccctgcccagcgagcggcctcagccaccgcctcccctttcttccgggccctgctgtcaggcagctttgcagaagcccagatggacctggtgcccctgcgaggtctgtcgcctggtgcagcctggcctgtcctgcatcatttgcatggttgtcgggggtgtggggctgccctggggcccgtgcccccaccaggccagcccctgctgggttcagaggccgaggaggcactggaggctgctggccgtttcctactgcctgggctggaggaggagctggaagaggccgtgggccgcatccacctgggaccccagggtggcccggagtcagtgggtgaggtgttccgcctgggccggccccggctggctgcccactgtgcccgctggacactggggtcagagcagtgcccgaggaagcggggtctggccctggtggggcttgtggaggcagcaggtgaagaggcagggcccctgacggaggctttgctggctgtggtgatggggattgagttgggggcaagggtccctgcctagactgttgacgtcccctgggaaggggacccaaggatgaattggctgtgaaggatcctccctgagactggcaagggaggaggctgagcagaaggagtcatcatggaggagcggtgagaacatggaaccggactccaagatgacgatctaaagacccgggagcgagaagccaaggccaggttctgggtgtagggcccagagaagcagaacagcccagagccccaggtgcctggcctggcctagacctctggaattgagattaaacaatttggagttgg

SEQ ID NO: 108783 - DNA, 3626 bp, Homo sapiens
  Payload ID: 1375
  Gene Symbol: ARMC5
  Gene Name: armadillo repeat containing 5
  ENST ID: ENST00000408912
  CDS Start-End: 318-3410
ggatgggcaggtgggagctgtggccgaaggtctggccacactcaccaccaagcatcaggtttccggactttgtgactgtgctggtgccgcagcagattccaactgtgcacaaaactcttactacaaacaaggcacttagaggccttctcacccatgtggagcgcaggtgctgcaacagggtggagccaaggctgagactcttgccgcagtcccctcagcggtaaggcttttagcggtgtgagcgcgctggtgctggatcaggttggagctgacgctgaaagtcttaccacactaggcacaggcatagggccgaagcgatggtcacactcggggcaggagtacggcttttcaccggtgtgtacccagtggtgcttaaccagatcagagccacatcggaagcttctgccataacccggacaacgatgccagctcctgagctcacgagcacgtccagagcggaggacactcgggacaccggggtccagctccggaaacggaaaattccacaagcccgtcactctaggaagcggcagcgaacgttctcgttccgctccctgggatcagcggcgagaagcggggcggagtctgaggcccgagccaagatggcggctgcgaagccaaccctcacggactcgctctcgttctgcctcgcgcagctcgcggcggcggccggggaggctctgggtggggaaaaggacccagcgaccaacgagacacccctgagccgcgcgctcctagccctccgcacgcgccacatcaaggcagcggggggaatcgagcgcttccgggcacgcggcgggctccgccccctactcgcgctgctacggcgagcggctgcagcgggttccgccccgtcccaggcaggccccggctccgccccctcgtcggccgcgtcgggagcttctagccccgcccccgcgtcgggccccgccccctccgctgtgtcgtcgtctagtcctacgccgccagtgcgcctgcgcaagacgctggacttggcgctcagcatcctagccgattgctgtacggaaggggcgtgccggaccgaagtgcgcagactcggaggcatactccctttggtgaccattcttcagtgcatgaagacagacagcatccagaaccgaacggcccgtgccctggggaacttagccatggaacctgagagctgtggggacatccactgtgctggtgctgttcccctgcttgtggagagcctgacagcctgccaggactcgcagtgcctacagagcgtggtgcgtgccctccgtaacctggcagactcaccccagcaccgcctggccttggcacagcagggagcagtgcgtccgctggccgagctcctggccactgccccagatgctgcactgaccttagccctcgtccgtgccctcctggaactcagccgaggctgctcccgggcctgtgctgagcagctaagtctgggtgggggattgggcccactcgtcagcctggcttcccaccccaagcgggcagtacgcgagggaaccattctgatcctcgccaacctgtgtgcccagggcctgattcggcctgcactgggcaatgctggtggcgtggaggtgctggtagatgagctccggcagcgccgggatcctaatggagctagcccaacctcccagcagcccctggtgcgggctgtgtgcctcctatgtcgtgaggccatcaaccgggcccgactgcgggatgctggtggcttggatctactgatgggcctgctgcgggaccctcgtgcaagcgcatggcaccctcgtattgtggctgcccttgtggggtttctgtatgacactggggccctgggccggctgcaggctctgggacttgtgcctctcctggctgggcagctgtgtggtgaggctggtgaggaggaagaagagggaagagaagctgcttcctgggactttcctgaggagaggacccctgagcgggcacagggtggaagcttccggagcctcaggtcgtggctgatctccgagggctatgccacaggccctgatgacatctcccccgactggtctcctgagcagtgtccgccggagcccatggagccggccagccccgccccgaccccgacctcgctgcgggcaccacgcacccaacgcactccgggccgcagccccgccgccgccatcgaggagccttggggacgcgaagggccagccctgctgctgctgtcgcgcttttcccaggcccctgacccaagtggggcacttgtgaccggcccggcgctgtacggcctgctgacctatgtgaccggcgcaccgggcccgcccagcccacgtgcactgcgcattctgtcacgcctcacctgcaaccctgcctgcctcgaggccttcgtgcgcagctatggcgcggcgctgctgcgggcctggctggtgctgggggtggcgcctgacgattggccggcaccacgtgcccggcccactctccacagccggcaccgagagctgggggagaggctactgcagaacctgacggttcaggctgagtcgccctttggggttggggccctgacgcacctgctgctctctgggagccctgaggaccgagtggcctgcgcgctgaccctgcccttcatctgccggaagccctctctgtggcgccggctgcttctggagcagggtggtctccggctcctccttgcggcgctgacccggccggccccacacccgctcttcctcttctttgccgcggactccctttcctgcctccaagacctggtgtctcccactgtgagcccagctgtcccacaggcagtccccatggacctagactcaccttccccttgcctctatgaacctctgctgggcccagcccctgtcccagctcccgacctgcacttcctgctggactcaggcctccagctccctgcccagcgagcggcctcagccaccgcctcccctttcttccgggccctgctgtcaggcagctttgcagaagcccagatggacctggtgcccctgcgaggtctgtcgcctggtgcagcctggcctgtcctgcatcatttgcatggttgtcgggggtgtggggctgccctggggcccgtgcccccaccaggccagcccctgctgggttcagaggccgaggaggcactggaggctgctggccgtttcctactgcctgggctggaggaggagctggaagaggccgtgggccgcatccacctgggaccccagggtggcccggagtcagtgggtgaggtgttccgcctgggccggccccggctggctgcccactgtgcccgctggacactggggtcagagcagtgcccgaggaagcggggtctggccctggtggggcttgtggaggcagcaggtgaagaggcagggcccctgacggaggctttgctggctgtggtgatggggattgagttgggggcaagggtccctgcctagactgttgacgtcccctgggaaggggacccaaggatgaattggctgtgaaggatcctccctgagactggcaagggaggaggctgagcagaaggagtcatcatggaggagcggtgagaacatggaaccggactccaagatgacgatctaaagacccgggagcgagaagccaaggccaggttctgggtgtagggcccagagaagcagaacagcccagag

SEQ ID NO: 108784 - DNA, 4844 bp, Homo sapiens
  Payload ID: 1375
  Gene Symbol: ARMC5
  Gene Name: armadillo repeat containing 5
  Uniprot ID: Q96C12
  ENST ID: ENST00000457010
  CDS Start-End: 702-2879
gctgcgagtgaagaactccccgtttcctagatgccagctcctgagctcacgagcacgtccagagcggaggacactcgggacaccggggtccagctccggaaacggaaaattccacaagcccgtcactctaggaagcggcagcgaacgttctcggtaggtttaaccctcttcttcctctgaccgagcgagggctccccgtctgcggcgcggtcaggaccccgcactttcggcccggctcggggttctcggagtccgtcccaaggccgggccgcaccaccgctggggggcagcgaagcgagcctagaggagaaaaggcggtccccgccgagtgcacgccgggggcggggcacggcacgaaggctccgtggtcggacttctgggctgttcggaggccctggcccacctggagggccctggaagagtttccagcgcttcccgaggtaggcgtgagaagctcgacgcggaccacatctccctcatgcaccgcccgcacgtcccaggatgcgctgcgattaaggtactgccgcgcctcgtgtgcaaggacagacttccggggtcgagaactacaacttccgacttgcatcactgcggtggcgctaaacagcgtcagcgaggcggtgcccgacgatttccctgtcttccagttccgctccctgggatcagcggcgagaagcggggcggagtctgaggcccgagccaagatggcggctgcgaagccaaccctcacggactcgctctcgttctgcctcgcgcagctcgcggcggcggccggggaggctctgggtggggaaaaggacccagcgaccaacgagacacccctgagccgcgcgctcctagccctccgcacgcgccacatcaaggcagcggggggaatcgagcgcttccgggcacgcggcgggctccgccccctactcgcgctgctacggcgagcggctgcagcgggttccgccccgtcccaggcaggccccggctccgccccctcgtcggccgcgtcgggagcttctagccccgcccccgcgtcgggccccgccccctccgctgtgtcgtcgtctagtcctacgccgccagtgcgcctgcgcaagacgctggacttggcgctcagcatcctagccgattgctgtacggaaggggcgtgccggaccgaagtgcgcagactcggaggcatactccctttggtgaccattcttcagtgcatgaagacagacagcatccagaaccgaacggcccgtgccctggggaacttagccatggaacctgagagctgtggggacatccactgtgctggtgctgttcccctgcttgtggagagcctgacagcctgccaggactcgcagtgcctacagagcgtggtgcgtgccctccgtaacctggcagactcaccccagcaccgcctggccttggcacagcagggagcagtgcgtccgctggccgagctcctggccactgccccagatgctgcactgaccttagccctcgtccgtgccctcctggaactcagccgaggctgctcccgggcctgtgctgagcagctaagtctgggtgggggattgggcccactcgtcagcctggcttcccaccccaagcgggcagtacgcgagggaaccattctgatcctcgccaacctgtgtgcccagggcctgattcggcctgcactgggcaatgctggtggcgtggaggtgctggtagatgagctccggcagcgccgggatcctaatggagctagcccaacctcccagcagcccctggtgcgggctgtgtgcctcctatgtcgtgaggccatcaaccgggcccgactgcgggatgctggtggcttggatctactgatgggcctgctgcgggaccctcgtgcaagcgcatggcaccctcgtattgtggctgcccttgtggggtttctgtatgacactggggccctgggccggctgcaggctctgggacttgtgcctctcctggctgggcagctgtgtggtgaggctggtgaggaggaagaagagggaagagaagctgcttcctgggactttcctgaggagaggacccctgagcgggcacagggtggaagcttccggagcctcaggtcgtggctgatctccgagggctatgccacaggccctgatgacatctcccccgactggtctcctgagcagtgtccgccggagcccatggagccggccagccccgccccgaccccgacctcgctgcgggcaccacgcacccaacgcactccgggccgcagccccgccgccgccatcgaggagccttggggacgcgaagggccagccctgctgctgctgtcgcgcttttcccaggcccctgacccaagtggggcacttgtgaccggcccggcgctgtacggcctgctgacctatgtgaccggcgcaccgggcccgcccagcccacgtgcactgcgcattctgtcacgcctcacctgcaaccctgcctgcctcgaggccttcgtgcgcagctatggcgcggcgctgctgcgggcctggctggtgctgggggtggcgcctgacgattggccggcaccacgtgcccggcccactctccacagccggcaccgagagctgggtgagttcccatacccacccgtctccttgcccccatgtgagtccccatcctcccccatggcttccatgggcccagaacctcaccttcccactcacctgtcctccccagcccgtcctccagacaacctgtcaccagagtggggtggggagcagggcgttccagtccctccatgggcccacaggcagagttctgctgtgtcctctgccctagccctgggacccagataccctaactctagatgcagccccgcgcccaggatctgggctggtctgtgcttctttcctggctctgccattggttcagcactgtcctgactgctccccaccagcacgctgacctgtgaaccccagcctcaccatcacccccagcactgccagggactgccctgtctgctgtgccctgaccacaggctgcttcatggcgttactgctagaccaaggagcccttctgctggccctgtccgggcataacagaaggctcgcactcttgtcttctggtcacacctcactatgtcccctcagctcctatctctgtatggcctggtttttcccaggttatgattatagagcgaggattattacaatattgggataaagagtaattactacaaactaatgattaatgatattcatatatctctaagatctatatctggtataactattcttgttttatattgtattatactggaacagctcgtgtcctccgtctcttgcctcggcgcctgggtggcttgccgcccacacttcaggggcccagacttacaccctgactgtcccaccttctgtccttgtcctggacctcaggttcccagcgtcccgagcccagcactgtctcttcagtgccctgatttctcacccagaggtttcaccctccttcatctcacgggcccagagccctgtctcactcaccccacctgtcttagaccccagttcccagcctgacaagctttccactcacaggggagaggctactgcagaacctgacggttcaggctgagtcgccctttggggttggggccctgacgcacctgctgctctctgggagccctgaggaccgagtggcctgcgcgctgaccctgcccttcatctgccggtgagtgggaagtgggtgccttgcggggttgggggaggagtgctgtgtttcccaggcccgttgcccaccttttgaaaggccctctcttccctgtaggaagccctctctgtggcgccggctgcttctggagcagggtggtctccggctcctccttgcggcgctgacccggccggccccacacccgctcttcctcttctttgccgcggactccctttcctgcctccaagacctggtgtctcccactgtgagcccagctgtcccacaggcagtccccatggacctagactcaccttccccttgcctctatgaacctctgctgggcccagcccctgtcccagctcccgacctgcacttcctgctggactcaggcctccagctccctgcccagcgagcggcctcagccaccgcctcccctttcttccgggccctgctgtcaggcagctttgcagaagcccagatggacctggtgcccctgcgaggtctgtcgcctggtgcagcctggcctgtcctgcatcatttgcatggttgtcgggggtgtggggctgccctggggcccgtgcccccaccaggccagcccctgctgggttcagaggccgaggaggcactggaggctgctggccgtttcctactgcctgggctggaggaggagctggaagaggccgtgggccgcatccacctgggaccccagggtggcccggagtcagtgggtgaggtgttccgcctgggccggccccggctggctgcccactgtgcccgctggacactggggtcagagcagtgcccgaggaagcggggtctggccctggtggggcttgtggaggcagcaggtgaagaggcagggcccctgacggaggctttgctggctgtggtgatggggattgagttgggggcaagggtccctgcctagactgttgacgtcccctgggaaggggacccaaggatgaattggctgtgaaggatcctccctgagactggcaagggaggaggctgagcagaaggagtcatcatggaggagcggtgagaacatggaaccggactccaagatgacgatctaaagacccgggagcgagaagccaaggccaggttctgggtgtagggcccagagaagcagaacagcccagagccccaggtgcctggcctggcctagacctctggaattgagattaaacaatttggagttggat

SEQ ID NO: 108785 - DNA, 3017 bp, Homo sapiens
  Payload ID: 1375
  Gene Symbol: ARMC5
  Gene Name: armadillo repeat containing 5
  Uniprot ID: Q96C12
  ENST ID: ENST00000538189
  CDS Start-End: 427-2742
ccgggccgcaccaccgctggggggcagcgaagcgagcctagaggagaaaaggcggtccccgccgagtgcacgccgggggcggggcacggcacgaaggctccgtggtcggacttctgggctgttcggaggccctggcccacctggagggccctggaagagtttccagcgcttcccgaggtaggcgtgagaagctcgacgcggaccacatctccctcgtcggccgcgtcgggagcttctagccccgcccccgcgtcgggccccgccccctccgctgtgtcgtcgtctagtcctacgccgccagtgcgcctgcgcaagacgctggacttggcgctcagcatcctagccgattgctgtacggaaggggcgtgccggaccgaagtgcgcagactcggaggcatactccctttggtgaccattcttcagtgcatgaagacagacagcatccagaaccgaacggcccgtgccctggggaacttagccatggaacctgagagctgtggggacatccactgtgctggtgctgttcccctgcttgtggagagcctgacagcctgccaggactcgcagtgcctacagagcgtggtgcgtgccctccgtaacctggcagactcaccccagcaccgcctggccttggcacagcagggagcagtgcgtccgctggccgagctcctggccactgccccagatgctgcactgaccttagccctcgtccgtgccctcctggaactcagccgaggctgctcccgggcctgtgctgagcagctaagtctgggtgggggattgggcccactcgtcagcctggcttcccaccccaagcgggcagtacgcgagggaaccattctgatcctcgccaacctgtgtgcccagggcctgattcggcctgcactgggcaatgctggtggcgtggaggtgctggtagatgagctccggcagcgccgggatcctaatggagctagcccaacctcccagcagcccctggtgcgggctgtgtgcctcctatgtcgtgaggccatcaaccgggcccgactgcgggatgctggtggcttggatctactgatgggcctgctgcgggaccctcgtgcaagcgcatggcaccctcgtattgtggctgcccttgtggggtttctgtatgacactggggccctgggccggctgcaggctctgggacttgtgcctctcctggctgggcagctgtgtggtgaggctggtgaggaggaagaagagggaagagaagctgcttcctgggactttcctgaggagaggacccctgagcgggcacagggtggaagcttccggagcctcaggtcgtggctgatctccgagggctatgccacaggccctgatgacatctcccccgactggtctcctgagcagtgtccgccggagcccatggagccggccagccccgccccgaccccgacctcgctgcgggcaccacgcacccaacgcactccgggccgcagccccgccgccgccatcgaggagccttggggacgcgaagggccagccctgctgctgctgtcgcgcttttcccaggcccctgacccaagtggggcacttgtgaccggcccggcgctgtacggcctgctgacctatgtgaccggcgcaccgggcccgcccagcccacgtgcactgcgcattctgtcacgcctcacctgcaaccctgcctgcctcgaggccttcgtgcgcagctatggcgcggcgctgctgcgggcctggctggtgctgggggtggcgcctgacgattggccggcaccacgtgcccggcccactctccacagccggcaccgagagctgggggagaggctactgcagaacctgacggttcaggctgagtcgccctttggggttggggccctgacgcacctgctgctctctgggagccctgaggaccgagtggcctgcgcgctgaccctgcccttcatctgccggaagccctctctgtggcgccggctgcttctggagcagggtggtctccggctcctccttgcggcgctgacccggccggccccacacccgctcttcctcttctttgccgcggactccctttcctgcctccaagacctggtgtctcccactgtgagcccagctgtcccacaggcagtccccatggacctagactcaccttccccttgcctctatgaacctctgctgggcccagcccctgtcccagctcccgacctgcacttcctgctggactcaggcctccagctccctgcccagcgagcggcctcagccaccgcctcccctttcttccgggccctgctgtcaggcagctttgcagaagcccagatggacctggtgcccctgcgaggtctgtcgcctggtgcagcctggcctgtcctgcatcatttgcatggttgtcgggggtgtggggctgccctggggcccgtgcccccaccaggccagcccctgctgggttcagaggccgaggaggcactggaggctgctggccgtttcctactgcctgggctggaggaggagctggaagaggccgtgggccgcatccacctgggaccccagggtggcccggagtcagtgggtgaggtgttccgcctgggccggccccggctggctgcccactgtgcccgctggacactggggtcagagcagtgcccgaggaagcggggtctggccctggtggggcttgtggaggcagcaggtgaagaggcagggcccctgacggaggctttgctggctgtggtgatggggattgagttgggggcaagggtccctgcctagactgttgacgtcccctgggaaggggacccaaggatgaattggctgtgaaggatcctccctgagactggcaagggaggaggctgagcagaaggagtcatcatggaggagcggtgagaacatggaaccggactccaagatgacgatctaaagacccgggagcgagaagccaaggccaggttctgggtgtagggcccagagaagcagaacagcccagagccccaggtgcctggcctggcctagacctctggaattgagattaaacaatttggagttgg

SEQ ID NO: 108786 - DNA, 586 bp, Homo sapiens
  Payload ID: 1375
  Gene Symbol: ARMC5
  Gene Name: armadillo repeat containing 5
  ENST ID: ENST00000564514
  CDS Start-End: 1-32
ctttgggtaagtgctccgcccccgtttcctagaaagattaggtttgcaactcccttgctctctagacccgggcagtctggagttctttgtgtcctatcccggaataacgtgctttgtgatggcgcatcgctcctgtttctcaatctgttgtgccccgtgacgtcactgcactctctatagatgagagagagccctcccagaccagataattgtagccattatctaggaattggttgttgaggacttctttcgaagctggactagcggaggccaaagagttatttgtgaccattcttcagtgcatgaagacagacagcatccagaaccgaacggcccgtgccctggggaacttagccatggaacctgagagctgtggggacatccactgtgctggtgctgttcccctgcttgtggagagcctgacagcctgccaggactcgcagtgcctacagagcgtggtgcgtgccctccgtaacctggcagactcaccccagcaccgcctggccttggcacagcagggagcagtgcgtccgctggccgagctcctggccactgccccagatgctgcactgaccttagccctcgt

SEQ ID NO: 108787 - DNA, 2072 bp, Homo sapiens
  Payload ID: 1375
  Gene Symbol: ARMC5
  Gene Name: armadillo repeat containing 5
  ENST ID: ENST00000564900
  CDS Start-End: 1-1796
ggaccgaagtgcgcagactcggaggcatactccctttggtgaccattcttcagtgcatgaagacagacagcatccagaaccgaacggcccgtgccctggggaacttagccatggaacctgagagctgtggggacatccactgtgctggtgctgttcccctgcttgtggagagcctgacagcctgccaggactcgcagtgcctacagagcgtggctctgggacttgtgcctctcctggctgggcagctgtgtggtgaggctggtgaggaggaagaagagggaagagaagctgcttcctgggactttcctgaggagaggacccctgagcgggcacagggtggaagcttccggagcctcaggtcgtggctgatctccgagggctatgccacaggccctgatgacatctcccccgactggtctcctgagcagtgtccgccggagcccatggagccggccagccccgccccgaccccgacctcgctgcgggcaccacgcacccaacgcactccgggccgcagccccgccgccgccatcgaggagccttggggacgcgaagggccagccctgctgctgctgtcgcgcttttcccaggcccctgacccaagtggggcacttgtgaccggcccggcgctgtacggcctgctgacctatgtgaccggcgcaccgggcccgcccagcccacgtgcactgcgcattctgtcacgcctcacctgcaaccctgcctgcctcgaggccttcgtgcgcagctatggcgcggcgctgctgcgggcctggctggtgctgggggtggcgcctgacgattggccggcaccacgtgcccggcccactctccacagccggcaccgagagctgggggagaggctactgcagaacctgacggttcaggctgagtcgccctttggggttggggccctgacgcacctgctgctctctgggagccctgaggaccgagtggcctgcgcgctgaccctgcccttcatctgccggaagccctctctgtggcgccggctgcttctggagcagggtggtctccggctcctccttgcggcgctgacccggccggccccacacccgctcttcctcttctttgccgcggactccctttcctgcctccaagacctggtgtctcccactgtgagcccagctgtcccacaggcagtccccatggacctagactcaccttccccttgcctctatgaacctctgctgggcccagcccctgtcccagctcccgacctgcacttcctgctggactcaggcctccagctccctgcccagcgagcggcctcagccaccgcctcccctttcttccgggccctgctgtcaggcagctttgcagaagcccagatggacctggtgcccctgcgaggtctgtcgcctggtgcagcctggcctgtcctgcatcatttgcatggttgtcgggggtgtggggctgccctggggcccgtgcccccaccaggccagcccctgctgggttcagaggccgaggaggcactggaggctgctggccgtttcctactgcctgggctggaggaggagctggaagaggccgtgggccgcatccacctgggaccccagggtggcccggagtcagtgggtgaggtgttccgcctgggccggccccggctggctgcccactgtgcccgctggacactggggtcagagcagtgcccgaggaagcggggtctggccctggtggggcttgtggaggcagcaggtgaagaggcagggcccctgacggaggctttgctggctgtggtgatggggattgagttgggggcaagggtccctgcctagactgttgacgtcccctgggaaggggacccaaggatgaattggctgtgaaggatcctccctgagactggcaagggaggaggctgagcagaaggagtcatcatggaggagcggtgagaacatggaaccggactccaagatgacgatctaaagacccgggagcgagaagccaaggccaggttctgggtgtagggcccagagaagcagaacagcccagagccccaggtgcctggcctggcctagacctctggaattgagattaaacaatttggagttgga

SEQ ID NO: 108788 - DNA, 3549 bp, Homo sapiens
  Payload ID: 1375
  Gene Symbol: ARMC5
  Gene Name: armadillo repeat containing 5
  Uniprot ID: Q96C12
  ENST ID: ENST00000563544
  CDS Start-End: 547-3354
agatgccagctcctgagctcacgagcacgtccagagcggaggacactcgggacaccggggtccagctccggaaacggaaaattccacaagcccgtcactctaggaagcggcagcgaacgttctcggtaggtttaaccctcttcttcctctgaccgagcgagggctccccgtctgcggcgcggtcaggaccccgcactttcggcccggctcggggttctcggagtccgtcccaaggccgggccgcaccaccgctggggggcagcgaagcgagcctagaggagaaaaggcggtccccgccgagtgcacgccgggggcggggcacggcacgaaggctccgtggtcggacttctgggctgttcggaggccctggcccacctggagggccctggaagagtttccagcgcttcccgaggtaggcgtgagaagctcgacgcggaccacatctccctcatgcaccgcccgcacgtcccaggatgcgctgcgattaagttccgctccctgggatcagcggcgagaagcggggcggagtctgaggcccgagccaagatggcggctgcgaagccaaccctcacggactcgctctcgttctgcctcgcgcagctcgcggcggcggccggggaggctctgggtggggaaaaggacccagcgaccaacgagacacccctgagccgcgcgctcctagccctccgcacgcgccacatcaaggcagcggggggaatcgagcgcttccgggcacgcggcgggctccgccccctactcgcgctgctacggcgagcggctgcagcgggttccgccccgtcccaggcaggccccggctccgccccctcgtcggccgcgtcgggagcttctagccccgcccccgcgtcgggccccgccccctccgctgtgtcgtcgtctagtcctacgccgccagtgcgcctgcgcaagacgctggacttggcgctcagcatcctagccgattgctgtacggaaggggcgtgccggaccgaagtgcgcagactcggaggcatactccctttggtgaccattcttcagtgcatgaagacagacagcatccagaaccgaacggcccgtgccctggggaacttagccatggaacctgagagctgtggggacatccactgtgctggtgctgttcccctgcttgtggagagcctgacagcctgccaggactcgcagtgcctacagagcgtggtgcgtgccctccgtaacctggcagactcaccccagcaccgcctggccttggcacagcagggagcagtgcgtccgctggccgagctcctggccactgccccagatgctgcactgaccttagccctcgtccgtgccctcctggaactcagccgaggctgctcccgggcctgtgctgagcagctaagtctgggtgggggattgggcccactcgtcagcctggcttcccaccccaagcgggcagtacgcgagggaaccattctgatcctcgccaacctgtgtgcccagggcctgattcggcctgcactgggcaatgctggtggcgtggaggtgctggtagatgagctccggcagcgccgggatcctaatggagctagcccaacctcccagcagcccctggtgcgggctgtgtgcctcctatgtcgtgaggccatcaaccgggcccgactgcgggatgctggtggcttggatctactgatgggcctgctgcgggaccctcgtgcaagcgcatggcaccctcgtattgtggctgcccttgtggggtttctgtatgacactggggccctgggccggctgcaggctctgggacttgtgcctctcctggctgggcagctgtgtggtgaggctggtgaggaggaagaagagggaagagaagctgcttcctgggactttcctgaggagaggacccctgagcgggcacagggtggaagcttccggagcctcaggtcgtggctgatctccgagggctatgccacaggccctgatgacatctcccccgactggtctcctgagcagtgtccgccggagcccatggagccggccagccccgccccgaccccgacctcgctgcgggcaccacgcacccaacgcactccgggccgcagccccgccgccgccatcgaggagccttggggacgcgaagggccagccctgctgctgctgtcgcgcttttcccaggcccctgacccaagtggggcacttgtgaccggcccggcgctgtacggcctgctgacctatgtgaccggcgcaccgggcccgcccagcccacgtgcactgcgcattctgtcacgcctcacctgcaaccctgcctgcctcgaggccttcgtgcgcagctatggcgcggcgctgctgcgggcctggctggtgctgggggtggcgcctgacgattggccggcaccacgtgcccggcccactctccacagccggcaccgagagctgggggagaggctactgcagaacctgacggttcaggctgagtcgccctttggggttggggccctgacgcacctgctgctctctgggagccctgaggaccgagtggcctgcgcgctgaccctgcccttcatctgccggaagccctctctgtggcgccggctgcttctggagcagggtggtctccggctcctccttgcggcgctgacccggccggccccacacccgctcttcctcttctttgccgcggactccctttcctgcctccaagacctggtgtctcccactgtgagcccagctgtcccacaggcagtccccatggacctagactcaccttccccttgcctctatgaacctctgctgggcccagcccctgtcccagctcccgacctgcacttcctgctggactcaggcctccagctccctgcccagcgagcggcctcagccaccgcctcccctttcttccgggccctgctgtcaggcagctttgcagaagcccagatggacctggtgcccctgcgaggtctgtcgcctggtgcagcctggcctgtcctgcatcatttgcatggttgtcgggggtgtggggctgccctggggcccgtgcccccaccaggccagcccctgctgggttcagaggccgaggaggcactggaggctgctggccgtttcctactgcctgggctggaggaggagctggaagaggccgtgggccgcatccacctgggaccccagggtggcccggagtcagtgggtgaggtgttccgcctgggccggccccggctggctgcccactgtgcccgctggacactggggtcagagcagtgcccgaggaagcggggtctggccctggtggggcttgtggaggcagcaggtgaagaggcagggcccctgacggaggctttgctggctgtggtgatggggattgagttgggggcaagggtccctgcctagactgttgacgtcccctgggaaggggacccaaggatgaattggctgtgaaggatcctccctgagactggcaagggaggaggctgagcagaaggagtcatcatggaggagcggtgagaacatggaaccggactccaagatgacgatctaaagacccgggagcgagaagccaaggccaggttctgggtgtagggccca

SEQ ID NO: 108789 - DNA, 2412 bp, Homo sapiens
  Payload ID: 1376
  Gene Symbol: ARMC6
  Gene Name: armadillo repeat containing 6
  Uniprot ID: Q6NXE6
  ENST ID: ENST00000269932
  CDS Start-End: 451-1881
ggctctcttgcgcaagcgcgctgtccgcttcttctgggcggacgctctggaggcaaaacatttccctgctgggggcggcgaccaccgtgagcgtcccggaaggggcggcaaagacgcctccgtcgcgcacgaggtggcctcgttggctttaccttggttcgcggtcgtccttggttatcgtgagcgtccgcgagtctctgggaggccaagcctaggggcgccacagcgcctgcgcgcgtacggcggccggaaggggctagaggcggctccctgggtgacaaccgcgcgccccacctttccccacgtggccgcgaagaccgggtgagacgctgcggctgccgaggcctgtcccgcgcggagtggggagtgggggtgccgcagggtcgggctggcgcgaccctcggctcaggagcatctatcggctgcacgccaacatcaacacaggcgaagatggtctccaagcgcattgcccaggagacctttgatgcagctgtgcgcgagaacatcgaggagtttgcgatggggccagaggaggcagtgaaagaggccgtggagcagtttgaatcgcaaggggttgatctgagcaacattgtaaagacggcacctaaagtctctgcagacggatcccaggagcccacacatgacatcctgcagatgctcagtgacctccaggagtctgtggccagctctcgcccccaggaggtgtcagcatacctcacccgcttctgcgaccagtgcaaacaggacaaggcctgccgcttcctcgcggcccagaagggggcctaccccatcatcttcactgcctggaagctggccactgcaggtgaccagggccttctgctccagtccctcaatgccctgtcggtgctgactgatggacagccagacctcctggatgcccagggcctgcagctcctagtggccacgctgacccagaatgctgatgaggctgacctgacctgctctgggatccgctgtgtgcgtcacgcttgcctgaaacatgaacagaatcggcaagacctggtgaaagctggcgtgctgcctctgctgactggtgccatcacccatcatggccaccacactgacgtggtcagggaagcctgctgggccctgcgtgtcatgaccttcgatgacgacatccgtgtgccctttggccatgcccacaaccatgccaagatgattgtgcaggagaacaaaggcttgaaggtgctcatcgaagccaccaaagcgttcctggataaccctggcatcctgagcgagctctgtggaaccctgtcccgcctggccattcgcaacgagttctgccaggaggtcgtcgacctcgggggcctgagcattctggtgtccctgctagccgactgcaatgaccaccagatgagggaccagagcggcgttcaggagctcgtgaagcaagtgctgagcaccctgcgagccatcgcaggcaacgacgacgtgaaagatgctattgtccgtgctggtgggacggagtccatcgtggctgctatgacccagcatctgaccagcccccaggtgtgtgagcagagctgcgcggccctgtgcttcctggccctgcgtaagcccgacaacagccgcatcatcgtggagggtggcggggctgtggcagcactgcaggccatgaaggcacacccgcagaaggccggcgtgcagaaacaggcttgcatgctgatccgaaacctggtggcccacggccaggccttctcgaagcccatcctggacctgggggctgaggcactcatcatgcaggcccgatctgcccaccgtgactgtgaggacgtggccaaggccgccctgcgggacctgggttgtcatgtcgagctccgagagctgtggacaggccagaggggcaacctggcgccatgaccccaggcccagtctgggccgtgactctgggtgagtcgtgtgactcaggaatgggggtagatccatgtcctccactgtcccccattagttctgtccccttcacaatgagaagtgttttctggcaggccctaggtaaagggtcgggggaggggggagccttgtagggaggcctctacacagaagaaagcagcccccatgtcccagccacttctgggtcccagccagcagcacggatgttactgtcctgctccttcccccagccccacgccctaccagagggggcaaagggcacgtcccatcactcactgccctgtctgaaatgtggcagccactgtgggccaggctcagggcagggcaggcgattccagtggggttgggccccctggcgcctgctgcttactgcagtttcatgcaggcctctgctccttgtctttcttacctgtaaaatgggtctcagatgctccgccctgcttggccccagcttgtctgtctctgggtcctgggccagccaggatacctgataataaaaga

SEQ ID NO: 108790 - DNA, 2383 bp, Homo sapiens
  Payload ID: 1376
  Gene Symbol: ARMC6
  Gene Name: armadillo repeat containing 6
  Uniprot ID: Q6NXE6
  ENST ID: ENST00000392335
  CDS Start-End: 403-1833
gagtcctggtgcgcaggcgcgggccgccgcggcccggctctcttgcgcaagcgcgctgtccgcttcttctgggcggacgctctggaggcaaaacatttccctgctgggggcggcgaccaccgtgagcgtcccggaaggggcggcaaagacgcctccgtcgcgcacgaggtggcctcgttggctttaccttggttcgcggtcgtccttggttatcgtgagcgtccgcgagtctctgggaggccaagcctaggggcgccacagcgcctgcgcgcgtacggcggccggaaggggctagaggcggctccctgggtgacaaccgcgcgccccacctttccccacgtggccgcgaagaccggctcaggagcatctatcggctgcacgccaacatcaacacaggcgaagatggtctccaagcgcattgcccaggagacctttgatgcagctgtgcgcgagaacatcgaggagtttgcgatggggccagaggaggcagtgaaagaggccgtggagcagtttgaatcgcaaggggttgatctgagcaacattgtaaagacggcacctaaagtctctgcagacggatcccaggagcccacacatgacatcctgcagatgctcagtgacctccaggagtctgtggccagctctcgcccccaggaggtgtcagcatacctcacccgcttctgcgaccagtgcaaacaggacaaggcctgccgcttcctcgcggcccagaagggggcctaccccatcatcttcactgcctggaagctggccactgcaggtgaccagggccttctgctccagtccctcaatgccctgtcggtgctgactgatggacagccagacctcctggatgcccagggcctgcagctcctagtggccacgctgacccagaatgctgatgaggctgacctgacctgctctgggatccgctgtgtgcgtcacgcttgcctgaaacatgaacagaatcggcaagacctggtgaaagctggcgtgctgcctctgctgactggtgccatcacccatcatggccaccacactgacgtggtcagggaagcctgctgggccctgcgtgtcatgaccttcgatgacgacatccgtgtgccctttggccatgcccacaaccatgccaagatgattgtgcaggagaacaaaggcttgaaggtgctcatcgaagccaccaaagcgttcctggataaccctggcatcctgagcgagctctgtggaaccctgtcccgcctggccattcgcaacgagttctgccaggaggtcgtcgacctcgggggcctgagcattctggtgtccctgctagccgactgcaatgaccaccagatgagggaccagagcggcgttcaggagctcgtgaagcaagtgctgagcaccctgcgagccatcgcaggcaacgacgacgtgaaagatgctattgtccgtgctggtgggacggagtccatcgtggctgctatgacccagcatctgaccagcccccaggtgtgtgagcagagctgcgcggccctgtgcttcctggccctgcgtaagcccgacaacagccgcatcatcgtggagggtggcggggctgtggcagcactgcaggccatgaaggcacacccgcagaaggccggcgtgcagaaacaggcttgcatgctgatccgaaacctggtggcccacggccaggccttctcgaagcccatcctggacctgggggctgaggcactcatcatgcaggcccgatctgcccaccgtgactgtgaggacgtggccaaggccgccctgcgggacctgggttgtcatgtcgagctccgagagctgtggacaggccagaggggcaacctggcgccatgaccccaggcccagtctgggccgtgactctgggtgagtcgtgtgactcaggaatgggggtagatccatgtcctccactgtcccccattagttctgtccccttcacaatgagaagtgttttctggcaggccctaggtaaagggtcgggggaggggggagccttgtagggaggcctctacacagaagaaagcagcccccatgtcccagccacttctgggtcccagccagcagcacggatgttactgtcctgctccttcccccagccccacgccctaccagagggggcaaagggcacgtcccatcactcactgccctgtctgaaatgtggcagccactgtgggccaggctcagggcagggcaggcgattccagtggggttgggccccctggcgcctgctgcttactgcagtttcatgcaggcctctgctccttgtctttcttacctgtaaaatgggtctcagatgctccgccctgcttggccccagcttgtctgtctctgggtcctgggccagccaggatacctgataataaaagatcattgggtgaacagcgga

SEQ ID NO: 108791 - DNA, 1866 bp, Homo sapiens
  Payload ID: 1376
  Gene Symbol: ARMC6
  Gene Name: armadillo repeat containing 6
  Uniprot ID: Q6NXE6
  ENST ID: ENST00000392336
  CDS Start-End: 108-1613
ttttcattcattttatttattcattcagcacctgtgcactgagtgcctgctgcgtgtcgggccccgtcctaggcagtggggacaaggaggctacagggtacaaataaatgagtgaacgatgttgctctagatacagctcaggagcatctatcggctgcacgccaacatcaacacaggcgaagatggtctccaagcgcattgcccaggagacctttgatgcagctgtgcgcgagaacatcgaggagtttgcgatggggccagaggaggcagtgaaagaggccgtggagcagtttgaatcgcaaggggttgatctgagcaacattgtaaagacggcacctaaagtctctgcagacggatcccaggagcccacacatgacatcctgcagatgctcagtgacctccaggagtctgtggccagctctcgcccccaggaggtgtcagcatacctcacccgcttctgcgaccagtgcaaacaggacaaggcctgccgcttcctcgcggcccagaagggggcctaccccatcatcttcactgcctggaagctggccactgcaggtgaccagggccttctgctccagtccctcaatgccctgtcggtgctgactgatggacagccagacctcctggatgcccagggcctgcagctcctagtggccacgctgacccagaatgctgatgaggctgacctgacctgctctgggatccgctgtgtgcgtcacgcttgcctgaaacatgaacagaatcggcaagacctggtgaaagctggcgtgctgcctctgctgactggtgccatcacccatcatggccaccacactgacgtggtcagggaagcctgctgggccctgcgtgtcatgaccttcgatgacgacatccgtgtgccctttggccatgcccacaaccatgccaagatgattgtgcaggagaacaaaggcttgaaggtgctcatcgaagccaccaaagcgttcctggataaccctggcatcctgagcgagctctgtggaaccctgtcccgcctggccattcgcaacgagttctgccaggaggtcgtcgacctcgggggcctgagcattctggtgtccctgctagccgactgcaatgaccaccagatgagggaccagagcggcgttcaggagctcgtgaagcaagtgctgagcaccctgcgagccatcgcaggcaacgacgacgtgaaagatgctattgtccgtgctggtgggacggagtccatcgtggctgctatgacccagcatctgaccagcccccaggtgtgtgagcagagctgcgcggccctgtgcttcctggccctgcgtaagcccgacaacagccgcatcatcgtggagggtggcggggctgtggcagcactgcaggccatgaaggcacacccgcagaaggccggcgtgcagaaacaggcttgcatgctgatccgaaacctggtggcccacggccaggccttctcgaagcccatcctggacctgggggctgaggcactcatcatgcaggcccgatctgcccaccgtgactgtgaggacgtggccaaggccgccctgcgggacctgggttgtcatgtcgagctccgagagctgtggacaggccagaggggcaacctggcgccatgaccccaggcccagtctgggccgtgactctgggtgagtcgtgtgactcaggaatgggggtagatccatgtcctccactgtcccccattagttctgtccccttcacaatgagaagtgttttctggcaggccctaggtaaagggtcgggggaggggggagccttgtagggaggcctctacacagaagaaagcagcccccatgtcccagccacttctgggtcccagccagcagcacggatgttactgtcctgctcctt

SEQ ID NO: 108792 - DNA, 622 bp, Homo sapiens
  Payload ID: 1376
  Gene Symbol: ARMC6
  Gene Name: armadillo repeat containing 6
  ENST ID: ENST00000535288
  CDS Start-End: 154-622
aggggctagaggcggctccctgggtgacaaccgcgcgccccacctttccccacgtggccgcgaagaccgggtgagacgctgcggctgccgaggcctgtcccgcgcggagtggggagtgggggtgccgcagggtcgggctggcgcgaccctcggatgctcagtgacctccaggagtctgtggccagctctcgcccccaggaggtgtcagcatacctcacccgcttctgcgaccagtgcaaacaggacaaggcctgccgcttcctcgcggcccagaagggggcctaccccatcatcttcactgcctggaagctggccactgcaggtgaccagggccttctgctccagtccctcaatgccctgtcggtgctgactgatggacagccagacctcctggatgcccagggcctgcagctcctagtggccacgctgacccagaatgctgatgaggctgacctgacctgctctgggatccgctgtgtgcgtcacgcttgcctgaaacatgaacagaatcggcaagacctggtgaaagctggcgtgctgcctctgctgactggtgccatcacccatcatggccaccacactgacgtggtcagggaagcctgctgggccctgcgtgtcatga

SEQ ID NO: 108793 - DNA, 552 bp, Homo sapiens
  Payload ID: 1376
  Gene Symbol: ARMC6
  Gene Name: armadillo repeat containing 6
  ENST ID: ENST00000538663
  CDS Start-End: 242-552
acgtggccgcgaagaccgggtgagacgctgcggctgccgaggcctgtcccgcgcggagtggggagtgggggtgccgcagggtcgggctggcgcgaccctcggagacggggccttactatgttgtccttgctggtctcaaactccagacttgaaacagtcctcccaccttggcctcctaaagcactgggatcacagctcaggagcatctatcggctgcacgccaacatcaacacaggcgaagatggtctccaagcgcattgcccaggagacctttgatgcagctgtgcgcgagaacatcgaggagtttgcgatggggccagaggaggcagtgaaagaggccgtggagcagtttgaatcgcaaggggttgatctgagcaacattgtaaagacggcacctaaagtctctgcagacggatcccaggagcccacacatgacatcctgcagatgctcagtgacctccaggagtctgtggccagctctcgcccccaggaggtgtcagcatacctcacccgcttctgcgaccagtgcaaacaggacaaggcctgccgctt

SEQ ID NO: 108794 - DNA, 537 bp, Homo sapiens
  Payload ID: 1376
  Gene Symbol: ARMC6
  Gene Name: armadillo repeat containing 6
  ENST ID: ENST00000543877
  CDS Start-End: 347-537
aaaacatttccctgctgggggcggcgaccaccgtgagcgtcccggaaggggcggcaaagacgcctccgtcgcgcacgaggtggcctcgttggctttaccttggttcgcggtcgtccttggttatcgtgagcgtccgcgagtctctgggaggccaagcctaggggcgccacagcgcctgcgcgcgtacggcggccggaaggggctagaggcggctccctgggtgacaaccgcgcgccccacctttccccacgtggccgcgaagaccggcacctgtgcactgagtgcctgctgcgtgtcgggccccgtcctaggcagtggggacaaggaggctacagggtacaaataaatgagtgaacgatgttgctctagatacagagacggggccttactatgttgtccttgctggtctcaaactccagacttgaaacagtcctcccaccttggcctcctaaagcactgggatcacagctcaggagcatctatcggctgcacgccaacatcaacacaggcgaagatggtctccaagcgcattgccca

SEQ ID NO: 108795 - DNA, 563 bp, Homo sapiens
  Payload ID: 1376
  Gene Symbol: ARMC6
  Gene Name: armadillo repeat containing 6
  ENST ID: ENST00000536098
  CDS Start-End: 352-563
gcaagcgcgctgtccgcttcttctgggcggacgctctggaggcaaaacatttccctgctgggggcggcgaccaccgtgagcgtcccggaaggggcggcaaagacgcctccgtcgcgcacgaggtggcctcgttggctttaccttggttcgcggtcgtccttggttatcgtgagcgtccgcgagtctctgggaggccaagcctaggggcgccacagcgcctgcgcgcgtacggcggccggaaggggctagaggcggctccctgggtgacaaccgcgcgccccacctttccccacgtggccgcgaagaccgggagcatctatcggctgcacgccaacatcaacacaggcgaagatggtctccaagcgcattgcccaggagacctttgatgcagctgtgcgcgagaacatcgaggagtttgcgatggggccagaggaggcagtgaaagaggccgtggagcagtttgaatcgcaaggggttgatctgagcaacattgtaaagacggcacctaaagtctctgcagacggatcccaggagcccacacatgacatcctgcagatgctcag

SEQ ID NO: 108796 - DNA, 951 bp, Homo sapiens
  Payload ID: 1376
  Gene Symbol: ARMC6
  Gene Name: armadillo repeat containing 6
  ENST ID: ENST00000540792
  CDS Start-End: 467-951
ctcttgcgcaagcgcgctgtccgcttcttctgggcggacgctctggaggcaaaacatttccctgctgggggcggcgaccaccgtgagcgtcccggaaggggcggcaaagacgcctccgtcgcgcacgaggtggcctcgttggctttaccttggttcgcggtcgtccttggttatcgtgagcgtccgcgagtctctgggaggccaagcctaggggcgccacagcgcctgcgcgcgtacggcggccggaaggggctagaggcggctccctgggtgacaaccgcgcgccccacctttccccacgtggccgcgaagaccggcacctgtgcactgagtgcctgctgcgtgtcgggccccgtcctaggcagtggggacaaggaggctacagggtacaaataaatgagtgaacgatgttgctctagatacaggagcatctatcggctgcacgccaacatcaacacaggcgaagatggtctccaagcgcattgcccaggagacctttgatgcagctgtgcgcgagaacatcgaggagtttgcgatggggccagaggaggcagtgaaagaggccgtggagcagtttgaatcgcaaggggttgatctgagcaacattgtaaagacggcacctaaagtctctgcagacggatcccaggagcccacacatgacatcctgcagatgctcagtgacctccaggagtctgtggccagctctcgcccccaggaggtgtcagcatacctcacccgcttctgcgaccagtgcaaacaggacaaggcctgccgcttcctcgcggcccagaagggggcctaccccatcatcttcactgcctggaagctggccactgcaggtgaccagggccttctgctccagtccctcaatgccctgtcggtgctgactgatggacagccagacctcctggatgcccagggcctgcagctcctagtggccacgctgaccca

SEQ ID NO: 108797 - DNA, 1252 bp, Homo sapiens
  Payload ID: 1376
  Gene Symbol: ARMC6
  Gene Name: armadillo repeat containing 6
  ENST ID: ENST00000539985
  CDS Start-End: 371-514
cttctgggcggacgctctggaggcaaaacatttccctgctgggggcggcgaccaccgtgagcgtcccggaaggggcggcaaagacgcctccgtcgcgcacgaggtggcctcgttggctttaccttggttcgcggtcgtccttggttatcgtgagcgtccgcgagtctctgggaggccaagcctaggggcgccacagcgcctgcgcgcgtacggcggccggaaggggctagaggcggctccctgggtgacaaccgcgcgccccacctttccccacgtggccgcgaagaccggcacctgtgcactgagtgcctgctgcgtgtcgggccccgtcctaggcagtggggacaaggaggctacagggtacaaataaatgagtgaacgatgttgctctagatacagagatggagtttcgccacgtgtccaggctggtctcaaactcctggcctcatgtgatccttccgcctcggcctcccaaagtgcaggccaccatgcctggcctgaagtggaaacttgataattccagaacggaaacttgatattactgcaataagcaagctcaggagcatctatcggctgcacgccaacatcaacacaggcgaagatggtctccaagcgcattgcccaggagacctttgatgcagctgtgcgcgagaacatcgaggagtttgcgatggggccagaggaggcagtgaaagaggccgtggagcagtttgaatcgcaaggggttgatctgagcaacattgtaaagacggcacctaaagtctctgcagacggatcccaggagcccacacatgacatcctgcagatgctcagtgacctccaggagtctgtggccagctctcgcccccaggaggtgtcagcatacctcacccgcttctgcgaccagtgcaaacaggacaaggcctgccgcttcctcgcggcccagaagggggcctaccccatcatcttcactgcctggaagctggccactgcaggtgaccagggccttctgctccagtccctcaatgccctgtcggtgctgactgatggacagccagacctcctggatgcccagggcctgcagctcctagtggccacgctgacccagaatgctgatgaggctgacctgacctgctctgggatccgctgtgtgcgtcacgcttgcctgaaacatgaacagaatcggcaagacctggtgaaagctggcgtgctgcctctgctgactggtgccatcacccatcatggccaccacactgacgtggtcagggaagcc

SEQ ID NO: 108798 - DNA, 1318 bp, Homo sapiens
  Payload ID: 1376
  Gene Symbol: ARMC6
  Gene Name: armadillo repeat containing 6
  ENST ID: ENST00000537263
  CDS Start-End: 549-1318
gcgcaggcgcgggccgccgcggcccggctctcttgcgcaagcgcgctgtccgcttcttctgggcggacgctctggaggcaaaacatttccctgctgggggcggcgaccaccgtgagcgtcccggaaggggcggcaaagacgcctccgtcgcgcacgaggtggcctcgttggctttaccttggttcgcggtcgtccttggttatcgtgagcgtccgcgagtctctgggaggccaagcctaggggcgccacagcgcctgcgcgcgtacggcggccggaaggggctagaggcggctccctgggtgacaaccgcgcgccccacctttccccacgtggccgcgaagaccggagatggagtttcgccacgtgtccaggctggtctcaaactcctggcctcatgtgatccttccgcctcggcctcccaaagtgcaggccaccatgcctggcctgaagtggaaacttgataattccagaacggaaacttgatattactgcaataagcaagctcaggagcatctatcggctgcacgccaacatcaacacaggcgaagatggtctccaagcgcattgcccaggagacctttgatgcagctgtgcgcgagaacatcgaggagtttgcgatggggccagaggaggcagtgaaagaggccgtggagcagtttgaatcgcaaggggttgatctgagcaacattgtaaagacggcacctaaagtctctgcagacggatcccaggagcccacacatgacatcctgcagatgctcagtgacctccaggagtctgtggccagctctcgcccccaggaggtgtcagcatacctcacccgcttctgcgaccagtgcaaacaggacaaggcctgccgcttcctcgcggcccagaagggggcctaccccatcatcttcactgcctggaagctggccactgcaggtgaccagggccttctgctccagtccctcaatgccctgtcggtgctgactgatggacagccagacctcctggatgcccagggcctgcagctcctagtggccacgctgacccagaatgctgatgaggctgacctgacctgctctgggatccgctgtgtgcgtcacgcttgcctgaaacatgaacagaatcggcaagacctggtgaaagctggcgtgctgcctctgctgactggtgccatcacccatcatggccaccacactgacgtggtcagggaagcctgctgggccctgcgtgtcatgaccttcgatgacgacatccgtgtgccctttggccatgcccacaaccatgccaagatgattgtgcaggagaacaaaggcttgaaggtgctcatcgaagc

SEQ ID NO: 108799 - DNA, 557 bp, Homo sapiens
  Payload ID: 1376
  Gene Symbol: ARMC6
  Gene Name: armadillo repeat containing 6
  ENST ID: ENST00000540707
  CDS Start-End: 468-557
gcggcccggctctcttgcgcaagcgcgctgtccgcttcttctgggcggacgctctggaggcaaaacatttccctgctgggggcggcgaccaccgtgagcgtcccggaaggggcggcaaagacgcctccgtcgcgcacgaggtggcctcgttggctttaccttggttcgcggtcgtccttggttatcgtgagcgtccgcgagtctctgggaggccaagcctaggggcgccacagcgcctgcgcgcgtacggcggccggaaggggctagaggcggctccctgggtgacaaccgcgcgccccacctttccccacgtggccgcgaagaccggagacggggccttactatgttgtccttgctggtctcaaactccagacttgaaacagtcctcccaccttggcctcctaaagcactgggatcacagctcaggagcatctatcggctgcacgccaacatcaacacaggcgaagatggtctccaagcgcattgcccaggagacctttgatgcagctgtgcgcgagaacatcgaggagtttgcgatggggccagaggaggcagtg

SEQ ID NO: 108800 - DNA, 1320 bp, Homo sapiens
  Payload ID: 1376
  Gene Symbol: ARMC6
  Gene Name: armadillo repeat containing 6
  ENST ID: ENST00000540634
  CDS Start-End: 1-244
gaaggcacacccgcagaaggccggcgtgcagaaacaggcttgcatgctgatccgaaacctggtggcccacggccaggccttctcgaagcccatcctggacctgggggctgaggcactcatcatgcaggcccgatctgcccaccgtgactgtgaggacgtggccaaggccgccctgcgggacctgggttgtcatgtcgagctccgagagctgtggacaggccagaggggcaacctggcgccatgaccccaggcccagtctgggccgtgactctgggcccccagcttccgtggaatccagccgatgcaaacagctgaggagcgtcaccctggctgcacctctccgtggtgtccccgtctcccctgcccccagcaggaaagggtgctctcagctcagcagggctggcccaaacctctgacccagtcaccccgccctatccctcctccctggagactcccaggatgtgggagaaagatctcgaatctgccccagactgccctgacttaacttctgggccagtgtgaccttgggcagttctcaagcatttcttcatctgtcatgtggcggggtaggtgctcctgagctatttcgaggacggcctgcagtgctggccctgtcattcctgctccagccttgctctcagtctgcccatggctcccctttgccttctacataaaaccaaacctgtctgtggtcccagcaacttgggctaaggcgggaagatcacttgagcccaggagtcaaggctgcagtgagttaggatggcaccactgcactccagcctgggtgacggatcaagagcttgtctcaaaaacaaacaaacaaacaaaaaaatgcacttcatgccctgcagacccagtatggcccaggccttgcccatttcccagtctttccactgtactcactccctattcccccaccccagggcctttgcacaagcccccatgtgacaagccatgccctctgcctagaagtgcccttcccttggccttccccgtggccggctcctcctagcacatgaggtttcagctcacgttgccttctccaggagagacccccatctcatcacctcatgtgctctggctctgacactgggccccatctgaggtcacctcatttgtgaactctcctgtttgtcttgcccccaccatcggctggctccctgcagggaggcccctgtccccacttgctgtgccttcagcttcccgtcagtgtttttgagtgttcacctgaataaactgacaagcactcgaggtccctgccaggtggccccagcgtcctcccctgggcctgggccaagctgcaggcttcttcaggaaggg

SEQ ID NO: 108801 - DNA, 2488 bp, Homo sapiens
  Payload ID: 1376
  Gene Symbol: ARMC6
  Gene Name: armadillo repeat containing 6
  Uniprot ID: Q6NXE6
  ENST ID: ENST00000535612
  CDS Start-End: 433-1938
tcctggtgcgcaggcgcgggccgccgcggcccggctctcttgcgcaagcgcgctgtccgcttcttctgggcggacgctctggaggcaaaacatttccctgctgggggcggcgaccaccgtgagcgtcccggaaggggcggcaaagacgcctccgtcgcgcacgaggtggcctcgttggctttaccttggttcgcggtcgtccttggttatcgtgagcgtccgcgagtctctgggaggccaagcctaggggcgccacagcgcctgcgcgcgtacggcggccggaaggggctagaggcggctccctgggtgacaaccgcgcgccccacctttccccacgtggccgcgaagaccggcacctgtgcactgagtgcctgctgcgtgtcgggccccgtcctaggcagtggggacaaggaggctacagggtacaaataaatgagtgaacgatgttgctctagatacagctcaggagcatctatcggctgcacgccaacatcaacacaggcgaagatggtctccaagcgcattgcccaggagacctttgatgcagctgtgcgcgagaacatcgaggagtttgcgatggggccagaggaggcagtgaaagaggccgtggagcagtttgaatcgcaaggggttgatctgagcaacattgtaaagacggcacctaaagtctctgcagacggatcccaggagcccacacatgacatcctgcagatgctcagtgacctccaggagtctgtggccagctctcgcccccaggaggtgtcagcatacctcacccgcttctgcgaccagtgcaaacaggacaaggcctgccgcttcctcgcggcccagaagggggcctaccccatcatcttcactgcctggaagctggccactgcaggtgaccagggccttctgctccagtccctcaatgccctgtcggtgctgactgatggacagccagacctcctggatgcccagggcctgcagctcctagtggccacgctgacccagaatgctgatgaggctgacctgacctgctctgggatccgctgtgtgcgtcacgcttgcctgaaacatgaacagaatcggcaagacctggtgaaagctggcgtgctgcctctgctgactggtgccatcacccatcatggccaccacactgacgtggtcagggaagcctgctgggccctgcgtgtcatgaccttcgatgacgacatccgtgtgccctttggccatgcccacaaccatgccaagatgattgtgcaggagaacaaaggcttgaaggtgctcatcgaagccaccaaagcgttcctggataaccctggcatcctgagcgagctctgtggaaccctgtcccgcctggccattcgcaacgagttctgccaggaggtcgtcgacctcgggggcctgagcattctggtgtccctgctagccgactgcaatgaccaccagatgagggaccagagcggcgttcaggagctcgtgaagcaagtgctgagcaccctgcgagccatcgcaggcaacgacgacgtgaaagatgctattgtccgtgctggtgggacggagtccatcgtggctgctatgacccagcatctgaccagcccccaggtgtgtgagcagagctgcgcggccctgtgcttcctggccctgcgtaagcccgacaacagccgcatcatcgtggagggtggcggggctgtggcagcactgcaggccatgaaggcacacccgcagaaggccggcgtgcagaaacaggcttgcatgctgatccgaaacctggtggcccacggccaggccttctcgaagcccatcctggacctgggggctgaggcactcatcatgcaggcccgatctgcccaccgtgactgtgaggacgtggccaaggccgccctgcgggacctgggttgtcatgtcgagctccgagagctgtggacaggccagaggggcaacctggcgccatgaccccaggcccagtctgggccgtgactctgggtgagtcgtgtgactcaggaatgggggtagatccatgtcctccactgtcccccattagttctgtccccttcacaatgagaagtgttttctggcaggccctaggtaaagggtcgggggaggggggagccttgtagggaggcctctacacagaagaaagcagcccccatgtcccagccacttctgggtcccagccagcagcacggatgttactgtcctgctccttcccccagccccacgccctaccagagggggcaaagggcacgtcccatcactcactgccctgtctgaaatgtggcagccactgtgggccaggctcagggcagggcaggcgattccagtggggttgggccccctggcgcctgctgcttactgcagtttcatgcaggcctctgctccttgtctttcttacctgtaaaatgggtctcagatgctccgccctgcttggccccagcttgtctgtctctgggtcctgggccagccaggatacctgataataaaagatcattgggtgaacagcgga

SEQ ID NO: 108802 - DNA, 1052 bp, Homo sapiens
  Payload ID: 1376
  Gene Symbol: ARMC6
  Gene Name: armadillo repeat containing 6
  ENST ID: ENST00000535795
  CDS Start-End: 1-412
gagcggcgttcaggagctcgtgaagcaagtgctgagcaccctgcgagccatcgcaggcaacgacgacgtgaaagatgctattgtccgtgctggtgggacggagtccatcgtggctgctatgacccagcatctgaccagcccccaggtgtgtgagcagagctgcgcggccctgtgcttcctggccctgcgtaagcccgacaacagccgcatcatcgtggagggtggcggggctgtggcagcactgcaggccatgaaggcacacccgcagaaggccggcgtgcaggtgggcagggcaggggatgggggcaggcaggctggtgtgggatgtgcagaaacaggcttgcatgctgatccgaaacctggtggcccacggccaggccttctcgaagcccatcctggacctgggggctgaggcactcatcatgcaggcccgatctgcccaccgtgactgtgaggacgtggccaaggccgccctgcgggacctgggttgtcatgtcgagctccgagagctgtggacaggccagaggggcaacctggcgccatgaccccaggcccagtctgggccgtgactctgggtgagtcgtgtgactcaggaatgggggtagatccatgtcctccactgtcccccattagttctgtccccttcacaatgagaagtgttttctggcaggccctaggtaaagggtcgggggaggggggagccttgtagggaggcctctacacagaagaaagcagcccccatgtcccagccacttctgggtcccagccagcagcacggatgttactgtcctgctccttcccccagccccacgccctaccagagggggcaaagggcacgtcccatcactcactgccctgtctgaaatgtggcagccactgtgggccaggctcagggcagggcaggcgattccagtggggttgggccccctggcgcctgctgcttactgcagtttcatgcaggcctctgctccttgtctttcttacctgtaaaatgggtctcagatgctccgccctgcttggccccagcttgtctgtctctgggtcctgggcca

SEQ ID NO: 108803 - DNA, 1079 bp, Homo sapiens
  Payload ID: 1376
  Gene Symbol: ARMC6
  Gene Name: armadillo repeat containing 6
  ENST ID: ENST00000545091
  CDS Start-End: 155-286
aggggcgccacagcgcctgcgcgcgtacggcggccggaaggggctagaggcggctccctgggtgacaaccgcgcgccccacctttccccacgtggccgcgaagaccggctcaggagcatctatcggctgcacgccaacatcaacacaggcgaagatggtctccaagcgcattgcccaggagacctttgatgcagctgtgcgcgagaacatcgaggagtttgcgatggggccagaggaggcagtgaaagaggccgtggagcagtttgaatcgcaagatgctcagtgacctccaggagtctgtggccagctctcgcccccaggaggtgtcagcatacctcacccgcttctgcgaccagtgcaaacaggacaaggcctgccgcttcctcgcggcccagaagggggcctaccccatcatcttcactgcctggaagctggccactgcaggtgaccagggccttctgctccagtccctcaatgccctgtcggtgctgactgatggacagccagacctcctggatgcccagggcctgcagctcctagtggccacgctgacccagaatgctgatgaggctgacctgacctgctctgggatccgctgtgtgcgtcacgcttgcctgaaacatgaacagaatcggcaagacctggtgaaagctggcgtgctgcctctgctgactggtgccatcacccatcatggccaccacactgacgtggtcagggaagcctgctgggccctgcgtgtcatgaccttcgatgacgacatccgtgtgccctttggccatgcccacaaccatgccaagatgattgtgcaggagaacaaaggcttgaaggtgctcatcgaagccaccaaagcgttcctggataaccctggcatcctgagcgagctctgtggaaccctgtcccgcctggccattcgcaacgagttctgccaggaggtcgtcgacctcgggggcctgagcattctggtgtccctgctagccgactgcaatgaccaccagatgagggaccagagcggcgttcaggagctcgtgaagcaagtgctgagcaccctgcgagccatcgcaggcaacgacgacgtgaaa

SEQ ID NO: 108804 - DNA, 1814 bp, Homo sapiens
  Payload ID: 1376
  Gene Symbol: ARMC6
  Gene Name: armadillo repeat containing 6
  ENST ID: ENST00000546344
  CDS Start-End: 319-1545
tctcttgcgcaagcgcgctgtccgcttcttctgggcggacgctctggaggcaaaacatttccctgctgggggcggcgaccaccgtgagcgtcccggaaggggcggcaaagacgcctccgtcgcgcacgaggtggcctcgttggctttaccttggttcgcggtcgtccttggttatcgtgagcgtccgcgagtctctgggaggccaagcctaggggcgccacagcgcctgcgcgcgtacggcggccggaaggggctagaggcggctccctgggtgacaaccgcgcgccccacctttccccacgtggccgcgaagaccggatgctcagtgacctccaggagtctgtggccagctctcgcccccaggaggtgtcagcatacctcacccgcttctgcgaccagtgcaaacaggacaaggcctgccgcttcctcgcggcccagaagggggcctaccccatcatcttcactgcctggaagctggccactgcaggtgaccagggccttctgctccagtccctcaatgccctgtcggtgctgactgatggacagccagacctcctggatgcccagggcctgcagctcctagtggccacgctgacccagaatgctgatgaggctgacctgacctgctctgggatccgctgtgtgcgtcacgcttgcctgaaacatgaacagaatcggcaagacctggtgaaagctggcgtgctgcctctgctgactggtgccatcacccatcatggccaccacactgacgtggtcagggaagcctgctgggccctgcgtgtcatgaccttcgatgacgacatccgtgtgccctttggccatgcccacaaccatgccaagatgattgtgcaggagaacaaaggcttgaaggtgctcatcgaagccaccaaagcgttcctggataaccctggcatcctgagcgagctctgtggaaccctgtcccgcctggccattcgcaacgagttctgccaggaggtcgtcgacctcgggggcctgagcattctggtgtccctgctagccgactgcaatgaccaccagatgagggaccagagcggcgttcaggagctcgtgaagcaagtgctgagcaccctgcgagccatcgcaggcaacgacgacgtgaaagatgctattgtccgtgctggtgggacggagtccatcgtggctgctatgacccagcatctgaccagcccccaggtgtgtgagcagagctgcgcggccctgtgcttcctggccctgcgtaagcccgacaacagccgcatcatcgtggagggtggcggggctgtggcagcactgcaggccatgaaggcacacccgcagaaggccggcgtgcagaaacaggcttgcatgctgatccgaaacctggtggcccacggccaggccttctcgaagcccatcctggacctgggggctgaggcactcatcatgcaggcccgatctgcccaccgtgactgtgaggacgtggccaaggccgccctgcgggacctgggttgtcatgtcgagctccgagagctgtggacaggccagaggggcaacctggcgccatgaccccaggcccagtctgggccgtgactctggcaggcccccagcttccgtggaatccagccgatgcaaacagctgaggagcgtcaccctggctgcacctctccgtggtgtccccgtctcccctgcccccagcaggaaagggtgctctcagctcagcagggctggcccaaacctctgacccagtcaccccgccctatccctcctccctggagactcccaggatgtgggagaaagatctcgaatctgccccagactgccctgacttaacttct

SEQ ID NO: 108805 - DNA, 505 bp, Homo sapiens
  Payload ID: 1376
  Gene Symbol: ARMC6
  Gene Name: armadillo repeat containing 6
  ENST ID: ENST00000535758
  CDS Start-End: 10-222
tacaaataaatgagtgaacgatgttgctctagatacagccaggctggagtgcaatggcatgatctcggctcactgcaacctccgcctctgtgctcaagtggttctcctacctcggtctccctgattgctgggattacagacctcaggagcatctatcggctgcacgccaacatcaacacaggcgaagatggtctccaagcgcattgcccaggagacctttgatgcagctgtgcgcgagaacatcgaggagtttgcgatggggccagaggaggcagtgaaagaggccgtggagcagtttgaatcgcaaggggttgatctgagcaacattgtaaagacggcacctaaagtctctgcagacggatcccaggagcccacacatgacatcctgcagatgctcagtgacctccaggagtctgtggccagctctcgcccccaggaggtgtcagcatacctcacccgcttctgcgaccagtgcaaacaggacaaggcctgccgcttcctcgcg

SEQ ID NO: 108806 - DNA, 1198 bp, Homo sapiens
  Payload ID: 1376
  Gene Symbol: ARMC6
  Gene Name: armadillo repeat containing 6
  ENST ID: ENST00000541898
  CDS Start-End: 421-1198
cgcttcttctgggcggacgctctggaggcaaaacatttccctgctgggggcggcgaccaccgtgagcgtcccggaaggggcggcaaagacgcctccgtcgcgcacgaggtggcctcgttggctttaccttggttcgcggtcgtccttggttatcgtgagcgtccgcgagtctctgggaggccaagcctaggggcgccacagcgcctgcgcgcgtacggcggccggaaggggctagaggcggctccctgggtgacaaccgcgcgccccacctttccccacgtggccgcgaagaccgggtgagacgctgcggctgccgaggcctgtcccgcgcggagtggggagtgggggtgccgcagggtcgggctggcgcgaccctcgggagcatctatcggctgcacgccaacatcaacacaggcgaagatggtctccaagcgcattgcccaggagacctttgatgcagctgtgcgcgagaacatcgaggagtttgcgatggggccagaggaggcagtgaaagaggccgtggagcagtttgaatcgcaaggggttgatctgagcaacattgtaaagacggcacctaaagtctctgcagacggatcccaggagcccacacatgacatcctgcagatgctcagtgacctccaggagtctgtggccagctctcgcccccaggaggtgtcagcatacctcacccgcttctgcgaccagtgcaaacaggacaaggcctgccgcttcctcgcggcccagaagggggcctaccccatcatcttcactgcctggaagctggccactgcaggtgaccagggccttctgctccagtccctcaatgccctgtcggtgctgactgatggacagccagacctcctggatgcccagggcctgcagctcctagtggccacgctgacccagaatgctgatgaggctgacctgacctgctctgggatccgctgtgtgcgtcacgcttgcctgaaacatgaacagaatcggcaagacctggtgaaagctggcgtgctgcctctgctgactggtgccatcacccatcatggccaccacactgacgtggtcagggaagcctgctgggccctgcgtgtcatgaccttcgatgacgacatccgtgtgccctttggccatgcccacaaccatgccaagatgattgtgcaggagaacaaaggcttgaaggtgctcatcgaagccaccaaag

SEQ ID NO: 108807 - DNA, 560 bp, Homo sapiens
  Payload ID: 1376
  Gene Symbol: ARMC6
  Gene Name: armadillo repeat containing 6
  ENST ID: ENST00000541725
  CDS Start-End: 71-560
ggctctcttgcgcaagcgcgctgtccgcttcttctgggcggacgctctggaggctacagggtacaaataaatgagtgaacgatgttgctctagatacagctcaggagcatctatcggctgcacgccaacatcaacacaggcgaagatggtctccaagcgcattgcccaggagacctttgatgcagctgtgcgcgagaacatcgaggagtttgcgatggggccagaggaggcagtgaaagaggccgtggagcagtttgaatcgcaaggggttgatctgagcaacattgtaaagacggcacctaaagtctctgcagacggatcccaggagcccacacatgacatcctgcagatgctcagtgacctccaggagtctgtggccagctctcgcccccaggaggtgtcagcatacctcacccgcttctgcgaccagtgcaaacaggacaaggcctgccgcttcctcgcggcccagaagggggcctaccccatcatcttcactgcctggaagctggccactgcaggtgaccagggccttctgctccagtccctcaatgccctgtcgg

SEQ ID NO: 108808 - DNA, 762 bp, Homo sapiens
  Payload ID: 1376
  Gene Symbol: ARMC6
  Gene Name: armadillo repeat containing 6
  ENST ID: ENST00000535478
  CDS Start-End: 1-436
ggaggtcgtcgacctcgggggcctgagcattctggtgtccctgctagccgactgcaatgaccaccagatgagggaccagagcggcgttcaggagctcgtgaagcaagtgctgagcaccctgcgagccatcgcaggcaacgacgacgtgaaagatgctattgtccgtgctggtgggacggagtccatcgtggctgctatgacccagcatctgaccagcccccagaaacaggcttgcatgctgatccgaaacctggtggcccacggccaggccttctcgaagcccatcctggacctgggggctgaggcactcatcatgcaggcccgatctgcccaccgtgactgtgaggacgtggccaaggccgccctgcgggacctgggttgtcatgtcgagctccgagagctgtggacaggccagaggggcaacctggcgccatgaccccaggcccagtctgggccgtgactctgggtgagtcgtgtgactcaggaatgggggtagatccatgtcctccactgtcccccattagttctgtccccttcacaatgagaagtgttttctggcaggccctaggtaaagggtcgggggaggggggagccttgtagggaggcctctacacagaagaaagcagcccccatgtcccagccacttctgggtcccagccagcagcacggatgttactgtcctgctccttcccccagccccacgccctaccagagggggcaaagggcacgtcccatcactcactgccctgtctgaaatgtggc

SEQ ID NO: 108809 - DNA, 2126 bp, Homo sapiens
  Payload ID: 1377
  Gene Symbol: ARMC7
  Gene Name: armadillo repeat containing 7
  Uniprot ID: Q9H6L4
  ENST ID: ENST00000245543
  CDS Start-End: 303-899
cggggacggtgcgccagtgccccctccgcgagccccaaccagtagacggttccctgtctcccgcgccccaatttcgattttcaaacgcaactcctacaggattctgagaccccgtcccatctcccatatcccatttccagctgcaaattactgcagaatctgaacccaggaaagaaacccatttgccgaccccctcttccctctccagacaggtggagagcgggtgagggtctcgctcggctttccccctgcacctttcccaccctcccgcccgtccctgggggtcctccgtcaccgcggccatggcccagaagccgaaggtggacccccacgtcgggcggctgggatacctgcaggcgctggtcacggaattccaggagacccaaagccaagacgccaaggagcaagtcctcgccaacctcgccaacttcgcttatgaccccagcaactacgagtatctgcggcagctgcaggtcctggatttatttctcgattcgctgtcggaggagaatgagaccctggtggagtttgctattggaggcctgtgcaacctgtgcccagacagggccaacaaggagcacatcctgcacgcaggaggtgtcccactcatcatcaactgcctatccagccccaatgaggagacggtgctgtctgccatcaccacgctcatgcacctgagcccgccgggccgcagctttctcccagagctgaccgccacgcccgtggtgcagtgcatgcttcgcttctccctctcggccagcgccaggctccggaacctggcacagatcttcctggaggacttctgctccccccgccaggtggccgaggcccgcagccggcaggcgcactctgccctgggtatcccactgccgaggagcgtggccccacggcagcgctgatccatggagactgcgagaccgtggcacccctactgctggagaccacagtcctgatgtggacgcagggaacggggagcacatactgccccattggtgccttttcagccatctgaaaggcgggttctttcagcaggacaggcatttacactgatgaaacgccactgggagtgaggaagccagactccagagacacggagaagatcaaactggagctgcgttcataggctggcactctcaatcctacatcaggtgccaccaccaccagactcaggccctggtgtaagaagcggccaagtgcctggacccagaggctttgcaggacagtgttctcaggagctgggcctgaggcttaggagagctgccttcgctgcaggaaatcagggattatcccttaacagaagtgtctggagtagttttcaggtataggaatgagatgcctcgtggtgaaaggatctcaccctgggaagatgtggtgccccctccagggctctggaggatggatgcctcccccaggggctctccaagctgggcatttgggcctggtggatgccaacctggataacctgtggcccagcattgactgtccacccagccttgctgttaggcaccatgactccaagatgaagatgtggtccctgcccttgagtgacagcccagggacttaatgtggccatcgggcatcaagcacaaggccatgcaggtgatgatacgtcggaatagaggcaccagccctggtaactgcatcttctccccttgccaccccatggccccggctgaaagcttcggccctcctctgctgtcactcaatgatggggagccctaccccagaagtgtatcccacgagggcatcagggacgcagtgagtgttgctcaagggagtcaggaagagacggcaacgtaaaggatgtggctccatgtccatggtgccccctggtcaacataaggagcgtgggatccgatggaaaggtggagctcagggaaaatgggggtccttgcctctcgtgtaccccctcaaggctgaccccttagatggcccaggaatggcaggtgctacaaaaatggtacccacgtgggcatggaaatggggcagattaggggaccactggactcagaggggagggaagggctcatcagcacccgctcagggagcctgtccctttatgttcccaaataaagggtcctagaagactagaaagccaaggtcttttattaaaggtcccgactggt

SEQ ID NO: 108810 - DNA, 1204 bp, Homo sapiens
  Payload ID: 1377
  Gene Symbol: ARMC7
  Gene Name: armadillo repeat containing 7
  ENST ID: ENST00000582136
  CDS Start-End: 312-560
cccaggagccggggacggtgcgccagtgccccctccgcgagccccaaccagtagacggttccctgtctcccgcgccccaatttcgattttcaaacgcaactcctacaggattctgagaccccgtcccatctcccatatcccatttccagctgcaaattactgcagaatctgaacccaggaaagaaacccatttgccgaccccctcttccctctccagacaggtggagagcgggtgagggtctcgctcggctttccccctgcacctttcccaccctcccgcccgtccctgggggtcctccgtcaccgcggccatggcccagaagccgaaggtggacccccacgtcgggcggctgggatacctgcaggcgctggtcacggaattccaggagacccaaagccaagacgccaaggagcaagtcctcgccaacctcgccaacttcgcttatgaccccagcaactacgagtatctgcggcagctgcaggtcctggatttatttctcgattcgctgtcggaggagaatgagaccctggtggagtttgctattgctgctgcagtctgaacggtgacggtggcccctgcagaagcatgtggctaaatctccaccagggggcgatagagctcctccaaatcaagctgctgcccctggagaaaaattggcggaagtcacagagcagtccccaccaaaagtgtttaccaagtggagtctttcctgctggcgtttcctcagggtcaggaagcaactttcccaggacaggggcaccctgaggtccgggtccactgagctatgggggcggcgtgggcctgggctgggttcttgccatcctgggcagcttcccggcgtgggtgactgagcccgggtcctggagtccgcggtcccagcgtctccacttctcagctgattcctagaagctgagtcccgtcccttctccgagcgtggtttcctctcccgccttgcctgcgtcgcaagcagttgtgggagcagaagtgtgtctgtgcatctgtgtctctgtgcaggtattttagaattgttaggatcattatcaccagctttacttttcccaaccatttttttcctcctttttttctcttccttcttctgccacagcaagacccccccgccccaagcacagtagctttctcagcgtcgaatccctccgtgggaccatgttgcaatgaaatttcaacatgcaaatgaaatttctc

SEQ ID NO: 108811 - DNA, 445 bp, Homo sapiens
  Payload ID: 1377
  Gene Symbol: ARMC7
  Gene Name: armadillo repeat containing 7
  ENST ID: ENST00000584947
  CDS Start-End: 109-414
tcttccctctccagacaggtggagagcgggtgagggtctcgctcggctttccccctgcacctttcccaccctcccgcccgtccctgggggtcctccgtcaccgcggccatggcccagaagccgaaggtggacccccacgtcgggcggctgggatacctgcaggcgctggtcacggaattccaggagacccaaagccaagacgccaaggagcaagtcctcgccaacctcgccaacttcgcttatgaccccagcaactacgagtatctgcggcagctgcaggtcctggatttatttctcgattcgctgtcggaggagaatgagaccctggtggagtttgctattgcaagacccccccgccccaagcacagtagctttctcagcgtcgaatccctccgtgggaccatgttgcaatgaaatttcaacatgcaaatgaaatttctcgaaa

SEQ ID NO: 108812 - DNA, 1002 bp, Homo sapiens
  Payload ID: 1377
  Gene Symbol: ARMC7
  Gene Name: armadillo repeat containing 7
  Uniprot ID: Q9H6L4
  ENST ID: ENST00000581078
  CDS Start-End: 338-649
gcttccgccgggagcccggaaccgagcccaggagccggggacggtgcgccagtgccccctccgcgagccccaaccagtagacggttccctgtctcccgcgccccaatttcgattttcaaacgcaactcctacaggattctgagaccccgtcccatctcccatatcccatttccagctgcaaattactgcagaatctgaacccaggaaagaaacccatttgccgaccccctcttccctctccagacaggtggagagcgggtgagggtctcgctcggctttccccctgcacctttcccaccctcccgcccgtccctgggggtcctccgtcaccgcggccatggcccagaagccgaaggtggacccccacgtcgggcggctgggatacctgcaggcgctggtcacggaattccaggagacccaaagccaagacgccaaggagcaagtcctcgccaacctcgccaacttcgcttatgaccccagcaactacgagtatctgcggcagctgcaggaggcctgtgcaacctgtgcccagacagggccaacaaggagcacatcctgcacgcaggaggtgtcccactcatcatcaactgcctatccagccccaatgaggagacggtgctgtctgccatcaccacgctcatgcacctgagcccgccgggccgcagctttctcccagagctgaccgccacgcccgtggtgcagtgcatgcttcgcttctccctctcggccagcgccaggctccggaacctggcacagatcttcctggaggacttctgctccccccgccaggtggccgaggcccgcagccggcaggcgcactctgccctgggtatcccactgccgaggagcgtggccccacggcagcgctgatccatggagactgcgagaccgtggcacccctactgctggagaccacagtcctgatgtggacgcagggaacggggagcacatactgccccattggtgccttttcagccatctgaaaggcgggttctttcagca

SEQ ID NO: 108813 - DNA, 3181 bp, Homo sapiens
  Payload ID: 1378
  Gene Symbol: ARMC8
  Gene Name: armadillo repeat containing 8
  Uniprot ID: Q8IUR7
  ENST ID: ENST00000358441
  CDS Start-End: 386-1543
gagagaacgattcgtaggacagcccctgacgccattcccttttgcccttctttctgcgggcctttccggtacttgagcggtgtccagagcgtggccagttctcgtctatctggctgcctttagggagcggtgcctagcgttggccaatagttggctgtcgaaagtgccggcccccgcgccggcgcctgcagcagccgggtgggaaggctcaagatggcgtgcttgttggagaccccaatccgcatgagcgtcctttcgtttttttaaagaaaaagacgactttcacctttcactatgttgctcttgaaccaggaccaggaatgaaagttactgggagataacttcgaaggattttgcaacaaattcgagctgtccgactctgagaatggaagtaacagctagcagtcgccactatgttgacaggctatttgaccctgatccccagaaagttctacaaggtgtcatagacatgaaaaatgctgtaattggaaacaacaagcagaaagccaatctcattgttttaggagctgttccaagattgttgtacttgcttcagcaagaaacctcaagcacagagctgaaaactgaatgtgcagtggtgttgggaagtcttgctatgggtactgaaaacaatgtcaagtctctactggactgccatattatccctgccttattgcaaggactactgtccccagacctgaagtttattgaagcttgcctccgatgcctgcgtaccatcttcaccagtcctgtcactccagaggagctactgtatacagatgccacagtgataccacacctcatggcactgcttagcaggtcccgctatacccaggagtacatctgtcagatcttctcacactgctgtaaagggccagatcatcaaacaattttatttaaccacggtgcagttcagaatattgctcacctactaacctcactgtcctacaaagttcgaatgcaagcactgaaatgtttctcagttttagcttttgaaaacccccaggtatcgatgaccctggtaaatgttttggttgatggagaattgttaccacagatttttgtgaagatgttacagagggataagcctattgagatgcagctcacatcagcaaaatgtttaacttacatgtgtagagctggagcaattcggacagatgataactgtattgtattaaagacattaccttgtttggttcgaatgtgcagtaaggagagattactagaggagagagttgaaggagctgagacacttgcctatctgattgaaccagatgttgagctacagagaatcgctagcataactgatcacctcattgccatgcttgctgattatttcaagtatcccagctcagtgagtgccatcactgatattaaaaggcttgatcatgatttaaaacatgctcacgaactccgccaggctgcattcaagctctatgcctctcttggagcaaatgatgaagacatccggaagaaggtgagtctgggagaggggcgtcccccagtcctgacagccagcaggcagggagtgacgtcaacctgaaagtcgtggtgaagagcactaacagtgactgtttgaatataataaagcagagtgactaaaggcataattgaagaatgaatgggacccggatttggggggttgtttgtttgtttttagaacatagagtggcatggccgtgctggaatgacaaataactggcgtgctttttttttgtgtcattaatatgaattattatgttgcacatttttgcatgtgttctgataaaaatcaattctagcactgtgaagcttcagacaccttgaaagtcctaacattagaattgtaaatgttatttatggaaataccttccaatgctattgagaaattcaaatctctattgtatattgttctttgatatgtggcttagttttatgttttgattttttttgctactgtgcaagtttaatgtgaataaaatctttgtggaatgatgattttatgtttagtgagtggtcatctgaattttccagctccccagaaaatgtatgcactggtatagcacccttatgttactaaagcctagtctaacactgaactcatgttcttgatgagaatacttctagatgaggagtatagtggtaagtaagctctgacttggctccttccacaaaccaaaaagctggaacttaccactcaaaaacatgtataacctaataaattctacacaaggctttcaagaccatcagagagcaaaaccacatgttctgtcttgaggagccatagcagaaagagcaaattagtcattatttactgaacatgatgatttactaaatctctccatctgcattagtattttaaggagcactgtgagagaaatcacaaagtattagagtttaccatgattcagagaagttcttcaggcctgtagaaagaggagtatggaacaaccttacatttgttgaaataacttgaaaaggaaccatttcttgaagaaactgaagtaatagcaataagatttgatgtgtgagtagctttgatttaaaatcaatgcaaaaagcacaactaataaattgaatgtttccatgtacctcactttatttcagttaacaagatactttgacttgaagtgtttttagtgtatccctatgaaaatcatttttggtacatctaagttttcacttataaactgttatttcaaagcaaacatactagtgatatatatatgatttatggatgttgacgccaatgttcagtttgggtacgttggtgtattgcaaggggagaggcttttataacaatagatttgaacatttttaaaaaattggactgtgtaacttaaatacacaattatttggtttaggatggttattagggcccattagaaacaggagaagtattttacccattcttaaagctctaaaaaaccatctcatggactgaaaggtagatagacagatggaccacaatgggaaataggatgtccatttgtacttctttgtacttttttgttaataaactgttttggaattaatggcttaatttgtgatatcatgttctagaaatacctgcaacatgacagtctaatcagtagtctattaaaacttgtattcataatgtgtataatttcctggtaaggctaactcctgatcgtttctgtagaaagatgacaaataaagaaaaagttataattattaatta

SEQ ID NO: 108814 - DNA, 1920 bp, Homo sapiens
  Payload ID: 1378
  Gene Symbol: ARMC8
  Gene Name: armadillo repeat containing 8
  ENST ID: ENST00000485396
  CDS Start-End: 77-1879
tgcagcagccgggtgggaaggctcaagatggcgtgcttgttggagaccccaatccgcatgagcgtcctttcgagacatgaaaaatgctgtaattggaaacaacaagcagaaagccaatctcattgttttaggagctgttccaagattgttgtacttgcttcagcaagaaacctcaagcacagagctgaaaactgaatgtgcagtggtgttgggaagtcttgctatgggtactgaaaacaatgtcaagtctctactggactgccatattatccctgccttattgcaaggactactgtccccagacctgaagtttattgaagcttgcctccgatgcctgcgtaccatcttcaccagtcctgtcactccagaggagctactgtatacagggccagatcatcaaacaattttatttaaccacggtgcagttcagaatattgctcacctactaacctcactgtcctacaaagttcgaatgcaagcactgaaatgtttctcagttttagcttttgaaaacccccaggtatcgatgaccctggtaaatgttttggttgatggagaattgttaccacagatttttgtgaagatgttacagagggataagcctattgagatgcagctcacatcagcaaaatgtttaacttacatgtgtagagctggagcaattcggacagatgataactgtattgtattaaagacattaccttgtttggttcgaatgtgcagtaaggagagattactagaggagagagttgaaggagctgagacacttgcctatctgattgaaccagatgttgagctacagagaatcgctagcataactgatcacctcattgccatgcttgctgattatttcaagtatcccagctcagtgagtgccatcactgatattaaaaggcttgatcatgatttaaaacatgctcacgaactccgccaggctgcattcaagctctatgcctctcttggagcaaatgatgaagacatccggaagaagatcattgagactgaaaatatgatggaccgaattgtgactggcttgtctgagtctagtgtcaaggtgcggttagctgccgtcagatgtttgcacagtttatccagatctgtgcagcagcttcgaaccagtttccaggatcatgctgtttggaaacctttaatgaaggttttacaaaatgcaccagatgaaatcctagtggtagcatcttccatgctgtgtaatcttcttcttgaattttctccaagcaaagagccaattttggaatcaggagccgtagagctactttgtggattaactcagagtgaaaatcctgctttacgagtgaatggaatttgggctttaatgaatatggcatttcaggctgaacaaaaaataaaagcagatattttacgaagcttgagtactgaacagctattccggttattatcagattcagatttgaatgtgctgatgaagacattgggacttcttagaaatctcctctccactcgtcctcatatagataaaataatgagtactcatggaaagcaaattatgcaagccgtcactcttattctagaaggggaacataacattgaggtcaaagagcagacactgtgcatcttagccaacatagcggatgggacaacagcaaaagatcttattatgaccaatgatgatatcctacagaaaatcaagtattacatgggccattcacatgttaaactgcagcttgcagccatgttttgtatatcaaacctcatatggaatgaagaggaaggttcacaagaacgccaggataaattacgagacatgggcatcgtagatattctacacaaactgagtcagtcaccagattcaaacctttgtgacaaggcaaagatggcactgcagcagtacctggcatgatgggagtgcccctgggcacctgcgagcatcccacctccttg

SEQ ID NO: 108815 - DNA, 2777 bp, Homo sapiens
  Payload ID: 1378
  Gene Symbol: ARMC8
  Gene Name: armadillo repeat containing 8
  Uniprot ID: Q8IUR7
  ENST ID: ENST00000491704
  CDS Start-End: 380-2275
gcttccacctctaacccaggctcagagtagctgctgtttctgagagaacgattcgtaggacagcccctgacgccattcccttttgcccttctttctgcgggcctttccggtacttgagcggtgtccagagcgtggccagttctcgtctatctggctgcctttagggagcggtgcctagcgttggccaatagttggctgtcgaaagtgccggcccccgcgccggcgcctgcagcagccgggtgggaaggctcaagatggcgtgcttgttggagaccccaatccgcatgagcgtcctttcggaccaggaatgaaagttactgggagataacttcgaaggattttgcaacaaattcgagctgtccgactctgagaatgagacatgaaaaatgctgtaattggaaacaacaagcagaaagccaatctcattgttttaggagctgttccaagattgttgtacttgcttcagcaagaaacctcaagcacagagctgaaaactgaatgtgcagtggtgttgggaagtcttgctatgggtactgaaaacaatgtcaagtctctactggactgccatattatccctgccttattgcaaggactactgtccccagacctgaagtttattgaagcttgcctccgatgcctgcgtaccatcttcaccagtcctgtcactccagaggagctactgtatacagatgccacagtgataccacacctcatggcactgcttagcaggtcccgctatacccaggagtacatctgtcagatcttctcacactgctgtaaagggccagatcatcaaacaattttatttaaccacggtgcagttcagaatattgctcacctactaacctcactgtcctacaaagttcgaatgcaagcactgaaatgtttctcagttttagcttttgaaaacccccaggtatcgatgaccctggtaaatgttttggttgatggagaattgttaccacagatttttgtgaagatgttacagagggataagcctattgagatgcagctcacatcagcaaaatgtttaacttacatgtgtagagctggagcaattcggacagatgataactgtattgtattaaagacattaccttgtttggttcgaatgtgcagtaaggagagattactagaggagagagttgaaggagctgagacacttgcctatctgattgaaccagatgttgagctacagagaatcgctagcataactgatcacctcattgccatgcttgctgattatttcaagtatcccagctcagtgagtgccatcactgatattaaaaggcttgatcatgatttaaaacatgctcacgaactccgccaggctgcattcaagctctatgcctctcttggagcaaatgatgaagacatccggaagaagatcattgagactgaaaatatgatggaccgaattgtgactggcttgtctgagtctagtgtcaaggtgcggttagctgccgtcagatgtttgcacagtttatccagatctgtgcagcagcttcgaaccagtttccaggatcatgctgtttggaaacctttaatgaaggttttacaaaatgcaccagatgaaatcctagtggtagcatcttccatgctgtgtaatcttcttcttgaattttctccaagcaaagagccaattttggaatcaggagccgtagagctactttgtggattaactcagagtgaaaatcctgctttacgagtgaatggaatttgggctttaatgaatatggcatttcaggctgaacaaaaaataaaagcagatattttacgaagcttgagtactgaacagctattccggttattatcagattcagatttgaatgtgctgatgaagacattgggacttcttagaaatctcctctccactcgtcctcatatagataaaataatgagtactcatggaaagcaaattatgcaagccgtcactcttattctagaaggggaacataacattgaggtcaaagagcagacactgtgcatcttagccaacatagcggatgggacaacagcaaaagatcttattatgaccaatgatgatatcctacagaaaatcaagtattacatgggccattcacatgttaaactgcagcttgcagccatgttttgtatatcaaacctcatatggaatgaagaggaaggttcacaagaacgccaggataaattacgagacatgggcatcgtagatattctacacaaactgagtcagtcaccagattcaaacctttgtgacaaggcaaagatggcactgcagcagtacctggcatgatgggagtgcccctgggcacctgcgagcatcccacctccttgtttaaggaagtacaggaaccagcctcatttgattccttctatttgcacaagtcaccttggactgcagggagctgttttgcaaaagcagtttagtaggcttagatctcaaattcatcttgagaacatttttttgaggtagtaatttcctcagaagactcttgtgttttgttttggtttttttttctgagctactcggactctttattagaacaatcaatcattttcctttggacctacaatttttgcctatgctgcagccactttgtgagtgagaatgaatatgtctgtgtgaacacacaggcatgcgtgtgtatgtgcacgtacatgggccagaatgaatggatgtgtgtgtgtgagggatacctcagatttttcttttcttattttgtgtgaaaatctcttttctacagattttccagggtttaagcattgcttgctgtataaaaaactttactgaatta

SEQ ID NO: 108816 - DNA, 1059 bp, Homo sapiens
  Payload ID: 1378
  Gene Symbol: ARMC8
  Gene Name: armadillo repeat containing 8
  ENST ID: ENST00000463485
  CDS Start-End: 4-1059
aagatggcgtgcttgttggagaccccaatccgcatgagcgtcctttcgagacatgaaaaatgctgtaattggaaacaacaagcagaaagccaatctcattgttttaggagctgttccaaggatgccacagtgataccacacctcatggcactgcttagcaggtcccgctatacccaggagtacatctgtcagatcttctcacactgctgtaaagggccagatcatcaaacaattttatttaaccacggtgcagttcagaatattgctcacctactaacctcactgtcctacaaagttcgaatgcaagcactgaaatgtttctcagttttagcttttgaaaacccccaggtatcgatgaccctggtaaatgttttggttgatggagaattgttaccacagatttttgtgaagatgttacagagggataagcctattgagatgcagctcacatcagcaaaatgtttaacttacatgtgtagagctggagcaattcggacagatgataactgtattgtattaaagacattaccttgtttggttcgaatgtgcagtaaggagagattactagaggagagagttgaaggagctgagacacttgcctatctgattgaaccagatgttgagctacagagaatcgctagcataactgatcacctcattgccatgcttgctgattatttcaagtatcccagctcagtgagtgccatcactgatattaaaaggcttgatcatgatttaaaacatgctcacgaactccgccaggctgcattcaagctctatgcctctcttggagcaaatgatgaagacatccggaagaagatcattgagactgaaaatatgatggaccgaattgtgactggcttgtctgagtctagtgtcaaggtgcggttagctgccgtcagatgtttgcacagtttatccagatctgtgcagcagcttcgaaccagtttccaggatcatgctgtttggaaacctttaatgaaggttttacaaaatgcaccagatgaaatcctagtggtagcatcttccatgctgtgtaatcttcttcttgaattttct

SEQ ID NO: 108817 - DNA, 612 bp, Homo sapiens
  Payload ID: 1378
  Gene Symbol: ARMC8
  Gene Name: armadillo repeat containing 8
  ENST ID: ENST00000464181
  CDS Start-End: 1-271
attgggacttcttagaaatctcctctccactcgtcctcatatagataaaataatgagtactcatggaaagcaaattatgcaagccgtcactcttattctagaaggggaacataacattgaggtcaaagagcagacactgtgcatcttagccaacatagcggatgggacaacagcaaaagatcttattatgaccaatgatgatatcctacagaaaatcaagtattacatgggagcccaaactggacatctccttaaaagtgttggcagttagaagaagaaagaatcactagccatagaattctactggaggaagccacatccatttctttgtctctgcttagttgaaatatagtcctacatgagaagataagtctgtcttagccttgaaaaaaccattgagcatattttgccattgatactctctcagatgtgcataaattatttgaacatactagaaattttttttattgaccaataggacaatcatctataaagtttattttattattgagtcctttttcattcaggcgaaaacaccctatccaaagcaaccagaaatggttgtactttcagtacataaagcaaaataaataagaattgtatttagaagaa

SEQ ID NO: 108818 - DNA, 807 bp, Homo sapiens
  Payload ID: 1378
  Gene Symbol: ARMC8
  Gene Name: armadillo repeat containing 8
  ENST ID: ENST00000466749
  CDS Start-End: 417-807
aggctcagagtagctgctgtttctgagagaacgattcgtaggacagcccctgacgccattcccttttgcccttctttctgcgggcctttccggtacttgagcggtgtccagagcgtggccagttctcgtctatctggctgcctttagggagcggtgcctagcgttggccaatagttggctgtcgaaagtgccggcccccgcgccggcgcctgcagcagccgggtgggaaggctcaagatggcgtgcttgttggagaccccaatccgcatgagcgtcctttcgtttttttaaagaaaaagacgactttcacctttcactatgttgctcttgaaccaggaccaggaatgaaagttactgggagataacttcgaaggattttgcaacaaattcgagctgtccgactctgagaatgagacatgaaaaatgctgtaattggaaacaacaagcagaaagccaatctcattgttttaggagctgttccaagattgttgtacttgcttcagcaagaaacctcaagcacagagctgaaaactgaatgtgcagtggtgttgggaagtcttgctatgggtactgaaaacaatgtcaagtctctactggactgccatattatccctgccttattgcaaggactactgtccccagacctgaagtttattgaagcttgcctccgatgcctgcgtaccatcttcaccagtcctgtcactccagaggagctactgtatacagatgccacagtgataccacacctcatggcactgcttagcaggtcccgctatacccaggagtacatctgtcagatcttctcac

SEQ ID NO: 108819 - DNA, 731 bp, Homo sapiens
  Payload ID: 1378
  Gene Symbol: ARMC8
  Gene Name: armadillo repeat containing 8
  ENST ID: ENST00000461600
  CDS Start-End: 137-731
ccacctctaacccaggctcagagtagctgctgtttctgagagaacgattccggtgcctagcgttggccaatagttggctgtcgaaagtgccggcccccgcgccggcgcctgcagcagccgggtgggaaggctcaagatggcgtgcttgttggagaccccaatccgcatgagcgtcctttcggaagtaacagctagcagtcgccactatgttgacaggctatttgaccctgatccccagaaagttctacaaggtgtcatagacatgaaaaatgctgtaattggaaacaacaagcagaaagccaatctcattgttttaggagctgttccaagattgttgtacttgcttcagcaagaaacctcaagcacagagctgaaaactgaatgtgcagtggtgttgggaagtcttgctatgggtactgaaaacaatgtcaagtctctactggactgccatattatccctgccttattgcaaggactactgtccccagacctgaagtttattgaagcttgcctccgatgcctgcgtaccatcttcaccagtcctgtcactccagaggagctactgtatacagatgccacagtgataccacacctcatggcactgcttagcaggtcccgctatacccaggagtacatctgtcagatcttctcacactgctgtaaagggccagatcatcaaacaattttatttaaccacggtgcagttcagaatattgctcacctactaacct

SEQ ID NO: 108820 - DNA, 1656 bp, Homo sapiens
  Payload ID: 1378
  Gene Symbol: ARMC8
  Gene Name: armadillo repeat containing 8
  ENST ID: ENST00000470821
  CDS Start-End: 25-1224
agcagccgggtgggaaggctcaagatggcgtgcttgttggagaccccaatccgcatgagcgtcctttcggaagtaacagctagcagtcgccactatgttgacaggctatttgaccctgatccccagaaagttctacaaggtgtcatagacatgaaaaatgctgtaattggaaacaacaagcagaaagccaatctcattgttttaggagctgttccaagattgttgtacttgcttcagcaagaaacctcaagcacagagctgaaaactgaatgtgcagtggtgttgggaagtcttgctatgggtactgaaaacaatgtcaagtctctactggactgccatattatccctgccttattgcaaggactactgtccccagacctgaagtttattgaagcttgcctccgatgcctgcgtaccatcttcaccagtcctgtcactccagaggagctactgtatacagatgccacagtgataccacacctcatggcactgcttagcaggtcccgctatacccaggagtacatctgtcagatcttctcacactgctgtaaagggccagatcatcaaacaattttatttaaccacggtgcagttcagaatattgctcacctactaacctcactgtcctacaaagttcgaatgcaagcactgaaatgtttctcagttttagcttttgaaaacccccaggtatcgatgaccctggtaaatgttttggttgatggagaattgttaccacagatttttgtgaagatgttacagagggataagcctattgagatgcagctcacatcagcaaaatgtttaacttacatgtgtagagctggagcaattcggacagatgataactgtattgtattaaagacattaccttgtttggttcgaatgtgcagtaaggagagattactagaggagagagttgaaggagctgagacacttgcctatctgattgaaccagatgttgagctacagagaatcgctagcataactgatcacctcattgccatgcttgctgattatttcaagtatcccagctcagtgagtgccatcactgatattaaaaggcttgatcatgatttaaaacatgctcacgaactccgccaggctgcattcaagctctatgcctctcttggagcaaatgatgaagacatccggaagaaggtgagtctgggagaggggcgtcccccagtcctgacagccagcaggcagggagtgacgtcaacctgaaagtcgtggtgaagagcactaacagtgactgtttgaatataataaagcagagtgactaaaggcataattgaagaatgaatgggacccggatttggggggttgtttgtttgtttttagaacatagagtggcatggccgtgctggaatgacaaataactggcgtgctttttttttgtgtcattaatatgaattattatgttgcacatttttgcatgtgttctgataaaaatcaattctagcactgtgaagcttcagacaccttgaaagtcctaacattagaattgtaaatgttatttatggaaataccttccaatgctattgagaaattcaaatctctattgtatattgttctttgatatgtggcttagttttatgttttgattttttttgctactgtgcaagtttaatgtgaataaaatctttgtggaatgat

SEQ ID NO: 108821 - DNA, 1714 bp, Homo sapiens
  Payload ID: 1378
  Gene Symbol: ARMC8
  Gene Name: armadillo repeat containing 8
  ENST ID: ENST00000489213
  CDS Start-End: 255-1328
gattcgtaggacagcccctgacgccattcccttttgcccttctttctgcgggcctttccggtacttgagcggtgtccagagcgtggccagttctcgtctatctggctgcctttagggagcggtgcctagcgttggccaatagttggctgtcgaaagtgccggcccccgcgccggcgcctgcagcagccgggtgggaaggctcaagatggcgtgcttgttggagaccccaatccgcatgagcgtcctttcgagacatgaaaaatgctgtaattggaaacaacaagcagaaagccaatctcattgttttaggagctgttccaagattgttgtacttgcttcagcaagaaacctcaagcacagagctgaaaactgaatgtgcagtggtgttgggaagtcttgctatgggtactgaaaacaatgtcaagtctctactggactgccatattatccctgccttattgcaaggactactgtccccagacctgaagtttattgaagcttgcctccgatgcctgcgtaccatcttcaccagtcctgtcactccagaggagctactgtatacagatgccacagtgataccacacctcatggcactgcttagcaggtcccgctatacccaggagtacatctgtcagatcttctcacactgctgtaaagggccagatcatcaaacaattttatttaaccacggtgcagttcagaatattgctcacctactaacctcactgtcctacaaagttcgaatgcaagcactgaaatgtttctcagttttagcttttgaaaacccccaggtatcgatgaccctggtaaatgttttggttgatggagaattgttaccacagatttttgtgaagatgttacagagggataagcctattgagatgcagctcacatcagcaaaatgtttaacttacatgtgtagagctggagcaattcggacagatgataactgtattgtattaaagacattaccttgtttggttcgaatgtgcagtaaggagagattactagaggagagagttgaaggagctgagacacttgcctatctgattgaaccagatgttgagctacagagaatcgctagcataactgatcacctcattgccatgcttgctgattatttcaagtatcccagctcagtgagtgccatcactgatattaaaaggcttgatcatgatttaaaacatgctcacgaactccgccaggctgcattcaagctctatgcctctcttggagcaaatgatgaagacatccggaagaaggtgagtctgggagaggggcgtcccccagtcctgacagccagcaggcagggagtgacgtcaacctgaaagtcgtggtgaagagcactaacagtgactgtttgaatataataaagcagagtgactaaaggcataattgaagaatgaatgggacccggatttggggggttgtttgtttgtttttagaacatagagtggcatggccgtgctggaatgacaaataactggcgtgctttttttttgtgtcattaatatgaattattatgttgcacatttttgcatgtgttctgataaaaatcaattctagcactgtgaagcttcagacaccttgaaagtcctaacattagaattgtaaatgttatttatggaaataccttccaatgctattgagaaattcaaatctctattgtatattgttctttgatatgtggcttagttttatgttttgatttttt

SEQ ID NO: 108822 - DNA, 829 bp, Homo sapiens
  Payload ID: 1378
  Gene Symbol: ARMC8
  Gene Name: armadillo repeat containing 8
  ENST ID: ENST00000468560
  CDS Start-End: 753-829
gcggccgagccaaagacgtttccaactccgggagctcccgccggtgcgggttcccaggatggcgtctggcaggcggggtggctgggcttatagacaactggctgggcggcgcggcttggactttgccaagcgtttcactgagccttccttttagcgatgccgcttcccgggggccgaacgctctgccttgtgaagcgccgggcttgcagccggcctgagaacgagcgcccactcagctctcccgggctttggcaagaagaggtgcaggctccttggcccccatttcctcagagctgccaggccaagtctgtgcggcttctatcgcgtcccagcacctgggcaccggctgaagcagtttgctttttggcaatggtgattcgtatcagctgcaactcttcctagtgtgtgtggttttttaagcccctttcctccgctctgctcagaggtcgcggctctgagtcagaggaactctatgttccctgtgcctggtattccgtttttctttaaggggagtcaaacattgaaggggggaaaagggggtgagatttatttccccattgttgaaagaagggaacgtattgacatgccaggaagtaaaacctgttttttttttttttaaaaaaagtttttttaaagaaaaagacgactttcacctttcactatgttgctcttgaaccaggaccaggaatgaaagttactgggagataacttcgaaggattttgcaacaaattcgagctgtccgactctgagaatggaagtaacagctagcagtcgccactatgttgacaggctatttgaccctgatccccagaaagttctacaaggtgt

SEQ ID NO: 108823 - DNA, 4790 bp, Homo sapiens
  Payload ID: 1378
  Gene Symbol: ARMC8
  Gene Name: armadillo repeat containing 8
  Uniprot ID: Q8IUR7
  ENST ID: ENST00000469044
  CDS Start-End: 272-2293
tgcggaaaccgctgcccgcttccacctctaacccaggctcagagtagctgctgtttctgagagaacgattcgtaggacagcccctgacgccattcccttttgcccttctttctgcgggcctttccggtacttgagcggtgtccagagcgtggccagttctcgtctatctggctgcctttagggagcggtgcctagcgttggccaatagttggctgtcgaaagtgccggcccccgcgccggcgcctgcagcagccgggtgggaaggctcaagatggcgtgcttgttggagaccccaatccgcatgagcgtcctttcggaagtaacagctagcagtcgccactatgttgacaggctatttgaccctgatccccagaaagttctacaaggtgtcatagacatgaaaaatgctgtaattggaaacaacaagcagaaagccaatctcattgttttaggagctgttccaagattgttgtacttgcttcagcaagaaacctcaagcacagagctgaaaactgaatgtgcagtggtgttgggaagtcttgctatgggtactgaaaacaatgtcaagtctctactggactgccatattatccctgccttattgcaaggactactgtccccagacctgaagtttattgaagcttgcctccgatgcctgcgtaccatcttcaccagtcctgtcactccagaggagctactgtatacagatgccacagtgataccacacctcatggcactgcttagcaggtcccgctatacccaggagtacatctgtcagatcttctcacactgctgtaaagggccagatcatcaaacaattttatttaaccacggtgcagttcagaatattgctcacctactaacctcactgtcctacaaagttcgaatgcaagcactgaaatgtttctcagttttagcttttgaaaacccccaggtatcgatgaccctggtaaatgttttggttgatggagaattgttaccacagatttttgtgaagatgttacagagggataagcctattgagatgcagctcacatcagcaaaatgtttaacttacatgtgtagagctggagcaattcggacagatgataactgtattgtattaaagacattaccttgtttggttcgaatgtgcagtaaggagagattactagaggagagagttgaaggagctgagacacttgcctatctgattgaaccagatgttgagctacagagaatcgctagcataactgatcacctcattgccatgcttgctgattatttcaagtatcccagctcagtgagtgccatcactgatattaaaaggcttgatcatgatttaaaacatgctcacgaactccgccaggctgcattcaagctctatgcctctcttggagcaaatgatgaagacatccggaagaagatcattgagactgaaaatatgatggaccgaattgtgactggcttgtctgagtctagtgtcaaggtgcggttagctgccgtcagatgtttgcacagtttatccagatctgtgcagcagcttcgaaccagtttccaggatcatgctgtttggaaacctttaatgaaggttttacaaaatgcaccagatgaaatcctagtggtagcatcttccatgctgtgtaatcttcttcttgaattttctccaagcaaagagccaattttggaatcaggagccgtagagctactttgtggattaactcagagtgaaaatcctgctttacgagtgaatggaatttgggctttaatgaatatggcatttcaggctgaacaaaaaataaaagcagatattttacgaagcttgagtactgaacagctattccggttattatcagattcagatttgaatgtgctgatgaagacattgggacttcttagaaatctcctctccactcgtcctcatatagataaaataatgagtactcatggaaagcaaattatgcaagccgtcactcttattctagaaggggaacataacattgaggtcaaagagcagacactgtgcatcttagccaacatagcggatgggacaacagcaaaagatcttattatgaccaatgatgatatcctacagaaaatcaagtattacatgggccattcacatgttaaactgcagcttgcagccatgttttgtatatcaaacctcatatggaatgaagaggaaggttcacaagaacgccaggataaattacgagacatgggcatcgtagatattctacacaaactgagtcagtcaccagattcaaacctttgtgacaaggcaaagatggcactgcagcagtacctggcatgatgggagtgcccctgggcacctgcgagcatcccacctccttgtttaaggaagtacaggaaccagcctcatttgattccttctatttgcacaagtcaccttggactgcagggagctgttttgcaaaagcagtttagtaggcttagatctcaaattcatcttgagaacatttttttgaggtagtaatttcctcagaagactcttgtgttttgttttggtttttttttctgagctactcggactctttattagaacaatcaatcattttcctttggacctacaatttttgcctatgctgcagccactttgtgagtgagaatgaatatgtctgtgtgaacacacaggcatgcgtgtgtatgtgcacgtacatgggccagaatgaatggatgtgtgtgtgtgagggatacctcagatttttcttttcttattttgtgtgaaaatctcttttctacagattttccagggtttaagcattgcttgctgtataaaaaactttactgaattatatacagtttgaatgaaatgttattttaaaaacaaaacaattgttaagtgttccataaaggttatgttgaattttggtcagatgaatatttgtaagtaaaaaatatatgcatttctgaacctcaacttacatagattttctttatataaaaaaaaagaaaaaaaaagaaaaagttggctatagttggcctgattaacaggcactatacatggtgctgtgcaaaatagtaagctagcatcttactgccgtcaatattagcaggtacagagccttttttcatcctaattcagtaagttctcaggcttccaagtcaaatggagaagtaaagtgaggcaacagattcaccataggctttttgaagcatcaaagggaaatataactactgatagtgaaagcccagccatgacccagatgggcttacccttgacaggaactggggaccaagagcctcccaattgccctaactcctgtcattggtattagcaatatctggccagatttagaaccagtcatggaaacttgtgctcaaactaaaagtaggtcatcacttcccagaaacagaataccttgtgcttcctgaaacagcatatatcactgtgaaactaaagaatattctacagacacccctgtagaaagaaacaaagaacaggatagtttagaaagctttctgttagctgtattcagcaaatttcatactagttgctcaggactgctagttggtatgcttttgtaaaacgagattgaaatttaataaaagatgcaactaaaatctttcctgcatgaagctaaaagcactcaagttgagagaggggcaagggaatctccccaggatgactgaagatgacttctttttacagcaagtactgttagcctttctgcaccccttagcttggcccctgctccaacttctgggtcagcagcaaggtgaactcaacagaagttgctcttgactgtttgaaggtagaagcagcctaccttttctctttgctaaaagaaggtcaaaggcttcgcaaccaggatgcaaggtctgcggtccagaagcttgcggtgagtgtgtgccactgatggagctccaagcccacccaccagccactcctgatggggttgctcacactgcagctgccctatcaccaccctgcacgttccttggaagatttaaatgtttggttgcaaatgaatgttttaaaaatgtatttaatgcaatttttcctgctctcaacatgaccacccaagattcaaacacagagacttccaagttactattttttcagaacatcaccgattttaaaatctgtcacaacaggacttggttttgtgcagatatcagagtgctaatgtgagaaacccagttaaaagaaaacttagtttattgggaagaaagcctcaggcccactcgtttctagaactgtgaaaatatccttggttggcatttttaacacaaaacactatagtgttggtattaaatagtactaggtaaatataaagaaaccaataatgaattgctgagacaatcttgaacccaaatagcattagaaagctgaaggcccaatgaaataacactttcacacttaaactctgtggataaattttgcctgtgggtataaacagatggtcaaattaaaaatgctttactataattaacttttctgatttgaatgaagggaaatgtatttattgaaacaaagctgtttgctgctttatgcaggtgcagtgttcagtcagcaaggaagtgggaagagtggacatggtattgtgtctacacccaagttcttaactaagcttctcgctctaatactgcattctgtttctccttttgtgccctgattgtaatccaaaatttatgaactagaaaagaatgtccaatttaataagttgcatttttttttctttaagcactttattcagaacaatacatgttcttctggtagtgtttggataatatgattttaacacatgctaataaaagccaagaaaaatcatggcaacttctaaaaa

SEQ ID NO: 108824 - DNA, 774 bp, Homo sapiens
  Payload ID: 1378
  Gene Symbol: ARMC8
  Gene Name: armadillo repeat containing 8
  ENST ID: ENST00000469860
  CDS Start-End: 1-341
gactactgtccccagacctgaagtttattgaagcttgcctccgatgcctgcgtaccatcttcaccagtcctgtcactccagaggagctactgtatacagggccagatcatcaaacaattttatttaaccacggtgcagttcagaatattgctcacctactaacctcactgtcctacaaacttgatcatgatttaaaacatgctcacgaactccgccaggctgcattcaagctctatgcctctcttggagcaaatgatgaagacatccggaagaaggtgagtctgggagaggggcgtcccccagtcctgacagccagcaggcagggagtgacgtcaacctgaaagtcgtggtgaagagcactaacagtgactgtttgaatataataaagcagagtgactaaaggcataattgaagaatgaatgggacccggatttggggggttgtttgtttgtttttagaacatagagtggcatggccgtgctggaatgacaaataactggcgtgctttttttttgtgtcattaatatgaattattatgttgcacatttttgcatgtgttctgataaaaatcaattctagcactgtgaagcttcagacaccttgaaagtcctaacattagaattgtaaatgttatttatggaaataccttccaatgctattgagaaattcaaatctctattgtatattgttctttgatatgtggcttagttttatgttttgattttttttgctactgtgcaagtttaatgtgaataaaatctttgtggaatgatg

SEQ ID NO: 108825 - DNA, 652 bp, Homo sapiens
  Payload ID: 1378
  Gene Symbol: ARMC8
  Gene Name: armadillo repeat containing 8
  ENST ID: ENST00000470549
  CDS Start-End: 1-353
gactactgtccccagacctgaagtttattgaagcttgcctccgatgcctgcgtaccatcttcaccagtcctgtcactccagaggagctactgtatacagatgccacagtgataccacacctcatggcactgcttagcaggtcccgctatacccaggagtacatctgtcagatcttctcacactgctgtaaagggccagatcatcaaacaattttatttaaccacggtgcagttcagaatattgctcacctactaacctcactgtcctacaaagttcgaatgcaagcactgaaatgtttctcagttttagcttttgaaaacccccaggtatcgatgaccctggtaaatgtttaacttacatgtgtagagctggagcaattcggacagatgataactgtattgtattaaagcttgatcatgatttaaaacatgctcacgaactccgccaggctgcattcaagctctatgcctctcttggagcaaatgatgaagacatccggaagaaggtgagtctgggagaggggcgtcccccagtcctgacagccagcaggcagggagtgacgtcaacctgaaagtcgtggtgaagagcactaacagtgactgtttgaatataataaagcagagtgactaaaggcataattgaagaatgaatg

SEQ ID NO: 108826 - DNA, 3043 bp, Homo sapiens
  Payload ID: 1378
  Gene Symbol: ARMC8
  Gene Name: armadillo repeat containing 8
  Uniprot ID: Q8IUR7
  ENST ID: ENST00000481646
  CDS Start-End: 407-2386
cagatcttctttgcgcatgcggaaaccgctgcccgcttccacctctaacccaggctcagagtagctgctgtttctgagagaacgattcgtaggacagcccctgacgccattcccttttgcccttctttctgcgggcctttccggtacttgagcggtgtccagagcgtggccagttctcgtctatctggctgcctttagggagcggtgcctagcgttggccaatagttggctgtcgaaagtgccggcccccgcgccggcgcctgcagcagccgggtgggaaggctcaagatggcgtgcttgttggagaccccaatccgcatgagcgtcctttcggaccaggaatgaaagttactgggagataacttcgaaggattttgcaacaaattcgagctgtccgactctgagaatggaagtaacagctagcagtcgccactatgttgacaggctatttgaccctgatccccagaaagttctacaaggtgtcatagacatgaaaaatgctgtaattggaaacaacaagcagaaagccaatctcattgttttaggagctgttccaagattgttgtacttgcttcagcaagaaacctcaagcacagagctgaaaactgaatgtgcagtggtgttgggaagtcttgctatgggtactgaaaacaatgtcaagtctctactggactgccatattatccctgccttattgcaaggactactgtccccagacctgaagtttattgaagcttgcctccgatgcctgcgtaccatcttcaccagtcctgtcactccagaggagctactgtatacagatgccacagtgataccacacctcatggcactgcttagcaggtcccgctatacccaggagtacatctgtcagatcttctcacactgctgtaaagggccagatcatcaaacaattttatttaaccacggtgcagttcagaatattgctcacctactaacctcactgtcctacaaagttcgaatgcaagcactgaaatgtttctcagttttagcttttgaaaacccccaggtatcgatgaccctggtaaatgttttggttgatggagaattgttaccacagatttttgtgaagatgttacagagggataagcctattgagatgcagctcacatcagcaaaatgtttaacttacatgtgtagagctggagcaattcggacagatgataactgtattgtattaaagacattaccttgtttggttcgaatgtgcagtaaggagagattactagaggagagagttgaaggagctgagacacttgcctatctgattgaaccagatgttgagctacagagaatcgctagcataactgatcacctcattgccatgcttgctgattatttcaagtatcccagctcagtgagtgccatcactgatattaaaaggcttgatcatgatttaaaacatgctcacgaactccgccaggctgcattcaagctctatgcctctcttggagcaaatgatgaagacatccggaagaagatcattgagactgaaaatatgatggaccgaattgtgactggcttgtctgagtctagtgtcaaggtgcggttagctgccgtcagatgtttgcacagtttatccagatctgtgcagcagcttcgaaccagtttccaggatcatgctgtttggaaacctttaatgaaggttttacaaaatgcaccagatgaaatcctagtggtagcatcttccatgctgtgtaatcttcttcttgaattttctccaagcaaagagccaattttggaatcaggagccgtagagctactttgtggattaactcagagtgaaaatcctgctttacgagtgaatggaatttgggctttaatgaatatggcatttcaggctgaacaaaaaataaaagcagatattttacgaagcttgagtactgaacagctattccggttattatcagattcagatttgaatgtgctgatgaagacattgggacttcttagaaatctcctctccactcgtcctcatatagataaaataatgagtactcatggaaagcaaattatgcaagccgtcactcttattctagaaggggaacataacattgaggtcaaagagcagacactgtgcatcttagccaacatagcggatgggacaacagcaaaagatcttattatgaccaatgatgatatcctacagaaaatcaagtattacatgggccattcacatgttaaactgcagcttgcagccatgttttgtatatcaaacctcatatggaatgaagaggaaggttcacaagaacgccaggataaattacgagacatgggcatcgtagatattctacacaaactgagtcagtcaccagattcaaacctttgtgacaaggcaaagatggcactgcagcagtacctggcatgatgggagtgcccctgggcacctgcgagcatcccacctccttgtttaaggaagtacaggaaccagcctcatttgattccttctatttgcacaagtcaccttggactgcagggagctgttttgcaaaagcagtttagtaggcttagatctcaaattcatcttgagaacatttttttgaggtagtaatttcctcagaagactcttgtgttttgttttggtttttttttctgagctactcggactctttattagaacaatcaatcattttcctttggacctacaatttttgcctatgctgcagccactttgtgagtgagaatgaatatgtctgtgtgaacacacaggcatgcgtgtgtatgtgcacgtacatgggccagaatgaatggatgtgtgtgtgtgagggatacctcagatttttcttttcttattttgtgtgaaaatctcttttctacagattttccagggtttaagcattgcttgctgtataaaaaactttactgaattatatacagtttgaatgaaatgttattttaaaaacaaaacaattgttaagtgttccataaaggttatgttgaattttggtcagatgaatatttgtaagtaaaaaatatatgcatttctgaacctcaacttacatagattttctttatataaaaaaaa

SEQ ID NO: 108827 - DNA, 2910 bp, Homo sapiens
  Payload ID: 1378
  Gene Symbol: ARMC8
  Gene Name: armadillo repeat containing 8
  Uniprot ID: Q8IUR7
  ENST ID: ENST00000471453
  CDS Start-End: 145-1302
gcagcagccgggtgggaaggctcaagatggcgtgcttgttggagaccccaatccgcatgagcgtcctttcggaccaggaatgaaagttactgggagataacttcgaaggattttgcaacaaattcgagctgtccgactctgagaatggaagtaacagctagcagtcgccactatgttgacaggctatttgaccctgatccccagaaagttctacaaggtgtcatagacatgaaaaatgctgtaattggaaacaacaagcagaaagccaatctcattgttttaggagctgttccaagattgttgtacttgcttcagcaagaaacctcaagcacagagctgaaaactgaatgtgcagtggtgttgggaagtcttgctatgggtactgaaaacaatgtcaagtctctactggactgccatattatccctgccttattgcaaggactactgtccccagacctgaagtttattgaagcttgcctccgatgcctgcgtaccatcttcaccagtcctgtcactccagaggagctactgtatacagatgccacagtgataccacacctcatggcactgcttagcaggtcccgctatacccaggagtacatctgtcagatcttctcacactgctgtaaagggccagatcatcaaacaattttatttaaccacggtgcagttcagaatattgctcacctactaacctcactgtcctacaaagttcgaatgcaagcactgaaatgtttctcagttttagcttttgaaaacccccaggtatcgatgaccctggtaaatgttttggttgatggagaattgttaccacagatttttgtgaagatgttacagagggataagcctattgagatgcagctcacatcagcaaaatgtttaacttacatgtgtagagctggagcaattcggacagatgataactgtattgtattaaagacattaccttgtttggttcgaatgtgcagtaaggagagattactagaggagagagttgaaggagctgagacacttgcctatctgattgaaccagatgttgagctacagagaatcgctagcataactgatcacctcattgccatgcttgctgattatttcaagtatcccagctcagtgagtgccatcactgatattaaaaggcttgatcatgatttaaaacatgctcacgaactccgccaggctgcattcaagctctatgcctctcttggagcaaatgatgaagacatccggaagaaggtgagtctgggagaggggcgtcccccagtcctgacagccagcaggcagggagtgacgtcaacctgaaagtcgtggtgaagagcactaacagtgactgtttgaatataataaagcagagtgactaaaggcataattgaagaatgaatgggacccggatttggggggttgtttgtttgtttttagaacatagagtggcatggccgtgctggaatgacaaataactggcgtgctttttttttgtgtcattaatatgaattattatgttgcacatttttgcatgtgttctgataaaaatcaattctagcactgtgaagcttcagacaccttgaaagtcctaacattagaattgtaaatgttatttatggaaataccttccaatgctattgagaaattcaaatctctattgtatattgttctttgatatgtggcttagttttatgttttgattttttttgctactgtgcaagtttaatgtgaataaaatctttgtggaatgatgattttatgtttagtgagtggtcatctgaattttccagctccccagaaaatgtatgcactggtatagcacccttatgttactaaagcctagtctaacactgaactcatgttcttgatgagaatacttctagatgaggagtatagtggtaagtaagctctgacttggctccttccacaaaccaaaaagctggaacttaccactcaaaaacatgtataacctaataaattctacacaaggctttcaagaccatcagagagcaaaaccacatgttctgtcttgaggagccatagcagaaagagcaaattagtcattatttactgaacatgatgatttactaaatctctccatctgcattagtattttaaggagcactgtgagagaaatcacaaagtattagagtttaccatgattcagagaagttcttcaggcctgtagaaagaggagtatggaacaaccttacatttgttgaaataacttgaaaaggaaccatttcttgaagaaactgaagtaatagcaataagatttgatgtgtgagtagctttgatttaaaatcaatgcaaaaagcacaactaataaattgaatgtttccatgtacctcactttatttcagttaacaagatactttgacttgaagtgtttttagtgtatccctatgaaaatcatttttggtacatctaagttttcacttataaactgttatttcaaagcaaacatactagtgatatatatatgatttatggatgttgacgccaatgttcagtttgggtacgttggtgtattgcaaggggagaggcttttataacaatagatttgaacatttttaaaaaattggactgtgtaacttaaatacacaattatttggtttaggatggttattagggcccattagaaacaggagaagtattttacccattcttaaagctctaaaaaaccatctcatggactgaaaggtagatagacagatggaccacaatgggaaataggatgtccatttgtacttctttgtacttttttgttaataaactgttttggaattaatggcttaatttgtgatatcatgttctagaaatacctgcaacatgacagtctaatcagtagtctattaaaacttgtattcataatgtgtataatttcctggtaaggctaactcctgatcgtttctgtagaaagatgac

SEQ ID NO: 108828 - DNA, 2221 bp, Homo sapiens
  Payload ID: 1378
  Gene Symbol: ARMC8
  Gene Name: armadillo repeat containing 8
  Uniprot ID: Q8IUR7
  ENST ID: ENST00000461822
  CDS Start-End: 39-1859
gcgccggcgcctgcagcagccgggtgggaaggctcaagatggcgtgcttgttggagaccccaatccgcatgagcgtcctttcggaagtaacagctagcagtcgccactatgttgacaggctatttgaccctgatccccagaaagttctacaaggtgtcatagacatgaaaaatgctgtaattggaaacaacaagcagaaagccaatctcattgttttaggagctgttccaagattgttgtacttgcttcagcaagaaacctcaagcacagagctgaaaactgaatgtgcagtggtgttgggaagtcttgctatgggtactgaaaacaatgtcaagtctctactggactgccatattatccctgccttattgcaaggactactgtccccagacctgaagtttattgaagcttgcctccgatgcctgcgtaccatcttcaccagtcctgtcactccagaggagctactgtatacagatgccacagtgataccacacctcatggcactgcttagcaggtcccgctatacccaggagtacatctgtcagatcttctcacactgctgtaaagggccagatcatcaaacaattttatttaaccacggtgcagttcagaatattgctcacctactaacctcactgtcctacaaagttcgaatgcaagcactgaaatgtttctcagttttagcttttgaaaacccccaggtatcgatgaccctggtaaatgttttggttgatggagaattgttaccacagatttttgtgaagatgttacagagggataagcctattgagatgcagctcacatcagcaaaatgtttaacttacatgtgtagagctggagcaattcggacagatgataactgtattgtattaaagcttgatcatgatttaaaacatgctcacgaactccgccaggctgcattcaagctctatgcctctcttggagcaaatgatgaagacatccggaagaagatcattgagactgaaaatatgatggaccgaattgtgactggcttgtctgagtctagtgtcaaggtgcggttagctgccgtcagatgtttgcacagtttatccagatctgtgcagcagcttcgaaccagtttccaggatcatgctgtttggaaacctttaatgaaggttttacaaaatgcaccagatgaaatcctagtggtagcatcttccatgctgtgtaatcttcttcttgaattttctccaagcaaagagccaattttggaatcaggagccgtagagctactttgtggattaactcagagtgaaaatcctgctttacgagtgaatggaatttgggctttaatgaatatggcatttcaggctgaacaaaaaataaaagcagatattttacgaagcttgagtactgaacagctattccggttattatcagattcagatttgaatgtgctgatgaagacattgggacttcttagaaatctcctctccactcgtcctcatatagataaaataatgagtactcatggaaagcaaattatgcaagccgtcactcttattctagaaggggaacataacattgaggtcaaagagcagacactgtgcatcttagccaacatagcggatgggacaacagcaaaagatcttattatgaccaatgatgatatcctacagaaaatcaagtattacatgggccattcacatgttaaactgcagcttgcagccatgttttgtatatcaaacctcatatggaatgaagaggaaggttcacaagaacgccaggataaattacgagacatgggcatcgtagatattctacacaaactgagtcagtcaccagattcaaacctttgtgacaaggcaaagatggcactgcagcagtacctggcatgatgggagtgcccctgggcacctgcgagcatcccacctccttgtttaaggaagtacaggaaccagcctcatttgattccttctatttgcacaagtcaccttggactgcagggagctgttttgcaaaagcagtttagtaggcttagatctcaaattcatcttgagaacatttttttgaggtagtaatttcctcagaagactcttgtgttttgttttggtttttttttctgagctactcggactctttattagaacaatcaatcattttcctttggacctacaatttttgcctatgctgcagccactttgtgagtgagaatgaatatgtctgtgtgaacacacaggcatgcgtgtgtatgtgcacg

SEQ ID NO: 108829 - DNA, 691 bp, Homo sapiens
  Payload ID: 1378
  Gene Symbol: ARMC8
  Gene Name: armadillo repeat containing 8
  ENST ID: ENST00000471709
  CDS Start-End: 9-691
ggctcaagatggcgtgcttgttggagaccccaatccgcatgagcgtcctttcggaagtaacagctagcagtcgccactatgttgacaggctatttgaccctgatccccagaaagttctacaaggtgtcatagacatgaaaaatgctgtaattggaaacaacaagcagaaagccaatctcattgttttaggagctgttccaagattgttgtacttgcttcagcaagaaacctcaagcacagagctgaaaactgaatgtgcagtggtgttgggaagtcttgctatgggtactgaaaacaatgtcaagtctctactggactgccatattatccctgccttattgcaaggactactgtccccagacctgaagtttattgaagcttgcctccgatgcctgcgtaccatcttcaccagtcctgtcactccagaggagctactgtatacagggccagatcatcaaacaattttatttaaccacggtgcagttcagaatattgctcacctactaacctcactgtcctacaaagttcgaatgcaagcactgaaatgtttctcagttttagcttttgaaaacccccaggtatcgatgaccctggtaaatgttttggttgatggagaattgttaccacagatttttgtgaagatgttacagagggataagcctattgagatgcagctcacatcagcaaaatg

SEQ ID NO: 108830 - DNA, 4728 bp, Homo sapiens
  Payload ID: 1378
  Gene Symbol: ARMC8
  Gene Name: armadillo repeat containing 8
  Uniprot ID: Q8IUR7
  ENST ID: ENST00000538260
  CDS Start-End: 308-2236
gagcggcaggtggggccggcagatcttctttgcgcatgcggaaaccgctgcccgcttccacctctaacccaggctcagagtagctgctgtttctgagagaacgattcgtaggacagcccctgacgccattcccttttgcccttctttctgcgggcctttccggtacttgagcggtgtccagagcgtggccagttctcgtctatctggctgcctttagggagcggtgcctagcgttggccaatagttggctgtcgaaagtgccggcccccgcgccggcgcctgcagcagccgggtgggaaggctcaagatggcgtgcttgttggagaccccaatccgcatgagcgtcctttcggaagtaacagctagcagtcgccactatgttgacaggctatttgaccctgatccccagaaagttctacaaggtgtcatagacatgaaaaatgctgtaattggaaacaacaagcagaaagccaatctcattgttttaggagctgttccaagattgttgtacttgcttcagcaagaaacctcaagcacagagctgaaaactgaatgtgcagtggtgttgggaagtcttgctatgggtactgaaaacaatgtcaagtctctactggactgccatattatccctgccttattgcaaggactactgtccccagacctgaagtttattgaagcttgcctccgatgcctgcgtaccatcttcaccagtcctgtcactccagaggagctactgtatacagggccagatcatcaaacaattttatttaaccacggtgcagttcagaatattgctcacctactaacctcactgtcctacaaagttcgaatgcaagcactgaaatgtttctcagttttagcttttgaaaacccccaggtatcgatgaccctggtaaatgttttggttgatggagaattgttaccacagatttttgtgaagatgttacagagggataagcctattgagatgcagctcacatcagcaaaatgtttaacttacatgtgtagagctggagcaattcggacagatgataactgtattgtattaaagacattaccttgtttggttcgaatgtgcagtaaggagagattactagaggagagagttgaaggagctgagacacttgcctatctgattgaaccagatgttgagctacagagaatcgctagcataactgatcacctcattgccatgcttgctgattatttcaagtatcccagctcagtgagtgccatcactgatattaaaaggcttgatcatgatttaaaacatgctcacgaactccgccaggctgcattcaagctctatgcctctcttggagcaaatgatgaagacatccggaagaagatcattgagactgaaaatatgatggaccgaattgtgactggcttgtctgagtctagtgtcaaggtgcggttagctgccgtcagatgtttgcacagtttatccagatctgtgcagcagcttcgaaccagtttccaggatcatgctgtttggaaacctttaatgaaggttttacaaaatgcaccagatgaaatcctagtggtagcatcttccatgctgtgtaatcttcttcttgaattttctccaagcaaagagccaattttggaatcaggagccgtagagctactttgtggattaactcagagtgaaaatcctgctttacgagtgaatggaatttgggctttaatgaatatggcatttcaggctgaacaaaaaataaaagcagatattttacgaagcttgagtactgaacagctattccggttattatcagattcagatttgaatgtgctgatgaagacattgggacttcttagaaatctcctctccactcgtcctcatatagataaaataatgagtactcatggaaagcaaattatgcaagccgtcactcttattctagaaggggaacataacattgaggtcaaagagcagacactgtgcatcttagccaacatagcggatgggacaacagcaaaagatcttattatgaccaatgatgatatcctacagaaaatcaagtattacatgggccattcacatgttaaactgcagcttgcagccatgttttgtatatcaaacctcatatggaatgaagaggaaggttcacaagaacgccaggataaattacgagacatgggcatcgtagatattctacacaaactgagtcagtcaccagattcaaacctttgtgacaaggcaaagatggcactgcagcagtacctggcatgatgggagtgcccctgggcacctgcgagcatcccacctccttgtttaaggaagtacaggaaccagcctcatttgattccttctatttgcacaagtcaccttggactgcagggagctgttttgcaaaagcagtttagtaggcttagatctcaaattcatcttgagaacatttttttgaggtagtaatttcctcagaagactcttgtgttttgttttggtttttttttctgagctactcggactctttattagaacaatcaatcattttcctttggacctacaatttttgcctatgctgcagccactttgtgagtgagaatgaatatgtctgtgtgaacacacaggcatgcgtgtgtatgtgcacgtacatgggccagaatgaatggatgtgtgtgtgtgagggatacctcagatttttcttttcttattttgtgtgaaaatctcttttctacagattttccagggtttaagcattgcttgctgtataaaaaactttactgaattatatacagtttgaatgaaatgttattttaaaaacaaaacaattgttaagtgttccataaaggttatgttgaattttggtcagatgaatatttgtaagtaaaaaatatatgcatttctgaacctcaacttacatagattttctttatataaaaaaaaagaaaaaaaaagaaaaagttggctatagttggcctgattaacaggcactatacatggtgctgtgcaaaatagtaagctagcatcttactgccgtcaatattagcaggtacagagccttttttcatcctaattcagtaagttctcaggcttccaagtcaaatggagaagtaaagtgaggcaacagattcaccataggctttttgaagcatcaaagggaaatataactactgatagtgaaagcccagccatgacccagatgggcttacccttgacaggaactggggaccaagagcctcccaattgccctaactcctgtcattggtattagcaatatctggccagatttagaaccagtcatggaaacttgtgctcaaactaaaagtaggtcatcacttcccagaaacagaataccttgtgcttcctgaaacagcatatatcactgtgaaactaaagaatattctacagacacccctgtagaaagaaacaaagaacaggatagtttagaaagctttctgttagctgtattcagcaaatttcatactagttgctcaggactgctagttggtatgcttttgtaaaacgagattgaaatttaataaaagatgcaactaaaatctttcctgcatgaagctaaaagcactcaagttgagagaggggcaagggaatctccccaggatgactgaagatgacttctttttacagcaagtactgttagcctttctgcaccccttagcttggcccctgctccaacttctgggtcagcagcaaggtgaactcaacagaagttgctcttgactgtttgaaggtagaagcagcctaccttttctctttgctaaaagaaggtcaaaggcttcgcaaccaggatgcaaggtctgcggtccagaagcttgcggtgagtgtgtgccactgatggagctccaagcccacccaccagccactcctgatggggttgctcacactgcagctgccctatcaccaccctgcacgttccttggaagatttaaatgtttggttgcaaatgaatgttttaaaaatgtatttaatgcaatttttcctgctctcaacatgaccacccaagattcaaacacagagacttccaagttactattttttcagaacatcaccgattttaaaatctgtcacaacaggacttggttttgtgcagatatcagagtgctaatgtgagaaacccagttaaaagaaaacttagtttattgggaagaaagcctcaggcccactcgtttctagaactgtgaaaatatccttggttggcatttttaacacaaaacactatagtgttggtattaaatagtactaggtaaatataaagaaaccaataatgaattgctgagacaatcttgaacccaaatagcattagaaagctgaaggcccaatgaaataacactttcacacttaaactctgtggataaattttgcctgtgggtataaacagatggtcaaattaaaaatgctttactataattaacttttctgatttgaatgaagggaaatgtatttattgaaacaaagctgtttgctgctttatgcaggtgcagtgttcagtcagcaaggaagtgggaagagtggacatggtattgtgtctacacccaagttcttaactaagcttctcgctctaatactgcattctgtttctccttttgtgccctgattgtaatccaaaatttatgaactagaaaagaatgtccaatttaataagttgcatttttttttctttaagcactttattcagaacaatacatgttcttctggtagtgtttggataatatgattttaacacatgctaataaaagccaagaaaaatcatggcaacttct

SEQ ID NO: 108831 - DNA, 2300 bp, Homo sapiens
  Payload ID: 1379
  Gene Symbol: ARMC9
  Gene Name: armadillo repeat containing 9
  Uniprot ID: Q7Z3E5
  ENST ID: ENST00000349938
  CDS Start-End: 195-2192
tccctcccaggctgctccgcgtcggcggcgccccgcgcgattggctgcgccgcccccacgtgacgccggggtggcggcggcggttgcccgggtgacggctgcggaggtggcggccgggctgggatagcgcgagtgtccgcggccgagcagcagagatttttgctgtgagaattaattaccagtaacagttcaatatgggggacattctggctcatgaatctgaattacttggactagtgaaagagtatttagattttgctgaatttgaagacaccttgaaaacattttcaaaagaatgcaaaataaaaggaaaaccattgtgtaaaacagtaggcggatctttcagagactccaaatcattgacaattcagaaggatcttgtcgctgcatttgacaacggagaccagaaggtgttcttcgatctgtgggaggagcacatttcaagttccatccgagatggggactcctttgcccagaagctggaattctatctccacatccattttgccatctatcttttgaagtactctgtggggagaccggacaaagaggagctggatgaaaagatttcctacttcaaaacctacctggagaccaaaggggcagccttgagccagaccacagagtttcttcctttctatgcccttccttttgttcccaaccctatggtgcacccctcatttaaagaactcttccaggattcctggactccagagttaaagttgaagttgataaagtttctagctttaatatctaaagccagcaacacgccaaagcttttaacaatatataaggagaatggacaaagtaacaaagaaatcttgcagcagctccaccagcagctggttgaagctgaacgtaggtcagtgacatacctcaaacggtacaataagatccaggccgactaccacaatctcattggagtcacagcagagctggtggattctctagaggccacagtcagcggcaagatgatcacccctgagtacctccagagcgtctgtgtccgcctgttcagtaaccagatgcggcagagcctggcgcatagtgtggacttcacgaggcctgggacggcatccaccatgttacgagcctccttggcacccgtgaaattgaaggatgtcccattactgccctccttggattatgagaaactgaagaaggatttgattttggggagtgaccgcttgaaagccttcttgttgcaggctctgcgctggcgcttgaccacatcccatcctggagagcagagggagaccgttctgcaagcctacatcagcaatgacctcttggactgttatagccacaaccagaggagtgtgcttcagttgctgcactccacgagcgacgtggtgcggcagtacatggccaggctcatcaatgcttttgcgtcactggcagaaggtcgcctctaccttgcccagaacacaaaggtgctgcagatgctggagggaaggctgaaggaggaggacaaggatatcatcaccagggagaatgttcttggggccctgcagaagttcagtctcaggcgcccgctgcagacagcgatgattcaagacggcctcatcttctggctggttgatgttctgaaggaccctgactgcctgtctgactacacgctggagtactcggtggctttgctcatgaacctctgcctccgcagcacagggaagaacatgtgtgccaaggtggcaggcctcgtgctcaaagtcctttcggatcttcttggccatgaaaaccatgagatacagccgtatgtgaatggagctctgtacagcatcctttctgttccatccattcgtgaggaagcaagagcaatgggaatggaagacatcctacgctgcttcatcaaagaaggcaatgctgaaatgatccgccagatagaattcatcatcaagcagctaaattccgaagagctaccagatggtgttcttgaatctgatgatgatgaagatgaagatgatgaagaggaccatgacatcatggaagccgatctggacaaagacgaactgatccagccccagctcggagaactctcaggagagaagcttctgaccacggagtacctggggatcatgaccaacacggggaagacaaggcggaaggggctggctaatgtgcagtggagcggggatgagcccctgcaaaggcccgtcacccccggcggccacagaaacgggtacccagtgtaagtcagggctaaaggaagcgggaattgactttcttaagctttgttttgattacagtgtaagatgtatgtatttttaaaattcaaaataaagcattcattttgaaaagca

SEQ ID NO: 108832 - DNA, 729 bp, Homo sapiens
  Payload ID: 1379
  Gene Symbol: ARMC9
  Gene Name: armadillo repeat containing 9
  ENST ID: ENST00000440107
  CDS Start-End: 231-729
gggaggagcagcggtgcgtttggagggccgaggctctgcggacctcttgttccgaggaaaaacccgacgcgcccgctccgccgccgccggatgctaccacttctcgcctgcggtccagggatctttcttcggcaagggccgaggcggccgcctggacatcccaagaaaggacaggcccagctgcttcccagatttttgctgtgagaattaattaccagtaacagttcaatatgggggacattctggctcatgaatctgaattacttggactagtgaaagagtatttagattttgctgaatttgaagacaccttgaaaacattttcaaaagaatgcaaaataaaaggaaaaccattgtgtaaaacagtaggcggatctttcagagactccaaatcattgacaattcagaaggatcttgtcgctgcatttgacaacggagaccagaaggtgttcttcgatctgtgggaggagcacatttcaagttccatccgagatggggactcctttgcccagaagctggaattctatctccacatccattttgccatctatcttttgaagtactctgtggggagaccggacaaagaggagctggatgaaaagatttcctacttcaaaacctacctggagaccaaaggggcagccttgagccagaccacagagtttcttcctttctatgcccttccttttgttcccaaccctatggtgcacccctcatttaaagaactct

SEQ ID NO: 108833 - DNA, 1050 bp, Homo sapiens
  Payload ID: 1379
  Gene Symbol: ARMC9
  Gene Name: armadillo repeat containing 9
  ENST ID: ENST00000428662
  CDS Start-End: 1-517
gaggagtgtgcttcagttgctgcactccacgagcgacgtggtgcggcagtacatggccaggctcatcaatgcttttgcgtcactggcagaaggtcgcctctaccttgcccagaacacaaaggtgctgcagatgctggagggaaggctgaaggaggaggacaaggatatcatcaccagggagaatgttcttggggccctgcagaagttcagtctcaggcgcccgctgcagacagcgatgattcaagacggcctcatcttctggctggttgatgttctgaaggaccctgactgcctgtctgactacacgctggagtactcggtggctttgctcatgaacctctgcctccgcagcacagggaagaacatgtgtgccaaggtggcaggcctcgtgctcaaagtcctttcggatcttcttggccatgaaaaccatgagatacagccgtatgtgaatggagctctgtacagcatcctttctgttccatccattcgtgaggaagcaagagcaatggtcccctgaaggagtgactgcggttgtgcccattttgctgctgacaacatcaaggctgaaagggaatggaagacatcctacgctgcttcatcaaagaaggcaatgctgaaatgatccgccagatagaattcatcatcaagcagctaaattccgaagagctaccagatggtgttcttgaatctgatgatgatgaagatgaagatgatgaagaggaccatgacatcatggaagccgatctggacaaagacgaactgatccagccccagctcggagaactctcaggagagaagcttctgaccacggagtacctggggatcatgaccaacacggggaagacaaggcggaaggggctggctaatgtgcagtggagcggggatgagcccctgcaaaggcccgtcacccccggcggccacagaaacgggtacccagtgtaagtcagggctaaaggaagcgggaattgactttcttaagctttgttttgattacagtgtaagatgtatgtatttttaaaattcaaaataaagcattcattttgaaaagca

SEQ ID NO: 108834 - DNA, 626 bp, Homo sapiens
  Payload ID: 1379
  Gene Symbol: ARMC9
  Gene Name: armadillo repeat containing 9
  ENST ID: ENST00000436339
  CDS Start-End: 1-626
tctctagaggccacagtcagcggcaagatggcatccaccatgttacgagcctccttggcacccgtgaaattgaaggatgtcccattactgccctccttggattatgagaaactgaagaaggatttgattttggggagtgaccgcttgaaagccttcttgttgcaggctctgcgctggcgcttgaccacatcccatcctggagagcagagggagaccgttctgcaagcctacatcagcaatgacctcttggactgttatagccacaaccagaggagtgtgcttcagttgctgcactccacgagcgacgtggtgcggcagtacatggccaggctcatcaatgcttttgcgtcactggcagaaggtcgcctctaccttgcccagaacacaaaggtgctgcagatgctggagggaaggctgaaggaggaggacaaggatatcatcaccagggagaatgttcttggggccctgcagaagttcagtctcaggcgcccgctgcagacagcgatgattcaagacggcctcatcttctggctggttgatgttctgaaggaccctgactgcctgtctgactacacgctggagtactcggtggctttgctcatgaacctctgcctccgcagcacagg

SEQ ID NO: 108835 - DNA, 257 bp, Homo sapiens
  Payload ID: 1379
  Gene Symbol: ARMC9
  Gene Name: armadillo repeat containing 9
  ENST ID: ENST00000444285
  CDS Start-End: 1-222
gagctggtggattctctagaggccacagtcagcggcaagatgatcacccctgagtacctccagagcgtctgtgtccgcctgttcagtaaccagatgcggcagagcctggcgcatagtgtggacttcacgaggcctgggacggtgaggctctgcgctcagggcagggtgcccgtggtctatccccccaaatttaaaaagaatgtaactttaaaaatagcatgaaaaaataacatgcaagaggctgcatttaagctggc

SEQ ID NO: 108836 - DNA, 599 bp, Homo sapiens
  Payload ID: 1379
  Gene Symbol: ARMC9
  Gene Name: armadillo repeat containing 9
  ENST ID: ENST00000446447
  CDS Start-End: 125-599
agtcccacttccagaattgtggcgttatcgtttctcgtgctgttctctctgtccttgggaattatcttttttaacagtccatttattgtagttttactgtggcttagagggagccaaattagtcatgtgtcttggatctgccattctaacctggaaaacagccgcaacgaggagtgtgcttcagttgctgcactccacgagcgacgtggtgcggcagtacatggccaggctcatcaatgcttttgcgtcactggcagaaggtcgcctctaccttgcccagaacacaaaggtgctgcagatgctggagggaaggctgaaggaggaggacaaggatatcatcaccagggagaatgttcttggggccctgcagaagttcagtctcaggcgcccgctgcagacagcgatgattcaagacggcctcatcttctggctggttgatgttctgaaggaccctgactgcctgtctgactacacgctggagtactcggtggctttgctcatgaacctctgcctccgcagcacagggaagaacatgtgtgccaaggtggcaggcctcgtgctcaaagtcctttcggatcttcttggccatgaaaaccatg

SEQ ID NO: 108837 - DNA, 582 bp, Homo sapiens
  Payload ID: 1379
  Gene Symbol: ARMC9
  Gene Name: armadillo repeat containing 9
  ENST ID: ENST00000424740
  CDS Start-End: 1-582
ttgaacttgtgttgctgagtaggaaattgaaggatgtcccattactgccctccttggattatgagaaactgaagaaggatttgattttggggagtgaccgcttgaaagccttcttgttgcaggctctgcgctggcgcttgaccacatcccatcctggagagcagagggagaccgttctgcaagcctacatcagcaatgacctcttggactgttatagccacaaccagaggagtgtgcttcagttgctgcactccacgagcgacgtggtgcggcagtacatggccaggctcatcaatgcttttgcgtcactggcagaaggtcgcctctaccttgcccagaacacaaaggtgctgcagatgctggagggaaggctgaaggaggaggacaaggatatcatcaccagggagaatgttcttggggccctgcagaagttcagtctcaggcgcccgctgcagacagcgatgattcaagacggcctcatcttctggctggttgatgttctgaaggaccctgactgcctgtctgactacacgctggagtactcggtggctttgctcatgaacctctgcctccgcagcacag

SEQ ID NO: 108838 - DNA, 4975 bp, Homo sapiens
  Payload ID: 1379
  Gene Symbol: ARMC9
  Gene Name: armadillo repeat containing 9
  ENST ID: ENST00000614261
  CDS Start-End: 159-2615
gcgcgattggctgcgccgcccccacgtgacgccggggtggcggcggcggttgcccgggtgacggctgcggaggtggcggccgggctgggatagcgcgagtgtccgcggccgagcagcagatttttgctgtgagaattaattaccagtaacagttcaatatgggggacattctggctcatgaatctgaattacttggactagtgaaagagtatttagattttgctgaatttgaagacaccttgaaaacattttcaaaagaatgcaaaataaaaggaaaaccattgtgtaaaacagtaggcggatctttcagagactccaaatcattgacaattcagaaggatcttgtcgctgcatttgacaacggagaccagaaggtgttcttcgatctgtgggaggagcacatttcaagttccatccgagatggggactcctttgcccagaagctggaattctatctccacatccattttgccatctatcttttgaagtactctgtggggagaccggacaaagaggagctggatgaaaagatttcctacttcaaaacctacctggagaccaaaggggcagccttgagccagaccacagagtttcttcctttctatgcccttccttttgttcccaaccctatggtgcacccctcatttaaagaactcttccaggattcctggactccagagttaaagttgaagttgataaagtttctagctttaatatctaaagccagcaacacgccaaagcttttaacaatatataaggagaatggacaaagtaacaaagaaatcttgcagcagctccaccagcagctggttgaagctgaacgtaggtcagtgacatacctcaaacggtacaataagatccaggccgactaccacaatctcattggagtcacagcagagctggtggattctctagaggccacagtcagcggcaagatgatcacccctgagtacctccagagcgtctgtgtccgcctgttcagtaaccagatgcggcagagcctggcgcatagtgtggacttcacgaggcctgggacggcatccaccatgttacgagcctccttggcacccgtgaaattgaaggatgtcccattactgccctccttggattatgagaaactgaagaaggatttgattttggggagtgaccgcttgaaagccttcttgttgcaggctctgcgctggcgcttgaccacatcccatcctggagagcagagggagaccgttctgcaagcctacatcagcaatgacctcttggactgttatagccacaaccagaggagtgtgcttcagttgctgcactccacgagcgacgtggtgcggcagtacatggccaggctcatcaatgcttttgcgtcactggcagaaggtcgcctctaccttgcccagaacacaaaggtgctgcagatgctggagggaaggctgaaggaggaggacaaggatatcatcaccagggagaatgttcttggggccctgcagaagttcagtctcaggcgcccgctgcagacagcgatgattcaagacggcctcatcttctggctggttgatgttctgaaggaccctgactgcctgtctgactacacgctggagtactcggtggctttgctcatgaacctctgcctccgcagcacagggaagaacatgtgtgccaaggtggcaggcctcgtgctcaaagtcctttcggatcttcttggccatgaaaaccatgagatacagccgtatgtgaatggagctctgtacagcatcctttctgttccatccattcgtgaggaagcaagagcaatgggaatggaagacatcctacgctgcttcatcaaagaaggcaatgctgaaatgatccgccagatagaattcatcatcaagcagctaaattccgaagagctaccagatggtgttcttgaatctgatgatgatgaagatgaagatgatgaagaggaccatgacatcatggaagccgatctggacaaagacgaactgatccagccccagctcggagaactctcaggagagaagcttctgaccacggagtacctggggatcatgaccaacacggggaagacaaggcggaaggggctggctaatgtgcagtggagcggggatgagcccctgcaaaggcccgtcacccccggcggccacagaaacgggtacccagtggtggaagaccaacacacacctccccagacagcccagcacgccagaaacggccacccgcaggccctgccagccgctcacgaggctgtctacagggagggcaagcccagcaccccggagtcctgcgtctcctcttcatcagccatcatcgccaagccaggagagtggctcccaagaggacgccaggaagagcctcgcccagcccccacggggaccccccgccagccaagggaggcgccccaggacccaggcaatggagtgaccaccagggaatgtgcatcagccttcacctgcaagccccgggccccctgcactccagagatgctggactggaacccacccaaggcaaaggcgtcagttctggcccctctgttctcttcgtgtggcccccagcaggccagccgccccggctccacagcgtcctccacaaggggcctgccgagcagccagtctcacaggaagtaaggatgtccccgggtgtccccatcacgttgccggaggaccagccagcttcccgctctcagctggcagcagctgccggtgatggatgtgaagggacagttgtccacaagactctgggagctgaggggaggccggctctccaggcagcaccagagcaaggccatcgcagccccgccagccgggtcactttctcccagggcagagccaccaaggagggctggggagagcctggcattgccctcctggagaggggaatttcctgctcacccttcacacacagaggagaggggtggcttttgcccgcaggagatcttctggccccagaaacagcaggtgctggatttgcagccctggccctccaggccccaacagggcgacagtgtagggccagcctggagcagggcttttccaaggctgctgaagccagccctcctcacttgggctgactaccaggacccagaaggaactcagggtgaagctcattttattctcaagcctgcgtctcagcagcaaagttggtgttttcttcctgtgttaaaatctgagaaagaaggccaggtgcggtggctcacgcctgtaattccaggactttggaaggctgaggcgggcagatcacgaggtcaggagatcgagaccatcctggctaacgtggtgaaaccccgtctctactaaaaaaatacaaaaaaattagccgggcgtggtggcgggcgcttgtagtcccagctactctggaggctgaggcaggagaatggcgtgaacccgggaggcggagcttgcagtgagccgagatcgtgccactgcactctagcctgggtgacagagcgagactccgtccccaaaaaaaaaattctgagaatatggtgtgttccagcctcttcaaagctctgctcttctgcacacgttttttgaaggccttaaaaaggccaccagtgtgaccagggagcaccctctgcctccctccctgcactgggaccataaacataaacagctctaccagcaaagtgacccatcccgcgggggaggcctgcgcacgcccctcaccagggctgtcatcagaatccagtcttaggacagaggaaggatgtttgccttcaggaccagcaagtcacaggtgtcctggatgttacccaagctctaaaatcaaataaaacccatcagtatttagtggtgtgtgtgtgtgtgtgtgtgtgtgtgtgtgtgtgtgtgtgtgtgtgtgtgtgtgtatgagtgtatgaagggaaatggaaagcagagaaaagtcgcgtgccctcccccaggcacctgatctgcccacagacccttcaatggggacatctctggtcccaatggtcgtaaataaaggctaagcgctggatttttccatggccccctgactcctcaggagcgcaggcagaggaggtaaacaggaggccaggttacccatgagatgaccagaagctcatccagggccgggaccctggttcatctcgtgaattcttggcagcggctccaggctgggcacattagatgctgtcatgtgactggcctggtggccacctcttggttctctggaaatgtgtccactctgtgctcagggaagaaggctgccgtcctgacctgtcagccaccaggccctctctgaactcctcacttgacccggaggcattgggagcaaacacaaagctcgcccctggtgtcagtggtgcagacagaggaaaagcagagggtccgcaaaatgcaactcctccgtggtgagactttgaaaaggtgtagagtggttgcagacaaacagcaaaggagtggaatggaaaaatctctcttgctccccacaagaagtccactcccctacggattcctcagatgccactggctggcacagcctttcccgcccttggtgtgggagcagcagaagtccagcgggggtgggagaatcatcggggtcaggtcagtgtctccctcgtctgaagtcaaccactacttttccctcaagcctaccaaagagctaaagtctgatctgtagatgtctgatggtttgaggagaagaaaagatagtcttttagagaagtggggagtatccaacttagggtcaaaatacactgagattaggccgggcacagtggctcacacctgtaatcccagtgctttgggaggccgaggcggatggatcacttgaggcctccaggagttcgagaccagcctggccaacatggcgaaaccccgtctctactaaaatacaaaaaattagctggatgtggtggtgggtgcctgtaatctcagctactcaaggaggctgaggcacaagaatagcttgaaccgggagatggaagatgcagtgagccaagatcacgcccctgcactccagcctgggcgacagagactccgtc

SEQ ID NO: 108839 - DNA, 5759 bp, Homo sapiens
  Payload ID: 1379
  Gene Symbol: ARMC9
  Gene Name: armadillo repeat containing 9
  ENST ID: ENST00000611582
  CDS Start-End: 1-2457
atgggggacattctggctcatgaatctgaattacttggactagtgaaagagtatttagattttgctgaatttgaagacaccttgaaaacattttcaaaagaatgcaaaataaaaggaaaaccattgtgtaaaacagtaggcggatctttcagagactccaaatcattgacaattcagaaggatcttgtcgctgcatttgacaacggagaccagaaggtgttcttcgatctgtgggaggagcacatttcaagttccatccgagatggggactcctttgcccagaagctggaattctatctccacatccattttgccatctatcttttgaagtactctgtggggagaccggacaaagaggagctggatgaaaagatttcctacttcaaaacctacctggagaccaaaggggcagccttgagccagaccacagagtttcttcctttctatgcccttccttttgttcccaaccctatggtgcacccctcatttaaagaactcttccaggattcctggactccagagttaaagttgaagttgataaagtttctagctttaatatctaaagccagcaacacgccaaagcttttaacaatatataaggagaatggacaaagtaacaaagaaatcttgcagcagctccaccagcagctggttgaagctgaacgtaggtcagtgacatacctcaaacggtacaataagatccaggccgactaccacaatctcattggagtcacagcagagctggtggattctctagaggccacagtcagcggcaagatgatcacccctgagtacctccagagcgtctgtgtccgcctgttcagtaaccagatgcggcagagcctggcgcatagtgtggacttcacgaggcctgggacggcatccaccatgttacgagcctccttggcacccgtgaaattgaaggatgtcccattactgccctccttggattatgagaaactgaagaaggatttgattttggggagtgaccgcttgaaagccttcttgttgcaggctctgcgctggcgcttgaccacatcccatcctggagagcagagggagaccgttctgcaagcctacatcagcaatgacctcttggactgttatagccacaaccagaggagtgtgcttcagttgctgcactccacgagcgacgtggtgcggcagtacatggccaggctcatcaatgcttttgcgtcactggcagaaggtcgcctctaccttgcccagaacacaaaggtgctgcagatgctggagggaaggctgaaggaggaggacaaggatatcatcaccagggagaatgttcttggggccctgcagaagttcagtctcaggcgcccgctgcagacagcgatgattcaagacggcctcatcttctggctggttgatgttctgaaggaccctgactgcctgtctgactacacgctggagtactcggtggctttgctcatgaacctctgcctccgcagcacagggaagaacatgtgtgccaaggtggcaggcctcgtgctcaaagtcctttcggatcttcttggccatgaaaaccatgagatacagccgtatgtgaatggagctctgtacagcatcctttctgttccatccattcgtgaggaagcaagagcaatgggaatggaagacatcctacgctgcttcatcaaagaaggcaatgctgaaatgatccgccagatagaattcatcatcaagcagctaaattccgaagagctaccagatggtgttcttgaatctgatgatgatgaagatgaagatgatgaagaggaccatgacatcatggaagccgatctggacaaagacgaactgatccagccccagctcggagaactctcaggagagaagcttctgaccacggagtacctggggatcatgaccaacacggggaagacaaggcggaaggggctggctaatgtgcagtggagcggggatgagcccctgcaaaggcccgtcacccccggcggccacagaaacgggtacccagtggtggaagaccaacacacacctccccagacagcccagcacgccagaaacggccacccgcaggccctgccagccgctcacgaggctgtctacagggagggcaagcccagcaccccggagtcctgcgtctcctcttcatcagccatcatcgccaagccaggagagtggctcccaagaggacgccaggaagagcctcgcccagcccccacggggaccccccgccagccaagggaggcgccccaggacccaggcaatggagtgaccaccagggaatgtgcatcagccttcacctgcaagccccgggccccctgcactccagagatgctggactggaacccacccaaggcaaaggcgtcagttctggcccctctgttctcttcgtgtggcccccagcaggccagccgccccggctccacagcgtcctccacaaggggcctgccgagcagccagtctcacaggaagtaaggatgtccccgggtgtccccatcacgttgccggaggaccagccagcttcccgctctcagctggcagcagctgccggtgatggatgtgaagggacagttgtccacaagactctgggagctgaggggaggccggctctccaggcagcaccagagcaaggccatcgcagccccgccagccgggtcactttctcccagggcagagccaccaaggagggctggggagagcctggcattgccctcctggagaggggaatttcctgctcacccttcacacacagaggagaggggtggcttttgcccgcaggagatcttctggccccagaaacagcaggtgctggatttgcagccctggccctccaggccccaacagggcgacagtgtagggccagcctggagcagggcttttccaaggctgctgaagccagccctcctcacttgggctgactaccaggacccagaaggaactcagggtgaagctcattttattctcaagcctgcgtctcagcagcaaagttggtgttttcttcctgtgttaaaatctgagaaagaaggccaggtgcggtggctcacgcctgtaattccaggactttggaaggctgaggcgggcagatcacgaggtcaggagatcgagaccatcctggctaacgtggtgaaaccccgtctctactaaaaaaatacaaaaaaattagccgggcgtggtggcgggcgcttgtagtcccagctactctggaggctgaggcaggagaatggcgtgaacccgggaggcggagcttgcagtgagccgagatcgtgccactgcactctagcctgggtgacagagcgagactccgtccccaaaaaaaaaattctgagaatatggtgtgttccagcctcttcaaagctctgctcttctgcacacgttttttgaaggccttaaaaaggccaccagtgtgaccagggagcaccctctgcctccctccctgcactgggaccataaacataaacagctctaccagcaaagtgacccatcccgcgggggaggcctgcgcacgcccctcaccagggctgtcatcagaatccagtcttaggacagaggaaggatgtttgccttcaggaccagcaagtcacaggtgtcctggatgttacccaagctctaaaatcaaataaaacccatcagtatttagtggtgtgtgtgtgtgtgtgtgtgtgtgtgtgtgtgtgtgtgtgtgtgtgtgtgtgtgtatgagtgtatgaagggaaatggaaagcagagaaaagtcgcgtgccctcccccaggcacctgatctgcccacagacccttcaatggggacatctctggtcccaatggtcgtaaataaaggctaagcgctggatttttccatggccccctgactcctcaggagcgcaggcagaggaggtaaacaggaggccaggttacccatgagatgaccagaagctcatccagggccgggaccctggttcatctcgtgaattcttggcagcggctccaggctgggcacattagatgctgtcatgtgactggcctggtggccacctcttggttctctggaaatgtgtccactctgtgctcagggaagaaggctgccgtcctgacctgtcagccaccaggccctctctgaactcctcacttgacccggaggcattgggagcaaacacaaagctcgcccctggtgtcagtggtgcagacagaggaaaagcagagggtccgcaaaatgcaactcctccgtggtgagactttgaaaaggtgtagagtggttgcagacaaacagcaaaggagtggaatggaaaaatctctcttgctccccacaagaagtccactcccctacggattcctcagatgccactggctggcacagcctttcccgcccttggtgtgggagcagcagaagtccagcgggggtgggagaatcatcggggtcaggtcagtgtctccctcgtctgaagtcaaccactacttttccctcaagcctaccaaagagctaaagtctgatctgtagatgtctgatggtttgaggagaagaaaagatagtcttttagagaagtggggagtatccaacttagggtcaaaatacactgagattaggccgggcacagtggctcacacctgtaatcccagtgctttgggaggccgaggcggatggatcacttgaggcctccaggagttcgagaccagcctggccaacatggcgaaaccccgtctctactaaaatacaaaaaattagctggatgtggtggtgggtgcctgtaatctcagctactcaaggaggctgaggcacaagaatagcttgaaccgggagatggaagatgcagtgagccaagatcacgcccctgcactccagcctgggcgacagagactccgtcaaaaaaaaaaaaaaaatacattgagattaccaggtggggtatgtgtggttcttccaggaaagtgctgaaaatatcacccaggcctctgcgccacgccctgggagagtacactcctgggctcacgcctctgcattccaaggctgacagctagaaatatactttgtaaaataccaacaacttattcacaaatattccaactatctaccagctccaatgagcttgctgaggatgggtatgaccccagtctaaggggaaagaatctaaaacacaagtaaacctgtttaaaggccagatctccagatggagatccaagcagatggcgcctaaggtttgcccttgaaaactaccaaggaagccacagagagggatctttggaccttctggaaaatggtaaggccccaggtagattatggctcctctgccctggaggctgagccgcccctctggttacctcacatcttctggtttcttctgagtgggacttgatctcatttctgcattcacagcaaggtggaactgtctggcaagagcttaaattaggacctgtggtggggactttaataggcaggtggaggtttgagatccagtgagatgccagagattagtcaataggtgaggaaagatttggcccaaatcaaaagagctaaaaaaaaaataataaaataaaaataaaaataaaatagttgaacaaataaggttcatgaaaaaaaaagaaaagaaagaaaaggtaaagaaaagaaatccatgataaaatatcaaactttttaataaaaacaagtctggccctgtacttggatgaccccacctggcttgtctaaccctaatcccagccccagttttaataaaactgtatttacaaaataggcagctgggacgtggaccagagataccaatttgattttttttaaatattacattaaaatattacatcatgtgtcttca

SEQ ID NO: 108840 - DNA, 2141 bp, Homo sapiens
  Payload ID: 1380
  Gene Symbol: ARMCX1
  Gene Name: armadillo repeat containing, X-linked 1
  Uniprot ID: Q9P291
  ENST ID: ENST00000372829
  CDS Start-End: 372-1733
gccgacgcgtgcagacgtccttctaatcctagtcttcgtttggtccggttgcactcttcctatagcccagagggcgagagggcctgtggcctgggggaaggaggacgaggttctgcctggatcccagcagtaggacgctgtgccatttgggaacaaaggaatagtctgcctggaatccctgcagatcttggggccggaggccagtccaacccttggagcaggaagaaacgcaaagttgtcaagaaccaagtcgagctgcctcagagccggcccgcagtagctgcagactccgcccgcgacgtgtgcgcgcttctctgggccagagcgagcctgttttgtgctcgggttaagagatttgtcccagctataccatgggccgcactcgggaagctggctgcgtggccgctggtgtggttatcggggctggtgcctgctactgtgtatacagactggcttggggaagagacgagaacgagaaaatctgggacgaagacgaggagtctacggacacctcagagattggggttgagactgtgaaaggagctaaaactaacgctggggcagggtctggggccaaacttcagggtgattcagaggtcaagcctgaggtgagtttgggactcgaggattgtccgggtgtaaaagagaaggcccattcaggatcccacagcggaggtggcctagaggccaaggccaaggcccttttcaacacgctgaaggaacaggcaagtgcaaaggcaggcaaaggggctagggtgggtaccatctctgggaacaggacccttgcaccgagtttaccctgcccaggaggcaggggtggaggctgccaccccaccaggagtggatctagggccgggggcagggcaagtggaaaatccaagggaaaggcccgaagtaagagcaccagggctccagctacaacatggcctgtccggagaggcaagttcaactttccttataaaattgatgatattctgagtgctcccgacctccaaaaggtcctcaacatcctggagcgaacaaatgatccttttattcaagaagtagccttggtcactctgggtaacaatgcagcatattcatttaaccagaatgccatacgtgaattgggtggtgtcccaattattgcaaaactgataaaaacaaaagaccccataattagggaaaagacttacaatgcccttaataacttgagtgtgaacgcagaaaatcagggcaagattaagacgtacatcagtcaagtgtgtgatgacaccatggtctgtcgcttggactcagctgtgcagatggctgggctaagactgttaaccaacatgactgtgactaatcattaccaacatttgctttcctattcttttccagacttttttgctttgttattcctgggaaatcacttcaccaagatacagattatgaaactaattataaactttactgaaaatccagccatgacaagagagctggtcagttgtaaagtaccatcagaattgatttccctctttaataaagaatgggatagagagattcttcttaatatccttaccctatttgagaatataaatgacaacataaaaaatgaagggctcgcatcatccaggaaagaattcagcagaagttcactttttttcttattcaaagagtctggagtttgtgttaagaaaatcaaagcactagcaaatcacaatgatctggtggtgaaagtaaaagtcctgaaagtattaaccaaactctaatttggagtctgtcccaaacaatattgagatatttgcagttggtacgatgtgatttgtaaattctttgtttttcattgtgcgtatatggtaaagagatcttttcagctgctattttggaataatgactatcatatatcataacagtgactgatgttggttgtaatggttgggtttaggatgaaccattttaaggatgccaaatgaaatattagtatttgtacacagaaagaatttattgatttgatcttattacctagattgagattttttaatctttcctctacctaaactgacaatgaattggttatacatcatgcataagctacacttttatattagtttatatttgttattctaagacttgtgtttcatcaataaagttgtgttttaagcagcagaaaaaaaaaa

SEQ ID NO: 108841 - DNA, 2053 bp, Homo sapiens
  Payload ID: 1380
  Gene Symbol: ARMCX1
  Gene Name: armadillo repeat containing, X-linked 1
  ENST ID: ENST00000616751
  CDS Start-End: 301-1398
gggcgagagggcctgtggcctgggggaaggaggacgaggttctgcctggatcccagcagtaggacgctgtgccatttgggaacaaaggaatagtctgcctggaatccctgcagatcttggggccggaggccagtccaacccttggagcaggaagaaacgcaaagttgtcaagaaccaagtcgagctgcctcagagccggcccgcagtagctgcagactccgcccgcgacgtgtgcgcgcttctctgggccagagcgagcctgttttgtgctcgggttaagagatttgtcccagctataccatgggccgcactcgggaagctggctgcgtggccgctggtgtggttatcggggctggtgcctgctactgtgtatacagactggcttggggaagagacgagaacgagaaaatctgggacgaagacgaggagtctacggacacctcagagattggggttgagactgtgaaaggagctaaaactaacgctggggcagggtctggggccaaacttcagggtgattcagaggtcaagcctgaggtgagtttgggactcgaggattgtccgggtgtaaaagagaaggcccattcaggatcccacagcggaggtggcctagaggccaaggccaaggcccttttcaacacgctgaaggaacaggcaagtgcaaaggcaggcaaaggggctagggtgggtaccatctctgggaacaggacccttgcaccgagtttaccctgcccaggaggcaggggtggaggctgccaccccaccaggagtggatctagggccgggggcagggcaagtggaaaatccaagggaaaggcccgaagtaagagcaccagggctccagctacaacatggcctgtccggagaggcaagttcaactttccttataaaattgatgatattctgagtgctcccgacctccaaaaggtcctcaacatcctggagcgaacaaatgatccttttattcaagaagtagccttggtcactctgggtaacaatgcagcatattcatttaaccagaatgccatacgtgaattgggtggtgtcccaattattgcaaaactgataaaaacaaaagaccccataattagggaaaagacttacaatgcccttaataacttgagtgtgaacgcagaaaatcagggcaagattaagacgtacatcagtcaagtgtgtgatgacaccatggtctgtcgcttggactcagctgtgcagatggctgggctaagactgttaaccaacatgactgtgactaatcattaccaacatttgctttcctattcttttccagacttttttgctttgttattcctgggaaatcacttcaccaagatacagattatgaaactaattataaactttactgaaaatccagccatgacagctggtcagttgtaaagtaccatcagaattgatttccctctttaataaagaatgggatagagagattcttcttaatatccttaccctatttgagaatataaatgacaacataaaaaatgaagggctcgcatcatccaggaaagaattcagcagaagttcactttttttcttattcaaagagtctggagtttgtgttaagaaaatcaaagcactagcaaatcacaatgatctggtggtgaaagtaaaagtcctgaaagtattaaccaaactctaatttggagtctgtcccaaacaatattgagatatttgcagttggtacgatgtgatttgtaaattctttgtttttcattgtgcgtatatggtaaagagatcttttcagctgctattttggaataatgactatcatatatcataacagtgactgatgttggttgtaatggttgggtttaggatgaaccattttaaggatgccaaatgaaatattagtatttgtacacagaaagaatttattgatttgatcttattacctagattgagattttttaatctttcctctacctaaactgacaatgaattggttatacatcatgcataagctacacttttatattagtttatatttgttattctaagacttgtgtttcatcaataaagttgtgttttaagcagc

SEQ ID NO: 108842 - DNA, 2663 bp, Homo sapiens
  Payload ID: 1381
  Gene Symbol: ARMCX2
  Gene Name: armadillo repeat containing, X-linked 2
  Uniprot ID: Q7L311
  ENST ID: ENST00000330154
  CDS Start-End: 356-2254
gaatcatttgacattctgatgtgcaaacacgaaaaggcagttactgagacccttgtcctggatgctgatccatccaccaggctttcattgtctaacgtcgacagtctatatttctgctcttcagtctgtccttaggatgaagctctaactgaactgaagtctgtcttccttttgggctctgtgcaactgcagctacagtggaaaaaagcaaactgctcttgatcccaggccctgcctaagcctcagcagaacttgtaagcctaaactgaagagcctcacccggacgagcaggcatcccttaaccttaagcaatccagttccacgccctggatcagtgaataaccccagctgcaccatgagccgcgttcgggatgctggctgtgtagcggcggggatagtgataggggctggtgcctggtactgtgtctacaaatacaccagggggagagaccagaccaagaagagaatggccaagcccaaaaaccgggctgtggctgggactggagccagggctagagctgggctaagagccggattcacaatcgaccttgggtcaggattcagtcccccaaccccagtccgtgctgaagcagaggacagggcccaggatgaagcctctgctctggacacagttggagctgaggcagtggccccagctgcatccagcgctgaggctcagagtggggcaggcagtcaggcccaagaggcagatggagccggggttgggcctaaggccgaatcagtagttggggctgcaatggcttctgcaatagcaccacctcccggggtgacagaggcccttggggctgcagaagcccctgcaatggcaggggctcccaaagtggcagaagctcccagagaagcggagacttccagggcagcggtgcctcctgggacagtggtgcctaccgaagcggcagcacccactgaggtgaccgagggtcctggggtagcagcacctaccaaggtagctgaagctcccggggtggcatcgcctaccgaggcagctgaggctcctgtgccggcaacgcctactggggctgcagcacctactggggctgcagagtctcctggaacttctggttcccctagaacagcggtggttcctggaacatcagctgccaagaaagcaacccctggggctcacactggggctataccgaaagccacatcagcgactggagcggtacccaaaggtggaggcaagggtgtaaccaggtcccggaatgggggcaagggcaagggcaagaaaagcaaagttgaagtagacgaactggggatgggcttccgtcctggagatggggctgcagcagctgctgcagcctctgctaatggcggacaggctttcctggcagaggtccctgattctgaggaaggggagtccgggtggactgacacagagtcagattcagactctgagcccgagacccagcgcagagggaggggaagaagacccgttgccatgcagaagcgcccctttccttatgaaattgatgagattctgggtgtccgcgatctcaggaaggtccttgccttgcttcagaaatctgatgatcctttcatccaacaggtagctttgctcactctgagcaacaatgccaattattcatgcaatcaagagacaatccgcaaattgggaggcctcccaattattgcaaacatgatcaacaaaactgatccacacattaaggaaaaagccttaatggccatgaataacctgagtgagaattatgaaaatcagggccggcttcaggtgtacatgaataaagtgatggatgatatcatggcctctaacctgaactcagcagttcaagtagttggactaaaatttctaacaaacatgactattactaatgactaccaacacctgcttgtcaattccattgcaaactttttccgtttgctatctcagggaggtggaaaaatcaaggttgagattttgaaaatcctttcgaattttgctgaaaatccagatatgttgaagaaacttctcagtacccaagtgccagcatcatttagttccctctataattcttacgtggaatcagaaatccttattaatgcccttactctatttgagattatctatgacaatctcagagcagaagtgtttaactatagagaattcaataaaggttcccttttttacttatgcactacatctggagtgtgtgttaagaaaattagagccttagcaaatcaccatgacctcttagtgaaagtgaaagttataaaactagtgaacaaattctgattggttatgtaccgtcaaaagacttgaagaaatttcatgattttgcagtgtggaagcgttgaaaattgaaagttactgcttttccacttgctcatatagtaaagggatcctttcagctgccagtgttgaataatgtatcatccagagtgatgttatctgtgacagtcaccagctttaagctgaaccattttatgaataccaaataaatagacctcttgtactgaaaacatatttgtgactttaatcgtgctgcttggatagaaatatttttactggttcttctgaattgacagtaaacctgtccattatgaatggcctactgttctattatttgttttgacttgaatttatccaccaaagacttcatttgtgtatcatcaataaagttgtatgtttcaactgacaaaaa

SEQ ID NO: 108843 - DNA, 2762 bp, Homo sapiens
  Payload ID: 1381
  Gene Symbol: ARMCX2
  Gene Name: armadillo repeat containing, X-linked 2
  Uniprot ID: Q7L311
  ENST ID: ENST00000328766
  CDS Start-End: 455-2353
tgggtaccaactctattgcgcagctcgctgccgtgcgtttaacccaggcgaggaggaggaggagaaaattcccccagattcgggcagacacctccggcccacacagccgttcaccccccgtcttttcagtcctggaaaaggaattcgggctttcattgtctaacgtcgacagtctatatttctgctcttcagtctgtccttaggatgaagctctaactgaactgaagtaaggagaaacagccttgaatctttggagggtctgtcttccttttgggctctgtgcaactgcagctacagtggaaaaaagcaaactgctcttgatcccaggccctgcctaagcctcagcagaacttgtaagcctaaactgaagagcctcacccggacgagcaggcatcccttaaccttaagcaatccagttccacgccctggatcagtgaataaccccagctgcaccatgagccgcgttcgggatgctggctgtgtagcggcggggatagtgataggggctggtgcctggtactgtgtctacaaatacaccagggggagagaccagaccaagaagagaatggccaagcccaaaaaccgggctgtggctgggactggagccagggctagagctgggctaagagccggattcacaatcgaccttgggtcaggattcagtcccccaaccccagtccgtgctgaagcagaggacagggcccaggatgaagcctctgctctggacacagttggagctgaggcagtggccccagctgcatccagcgctgaggctcagagtggggcaggcagtcaggcccaagaggcagatggagccggggttgggcctaaggccgaatcagtagttggggctgcaatggcttctgcaatagcaccacctcccggggtgacagaggcccttggggctgcagaagcccctgcaatggcaggggctcccaaagtggcagaagctcccagagaagcggagacttccagggcagcggtgcctcctgggacagtggtgcctaccgaagcggcagcacccactgaggtgaccgagggtcctggggtagcagcacctaccaaggtagctgaagctcccggggtggcatcgcctaccgaggcagctgaggctcctgtgccggcaacgcctactggggctgcagcacctactggggctgcagagtctcctggaacttctggttcccctagaacagcggtggttcctggaacatcagctgccaagaaagcaacccctggggctcacactggggctataccgaaagccacatcagcgactggagcggtacccaaaggtggaggcaagggtgtaaccaggtcccggaatgggggcaagggcaagggcaagaaaagcaaagttgaagtagacgaactggggatgggcttccgtcctggagatggggctgcagcagctgctgcagcctctgctaatggcggacaggctttcctggcagaggtccctgattctgaggaaggggagtccgggtggactgacacagagtcagattcagactctgagcccgagacccagcgcagagggaggggaagaagacccgttgccatgcagaagcgcccctttccttatgaaattgatgagattctgggtgtccgcgatctcaggaaggtccttgccttgcttcagaaatctgatgatcctttcatccaacaggtagctttgctcactctgagcaacaatgccaattattcatgcaatcaagagacaatccgcaaattgggaggcctcccaattattgcaaacatgatcaacaaaactgatccacacattaaggaaaaagccttaatggccatgaataacctgagtgagaattatgaaaatcagggccggcttcaggtgtacatgaataaagtgatggatgatatcatggcctctaacctgaactcagcagttcaagtagttggactaaaatttctaacaaacatgactattactaatgactaccaacacctgcttgtcaattccattgcaaactttttccgtttgctatctcagggaggtggaaaaatcaaggttgagattttgaaaatcctttcgaattttgctgaaaatccagatatgttgaagaaacttctcagtacccaagtgccagcatcatttagttccctctataattcttacgtggaatcagaaatccttattaatgcccttactctatttgagattatctatgacaatctcagagcagaagtgtttaactatagagaattcaataaaggttcccttttttacttatgcactacatctggagtgtgtgttaagaaaattagagccttagcaaatcaccatgacctcttagtgaaagtgaaagttataaaactagtgaacaaattctgattggttatgtaccgtcaaaagacttgaagaaatttcatgattttgcagtgtggaagcgttgaaaattgaaagttactgcttttccacttgctcatatagtaaagggatcctttcagctgccagtgttgaataatgtatcatccagagtgatgttatctgtgacagtcaccagctttaagctgaaccattttatgaataccaaataaatagacctcttgtactgaaaacatatttgtgactttaatcgtgctgcttggatagaaatatttttactggttcttctgaattgacagtaaacctgtccattatgaatggcctactgttctattatttgttttgacttgaatttatccaccaaagacttcatttgtgtatcatcaataaagttgtatgtttcaactgacaaaaa

SEQ ID NO: 108844 - DNA, 2674 bp, Homo sapiens
  Payload ID: 1381
  Gene Symbol: ARMCX2
  Gene Name: armadillo repeat containing, X-linked 2
  Uniprot ID: Q7L311
  ENST ID: ENST00000356824
  CDS Start-End: 553-2451
gtgggcaaaggtacttaaagccctgaccgtcgttctccgtcctcctctgggtaccaactctattgcgcagctcgctgccgtgcgtttaacccaggcgaggaggaggaggagaaaattcccccagattcgggcaggcccgcaccccacattccgtcctgttttgagaggaggagggaagagaaataaacgtggcagcgcatagaaggccagcagggagactgctttccagacacctccggcccacacagccgttcaccccccgtcttttcagtcctggaaaaggaattcggtctgtccttaggatgaagctctaactgaactgaagtaaggagaaacagccttgaatctttggagggtctgtcttccttttgggctctgtgcaactgcagctacagtggaaaaaagcaaactgctcttgatcccaggccctgcctaagcctcagcagaacttgtaagcctaaactgaagagcctcacccggacgagcaggcatcccttaaccttaagcaatccagttccacgccctggatcagtgaataaccccagctgcaccatgagccgcgttcgggatgctggctgtgtagcggcggggatagtgataggggctggtgcctggtactgtgtctacaaatacaccagggggagagaccagaccaagaagagaatggccaagcccaaaaaccgggctgtggctgggactggagccagggctagagctgggctaagagccggattcacaatcgaccttgggtcaggattcagtcccccaaccccagtccgtgctgaagcagaggacagggcccaggatgaagcctctgctctggacacagttggagctgaggcagtggccccagctgcatccagcgctgaggctcagagtggggcaggcagtcaggcccaagaggcagatggagccggggttgggcctaaggccgaatcagtagttggggctgcaatggcttctgcaatagcaccacctcccggggtgacagaggcccttggggctgcagaagcccctgcaatggcaggggctcccaaagtggcagaagctcccagagaagcggagacttccagggcagcggtgcctcctgggacagtggtgcctaccgaagcggcagcacccactgaggtgaccgagggtcctggggtagcagcacctaccaaggtagctgaagctcccggggtggcatcgcctaccgaggcagctgaggctcctgtgccggcaacgcctactggggctgcagcacctactggggctgcagagtctcctggaacttctggttcccctagaacagcggtggttcctggaacatcagctgccaagaaagcaacccctggggctcacactggggctataccgaaagccacatcagcgactggagcggtacccaaaggtggaggcaagggtgtaaccaggtcccggaatgggggcaagggcaagggcaagaaaagcaaagttgaagtagacgaactggggatgggcttccgtcctggagatggggctgcagcagctgctgcagcctctgctaatggcggacaggctttcctggcagaggtccctgattctgaggaaggggagtccgggtggactgacacagagtcagattcagactctgagcccgagacccagcgcagagggaggggaagaagacccgttgccatgcagaagcgcccctttccttatgaaattgatgagattctgggtgtccgcgatctcaggaaggtccttgccttgcttcagaaatctgatgatcctttcatccaacaggtagctttgctcactctgagcaacaatgccaattattcatgcaatcaagagacaatccgcaaattgggaggcctcccaattattgcaaacatgatcaacaaaactgatccacacattaaggaaaaagccttaatggccatgaataacctgagtgagaattatgaaaatcagggccggcttcaggtgtacatgaataaagtgatggatgatatcatggcctctaacctgaactcagcagttcaagtagttggactaaaatttctaacaaacatgactattactaatgactaccaacacctgcttgtcaattccattgcaaactttttccgtttgctatctcagggaggtggaaaaatcaaggttgagattttgaaaatcctttcgaattttgctgaaaatccagatatgttgaagaaacttctcagtacccaagtgccagcatcatttagttccctctataattcttacgtggaatcagaaatccttattaatgcccttactctatttgagattatctatgacaatctcagagcagaagtgtttaactatagagaattcaataaaggttcccttttttacttatgcactacatctggagtgtgtgttaagaaaattagagccttagcaaatcaccatgacctcttagtgaaagtgaaagttataaaactagtgaacaaattctgattggttatgtaccgtcaaaagacttgaagaaatttcatgattttgcagtgtggaagcgttgaaaattgaaagttactgcttttccacttgctcatatagtaaagggatcctttcagctgccagtgttgaataatgtatcatccagagtgatgttatctgtgacagtcaccagctttaagctgaaccattttatgaataccaaataaatagacctcttgtactg

SEQ ID NO: 108845 - DNA, 821 bp, Homo sapiens
  Payload ID: 1381
  Gene Symbol: ARMCX2
  Gene Name: armadillo repeat containing, X-linked 2
  ENST ID: ENST00000440675
  CDS Start-End: 508-821
actctattgcgcagctcgctgccgtgcgtttaacccaggcgaggaggaggaggagaaaattcccccagattcgggcaggcccgcaccccacattccgtcctgttttgagaggaggagggaagagaaataaacgtggcagcgcatagaaggccagcagggaggttgggaaaggactgctttccagacacctccggcccacacagccgttcaccccccgtcttttcagtcctggaaaaggaattcggtctgtccttaggatgaagctctaactgaactgaagtaaggagaaacagccttgaatctttggagggtctgtcttccttttgggctctgtgcaactgcagctacagtggaaaaaagcaaactgctcttgatcccaggccctgcctaagcctcagcagaacttgtaagcctaaactgaagagcctcacccggacgagcaggcatcccttaaccttaagcaatccagttccacgccctggatcagtgaataaccccagctgcaccatgagccgcgttcgggatgctggctgtgtagcggcggggatagtgataggggctggtgcctggtactgtgtctacaaatacaccagggggagagaccagaccaagaagagaatggccaagcccaaaaaccgggctgtggctgggactggagccagggctagagctgggctaagagccggattcacaatcgaccttgggtcaggattcagtcccccaaccccagtccgtgctgaagcagaggacagggcccaggatgaagcctctgctctggacacagttggagctgaggcagtggccccagctgcatccagcgc

SEQ ID NO: 108846 - DNA, 580 bp, Homo sapiens
  Payload ID: 1381
  Gene Symbol: ARMCX2
  Gene Name: armadillo repeat containing, X-linked 2
  ENST ID: ENST00000431597
  CDS Start-End: 393-580
cgaggaggaggaggagaaaattcccccagattcgggcaggcccgcaccccacattccgtcctgttttgagaggaggagggaagagaaataaacgtggcagcgcatagaaggccagcagggagactgctttccagacacctccggcccacacagccgttcaccccccgtcttttcagtcctggaaaaggaattcgggtctgtcttccttttgggctctgtgcaactgcagctacagtggaaaaaagcaaactgctcttgatcccaggccctgcctaagcctcagcagaacttgtaagcctaaactgaagagcctcacccggacgagcaggcatcccttaaccttaagcaatccagttccacgccctggatcagtgaataaccccagctgcaccatgagccgcgttcgggatgctggctgtgtagcggcggggatagtgataggggctggtgcctggtactgtgtctacaaatacaccagggggagagaccagaccaagaagagaatggccaagcccaaaaaccgggctgtggctgggactggagccagggctagagctgggctaagagccggattcacaat

SEQ ID NO: 108847 - DNA, 854 bp, Homo sapiens
  Payload ID: 1381
  Gene Symbol: ARMCX2
  Gene Name: armadillo repeat containing, X-linked 2
  ENST ID: ENST00000433318
  CDS Start-End: 359-854
acgaaaaggcagttactgagacccttgtcctggatgctgatccatccaccaggctttcattgtctaacgtcgacagtctatatttctgctcttcagtctgtccttaggatgaagctctaactgaactgaagtaaggagaaacagccttgaatctttggagggtctgtcttccttttgggctctgtgcaactgcagctacagtggaaaaaagcaaactgctcttgatcccaggccctgcctaagcctcagcagaacttgtaagcctaaactgaagagcctcacccggacgagcaggcatcccttaaccttaagcaatccagttccacgccctggatcagtgaataaccccagctgcaccatgagccgcgttcgggatgctggctgtgtagcggcggggatagtgataggggctggtgcctggtactgtgtctacaaatacaccagggggagagaccagaccaagaagagaatggccaagcccaaaaaccgggctgtggctgggactggagccagggctagagctgggctaagagccggattcacaatcgaccttgggtcaggattcagtcccccaaccccagtccgtgctgaagcagaggacagggcccaggatgaagcctctgctctggacacagttggagctgaggcagtggccccagctgcatccagcgctgaggctcagagtggggcaggcagtcaggcccaagaggcagatggagccggggttgggcctaaggccgaatcagtagttggggctgcaatggcttctgcaatagcaccacctcccggggtgacagaggcccttggggctgcagaagcccctgcaatggcaggggctcccaaagtggcagaag

SEQ ID NO: 108848 - DNA, 914 bp, Homo sapiens
  Payload ID: 1381
  Gene Symbol: ARMCX2
  Gene Name: armadillo repeat containing, X-linked 2
  ENST ID: ENST00000413506
  CDS Start-End: 413-914
ctctattgcgcagctcgctgccgtgcgtttaacccaggcgaggaggaggaggagaaaattcccccagattcgggcagactgctttccagacacctccggcccacacagccgttcaccccccgtcttttcagtcctggaaaaggaattcggtctgtccttaggatgaagctctaactgaactgaagtaaggagaaacagccttgaatctttggagggtctgtcttccttttgggctctgtgcaactgcagctacagtggaaaaaagcaaactgctcttgatcccaggccctgcctaagcctcagcagaacttgtaagcctaaactgaagagcctcacccggacgagcaggcatcccttaaccttaagcaatccagttccacgccctggatcagtgaataaccccagctgcaccatgagccgcgttcgggatgctggctgtgtagcggcggggatagtgataggggctggtgcctggtactgtgtctacaaatacaccagggggagagaccagaccaagaagagaatggccaagcccaaaaaccgggctgtggctgggactggagccagggctagagctgggctaagagccggattcacaatcgaccttgggtcaggattcagtcccccaaccccagtccgtgctgaagcagaggacagggcccaggatgaagcctctgctctggacacagttggagctgaggcagtggccccagctgcatccagcgctgaggctcagagtggggcaggcagtcaggcccaagaggcagatggagccggggttgggcctaaggccgaatcagtagttggggctgcaatggcttctgcaatagcaccacctcccggggtgacagaggcccttggggctgcagaagcccctgcaatggcaggggctcccaaagtggcagaagctccca

SEQ ID NO: 108849 - DNA, 758 bp, Homo sapiens
  Payload ID: 1381
  Gene Symbol: ARMCX2
  Gene Name: armadillo repeat containing, X-linked 2
  ENST ID: ENST00000458024
  CDS Start-End: 481-758
tattgcgcagctcgctgccgtgcgtttaacccaggcgaggaggaggaggagaaaattcccccagattcgggcaggcccgcaccccacattccgtcctgttttgagaggaggagggaagagaaataaacgtggcagcgcatagaaggccagcagggagacacctccggcccacacagccgttcaccccccgtcttttcagtcctggaaaaggaattcggtctgtccttaggatgaagctctaactgaactgaagtaaggagaaacagccttgaatctttggagggtctgtcttccttttgggctctgtgcaactgcagctacagtggaaaaaagcaaactgctcttgatcccaggccctgcctaagcctcagcagaacttgtaagcctaaactgaagagcctcacccggacgagcaggcatcccttaaccttaagcaatccagttccacgccctggatcagtgaataaccccagctgcaccatgagccgcgttcgggatgctggctgtgtagcggcggggatagtgataggggctggtgcctggtactgtgtctacaaatacaccagggggagagaccagaccaagaagagaatggccaagcccaaaaaccgggctgtggctgggactggagccagggctagagctgggctaagagccggattcacaatcgaccttgggtcaggattcagtcccccaaccccagtccgtgctgaagcagaggacagggcccaggatgaagcctctgctctggacacagt

SEQ ID NO: 108850 - DNA, 3730 bp, Homo sapiens
  Payload ID: 1382
  Gene Symbol: ARMCX3
  Gene Name: armadillo repeat containing, X-linked 3
  Uniprot ID: Q9UH62
  ENST ID: ENST00000341189
  CDS Start-End: 867-2006
agatctgggactagatttcagaggaaatggtagactttcatagctcgggggaggggaggtggagggagaggctgctgtcccaggagcctagggaaggaagaggcaatttttcataaaagtacaagtggcccatagccccaggggaagatgccgtccctttctggtaatcggtggaagggaaacacaactacaaggtgatgagattatcgaagaagaaagagtaataaggcctggtgtgggggagggaaaggaggggggcgggccctcttctgccgcactgctggtgggaggggaaattggggacccgagttggtggatgacgtagccctcacgtgaccaagagctgacgtgtgcagaagtccttcttgtcctggtcgttgttcccgtctgagtaccagctccccactgccctgagggcgggccggcctgcggcggagggaaaaaggaagaggagaaggaaattgtcccgaatccctgcagtgggtccaagcctctcccgggtggccagtctttctgtaggttgcggcacaacgccaggcaaaagaagaggaaggaatttaatcctaatcggtggaggtcgatttgagggtctgctgtagcaggtggctccgcttgaagcgagggaggaagtttcctccgatcagtagagattggaaagattgttgggagtggcacaccactagggaaaagaagaaggggcgaactgcttgtcttgaggaggtcaacccccagaatcagctcttgtggccttgaagtggctgaagacgatcaccctccacaggcttgagcccagtcccacagccttcctcccccagcctgagtgactactctattccttggtccctgctattgtcggggacgattgcatgggctacgccaggaaagtaggctgggtgaccgcaggcctggtgattggggctggcgcctgctattgcatttatagactgactaggggaagaaaacagaacaaggaaaaaatggctgagggtggatctggggatgtggatgatgctggggactgttctggggccaggtataatgactggtctgatgatgatgatgacagcaatgagagcaagagtatagtatggtacccaccttgggctcggattgggactgaagctggaaccagagctagggccagggcaagggccagggctacccgggcacgtcgggctgtccagaaacgggcttcccccaattcagatgataccgttttgtcccctcaagagctacaaaaggttctttgcttggttgagatgtctgaaaagccttatattcttgaagcagctttaattgctctgggtaacaatgctgcttatgcatttaacagagatattattcgtgatctgggtggtctcccaattgtcgcaaagattctcaatactcgggatcccatagttaaggaaaaggctttaattgtcctgaataacttgagtgtgaatgctgaaaatcagcgcaggcttaaagtatacatgaatcaagtgtgtgatgacacaatcacttctcgcttgaactcatctgtgcagcttgctggactgagattgcttacaaatatgactgttactaatgagtatcagcacatgcttgctaattccatttctgacttttttcgtttattttcagcgggaaatgaagaaaccaaacttcaggttctgaaactccttttgaatttggctgaaaatccagccatgactagggaactgctcagggcccaagtaccatcttcactgggctccctctttaataagaaggagaacaaagaagttattcttaaacttctggtcatatttgagaacataaatgataatttcaaatgggaagaaaatgaacctactcagaatcaattcggtgaaggttcactttttttctttttaaaagaatttcaagtgtgtgctgataaggttctgggaatagaaagtcaccatgattttttggtgaaagtaaaagttggaaaattcatggccaaacttgctgaacatatgttcccaaagagccaggaataacaccttgattttgtaatttagaagcaacacacattgtaaactattcattttctccaccttgtttatatggtaaaggaatcctttcagctgccagttttgaataatgaatatcatattgtatcatcaatgctgatatttaactgagttggtctttaggtttaagatggataaatgaatatcactacttgttctgaaaacatgtttgttgctttttatctcgctgcctagattgaaatattttgctatttcttctgcataagtgacagtgaaccaattcatcatgagtaagctcccttctgtcattttcattgatttaatttgtgtatcatcaataaaattgtatgttaatgctggaaagaaaaaaagaagaaagaaagaaaccatccctgtccttcagtttataatctagttggagagataagaaacgtacaaaccaaaagataacagaatatctgaagcatgtactcattgtcagatgttccctctgagagcacagaggaggcaaaagcttctgtgggatgtgctagtcggctaaagcttcacagaggaggtggcaattgaaaatgagtcctgaatggggtagggtggttagggaattccatgagacaagacaaggggggcatggtgtgagaaaggcatggaagtaggaaccctcttcctatgacaggagatcattctgcttagagtggagagtgtggagagtgggagtagataattttggaaagctgggtgaagccagttgtggagaattgtttgaatattatcccattgaatacccagagccactaaatctttttttactagaaaataattggggtccatatgaaagtctctattactgagtagtgtcaatgagggtgtggcaaaatggagcctttcacatcctagtggtggccatttggtaatacagatataagccttaaactatgtaaacccttgtcctaaggaagtaattgaataattgcccaaagattgtatgtatgaggctgttcatcccagcactgtctaagctagtaaaaattggaaacaatttaagtatctagcacattggattggttataaagcaaggaatgttcacacagtaggatattataagtatgctgatggaaatctatattgccaggaaaagctattcattatgcgttgtgaagtcagaaagtaaaaaagggtagatagaagtattcgaagtatagttccattttttgagactaataaaacatatgtttaaaaggacactaaaaactggagttatagatatccagatagaaacagtagttatctttgggtagaagaataatgagtgatctttacttttttactttttattcatctttgtgtttttatttatctaaaatgggtattgatttttaggacggttttgaaaaagaaaagtgttgggaatgaagcaagtgattgattggaaaacatactgaatggaagaaatatttagattaaaaatgaggtaggttgaagtttcttctctgaaatgatagataaatggtgaagataaggcttattgtgaggattcagtgaggtaatatatgcaaagtacttacaatgttctggcacatagtaattaattaagaaaatcgagcacccttaattacctagaatgcagggttgttagttttttggttgacttttgttttgctggggcattctgccatgttttagtgtcatttaataaataatagtaacaataaaggttaacatttattaagtga

SEQ ID NO: 108851 - DNA, 3318 bp, Homo sapiens
  Payload ID: 1382
  Gene Symbol: ARMCX3
  Gene Name: armadillo repeat containing, X-linked 3
  Uniprot ID: Q9UH62
  ENST ID: ENST00000537169
  CDS Start-End: 457-1596
tctctcccactcgccgcccgctttccaagacatatgtcccgcttgcagcccatttcgatgctgcgaaacgtgggtccaagcctctcccgggtggccagtctttctgtaggttgcggcacaacgccaggcaaaagaagaggaaggaatttaatcctaatcggtggaggtcgatttgagggtctgctgtagcaggtggctccgcttgaagcgagggaggaagtttcctccgatcagtagagattggaaagattgttgggagtggcacaccactagggaaaagaagaaggggcgaactgcttgtcttgaggaggtcaacccccagaatcagctcttgtggccttgaagtggctgaagacgatcaccctccacaggcttgagcccagtcccacagccttcctcccccagcctgagtgactactctattccttggtccctgctattgtcggggacgattgcatgggctacgccaggaaagtaggctgggtgaccgcaggcctggtgattggggctggcgcctgctattgcatttatagactgactaggggaagaaaacagaacaaggaaaaaatggctgagggtggatctggggatgtggatgatgctggggactgttctggggccaggtataatgactggtctgatgatgatgatgacagcaatgagagcaagagtatagtatggtacccaccttgggctcggattgggactgaagctggaaccagagctagggccagggcaagggccagggctacccgggcacgtcgggctgtccagaaacgggcttcccccaattcagatgataccgttttgtcccctcaagagctacaaaaggttctttgcttggttgagatgtctgaaaagccttatattcttgaagcagctttaattgctctgggtaacaatgctgcttatgcatttaacagagatattattcgtgatctgggtggtctcccaattgtcgcaaagattctcaatactcgggatcccatagttaaggaaaaggctttaattgtcctgaataacttgagtgtgaatgctgaaaatcagcgcaggcttaaagtatacatgaatcaagtgtgtgatgacacaatcacttctcgcttgaactcatctgtgcagcttgctggactgagattgcttacaaatatgactgttactaatgagtatcagcacatgcttgctaattccatttctgacttttttcgtttattttcagcgggaaatgaagaaaccaaacttcaggttctgaaactccttttgaatttggctgaaaatccagccatgactagggaactgctcagggcccaagtaccatcttcactgggctccctctttaataagaaggagaacaaagaagttattcttaaacttctggtcatatttgagaacataaatgataatttcaaatgggaagaaaatgaacctactcagaatcaattcggtgaaggttcactttttttctttttaaaagaatttcaagtgtgtgctgataaggttctgggaatagaaagtcaccatgattttttggtgaaagtaaaagttggaaaattcatggccaaacttgctgaacatatgttcccaaagagccaggaataacaccttgattttgtaatttagaagcaacacacattgtaaactattcattttctccaccttgtttatatggtaaaggaatcctttcagctgccagttttgaataatgaatatcatattgtatcatcaatgctgatatttaactgagttggtctttaggtttaagatggataaatgaatatcactacttgttctgaaaacatgtttgttgctttttatctcgctgcctagattgaaatattttgctatttcttctgcataagtgacagtgaaccaattcatcatgagtaagctcccttctgtcattttcattgatttaatttgtgtatcatcaataaaattgtatgttaatgctggaaagaaaaaaagaagaaagaaagaaaccatccctgtccttcagtttataatctagttggagagataagaaacgtacaaaccaaaagataacagaatatctgaagcatgtactcattgtcagatgttccctctgagagcacagaggaggcaaaagcttctgtgggatgtgctagtcggctaaagcttcacagaggaggtggcaattgaaaatgagtcctgaatggggtagggtggttagggaattccatgagacaagacaaggggggcatggtgtgagaaaggcatggaagtaggaaccctcttcctatgacaggagatcattctgcttagagtggagagtgtggagagtgggagtagataattttggaaagctgggtgaagccagttgtggagaattgtttgaatattatcccattgaatacccagagccactaaatctttttttactagaaaataattggggtccatatgaaagtctctattactgagtagtgtcaatgagggtgtggcaaaatggagcctttcacatcctagtggtggccatttggtaatacagatataagccttaaactatgtaaacccttgtcctaaggaagtaattgaataattgcccaaagattgtatgtatgaggctgttcatcccagcactgtctaagctagtaaaaattggaaacaatttaagtatctagcacattggattggttataaagcaaggaatgttcacacagtaggatattataagtatgctgatggaaatctatattgccaggaaaagctattcattatgcgttgtgaagtcagaaagtaaaaaagggtagatagaagtattcgaagtatagttccattttttgagactaataaaacatatgtttaaaaggacactaaaaactggagttatagatatccagatagaaacagtagttatctttgggtagaagaataatgagtgatctttacttttttactttttattcatctttgtgtttttatttatctaaaatgggtattgatttttaggacggttttgaaaaagaaaagtgttgggaatgaagcaagtgattgattggaaaacatactgaatggaagaaatatttagattaaaaatgaggtaggttgaagtttcttctctgaaatgatagataaatggtgaagataaggcttattgtgaggattcagtgaggtaatatatgcaaagtacttacaatgttctggcacatagtaattaattaagaaaatcgagcacccttaattacctagaatgcagggttgttagttttttggttgacttttgttttgctggggcattctgccatgttttagtgtcatttaataaataatagtaacaataaaggttaacatttattaagt

SEQ ID NO: 108852 - DNA, 637 bp, Homo sapiens
  Payload ID: 1382
  Gene Symbol: ARMCX3
  Gene Name: armadillo repeat containing, X-linked 3
  ENST ID: ENST00000479298
  CDS Start-End: 447-637
cgtgaccaagagctgacgtgtgcagaagtccttcttgtcctggtcgttgttcccgtctgagtaccagctccccactgccctgagggcgggccggcctgcggcggagggaaaaaggaagaggagaaggaaattgtcccgaatccctgcagtctttctgtaggttgcggcacaacgccaggcaaaagaagaggaaggaatttaatcctaatcggtggaggtcgatttgaggattggaaagattgttgggagtggcacaccactagggaaaagaagaaggggcgaactgcttgtcttgaggaggtcaacccccagaatcagctcttgtggccttgaagtggctgaagacgatcaccctccacaggcttgagcccagtcccacagccttcctcccccagcctgagtgactactctattccttggtccctgctattgtcggggacgattgcatgggctacgccaggaaagtaggctgggtgaccgcaggcctggtgattggggctggcgcctgctattgcatttatagactgactaggggaagaaaacagaacaaggaaaaaatggctgagggtggatctggggatgtggatgatgctggggactgttctggggccaggtataatgactggtctgatgatga

SEQ ID NO: 108853 - DNA, 2051 bp, Homo sapiens
  Payload ID: 1382
  Gene Symbol: ARMCX3
  Gene Name: armadillo repeat containing, X-linked 3
  Uniprot ID: Q9UH62
  ENST ID: ENST00000471229
  CDS Start-End: 547-1686
gaaattggggacccgagttggtggatgacgtagccctcacgtgaccaagagctgacgtgtgcagaagtccttcttgtcctggtcgttgttcccgtctgagtaccagctccccactgccctgagggcgggccggcctgcggcggagggaaaaaggaagaggagaaggaaattgtcccgaatccctgcagtctttctgtaggttgcggcacaacgccaggcaaaagaagaggaaggaatttaatcctaatcggtggaggtcgatttgagggtctgctgtagcaggtggctccgcttgaagcgagggaggaagtttcctccgatcagtagagattggaaagattgttgggagtggcacaccactagggaaaagaagaaggggcgaactgcttgtcttgaggaggtcaacccccagaatcagctcttgtggccttgaagtggctgaagacgatcaccctccacaggcttgagcccagtcccacagccttcctcccccagcctgagtgactactctattccttggtccctgctattgtcggggacgattgcatgggctacgccaggaaagtaggctgggtgaccgcaggcctggtgattggggctggcgcctgctattgcatttatagactgactaggggaagaaaacagaacaaggaaaaaatggctgagggtggatctggggatgtggatgatgctggggactgttctggggccaggtataatgactggtctgatgatgatgatgacagcaatgagagcaagagtatagtatggtacccaccttgggctcggattgggactgaagctggaaccagagctagggccagggcaagggccagggctacccgggcacgtcgggctgtccagaaacgggcttcccccaattcagatgataccgttttgtcccctcaagagctacaaaaggttctttgcttggttgagatgtctgaaaagccttatattcttgaagcagctttaattgctctgggtaacaatgctgcttatgcatttaacagagatattattcgtgatctgggtggtctcccaattgtcgcaaagattctcaatactcgggatcccatagttaaggaaaaggctttaattgtcctgaataacttgagtgtgaatgctgaaaatcagcgcaggcttaaagtatacatgaatcaagtgtgtgatgacacaatcacttctcgcttgaactcatctgtgcagcttgctggactgagattgcttacaaatatgactgttactaatgagtatcagcacatgcttgctaattccatttctgacttttttcgtttattttcagcgggaaatgaagaaaccaaacttcaggttctgaaactccttttgaatttggctgaaaatccagccatgactagggaactgctcagggcccaagtaccatcttcactgggctccctctttaataagaaggagaacaaagaagttattcttaaacttctggtcatatttgagaacataaatgataatttcaaatgggaagaaaatgaacctactcagaatcaattcggtgaaggttcactttttttctttttaaaagaatttcaagtgtgtgctgataaggttctgggaatagaaagtcaccatgattttttggtgaaagtaaaagttggaaaattcatggccaaacttgctgaacatatgttcccaaagagccaggaataacaccttgattttgtaatttagaagcaacacacattgtaaactattcattttctccaccttgtttatatggtaaaggaatcctttcagctgccagttttgaataatgaatatcatattgtatcatcaatgctgatatttaactgagttggtctttaggtttaagatggataaatgaatatcactacttgttctgaaaacatgtttgttgctttttatctcgctgcctagattgaaatattttgctatttcttctgcataagtgacagtgaaccaattcatcatgagtaagctcccttctgtcattttcattgatttaatttgtgtatcatcaataaaattgtatgttaatgctggaaagaaaaaaa

SEQ ID NO: 108854 - DNA, 973 bp, Homo sapiens
  Payload ID: 1382
  Gene Symbol: ARMCX3
  Gene Name: armadillo repeat containing, X-linked 3
  ENST ID: ENST00000491568
  CDS Start-End: 691-973
acgtgaccaagagctgacgtgtgcagaagtccttcttgtcctggtcgttgttcccgtctgagtaccagctccccactgccctgagggcgggccggcctgcggcggagggaaaaaggaagaggagaaggaaattgtcccgaatccctgcaggtcagtacctggaagattccataaagtcggggtgcttgagggcgtagggccgagaccgtcgcgggtactgaggcgcctccgtcgtctctcccactcgccgcccgctttccaagacatatgtcccgcttgcagcccatttcgatgctgcgaaacgtgggtccaagcctctcccgggtggccagtctttctgtaggttgcggcacaacgccaggcaaaagaagaggaaggaatttaatcctaatcggtggaggtcgatttgagggtctgctgtagcaggtggctccgcttgaagcgagggaggaagtttcctccgatcagtagagattggaaagattgttgggagtggcacaccactagggaaaagaagaaggggcgaactgcttgtcttgaggaggtcaacccccagaatcagctcttgtggccttgaagtggctgaagacgatcaccctccacaggcttgagcccagtcccacagccttcctcccccagcctgagtgactactctattccttggtccctgctattgtcggggacgattgcatgggctacgccaggaaagtaggctgggtgaccgcaggcctggtgattggggctggcgcctgctattgcatttatagactgactaggggaagaaaacagaacaaggaaaaaatggctgagggtggatctggggatgtggatgatgctggggactgttctggggccaggtataatgactggtctgatgatgatgatgacagcaatgagagcaagagtatagtatggtacccaccttgggctcggattgggactgaagctggaaccagagctagggccagggcaa

SEQ ID NO: 108855 - DNA, 7424 bp, Homo sapiens
  Payload ID: 1383
  Gene Symbol: ARMCX4
  Gene Name: armadillo repeat containing, X-linked 4
  ENST ID: ENST00000423738
  CDS Start-End: 203-7075
ggtgtactgccaagagaagcaagaggagaggagggaactgcctcggatcattacaggtccacctccagaggcagctgtagtggcctttgagtggctgaagaccagcaccctcacaggcctacacccacaactaccactctctttaccccagcccgagtgcgctctaccataccttgttcgtgcttttagcaggggtgattacatgggccgcattcaggaagtgggctgggtgactgcaggactggtgatctgggctggcacctgctactacatttacaaatttaccaagggaagagcccagagtgtgaggactcttgccagaaatggatccacagttaagatggagactgtggttggggtacagagccagaccttggccataaatgaagcagagattaagactaaaccccaagtcgagattggagcagaaactggagcaagaagtgggcctagggctgaagtagagaccaaggccactgctatagccatacacagagccaactctcaggccaaggcaatggttggggcagagccagagactcaatctgagtccaaagtggtggctggaacactggtcatgacagaggcagtgactctgactgaggtcaaggccaaagccagggaagtggccatgaaagaagcagtgacccaaactgatgctgaggctggcaaaatagttaagaaagaagcagtgacacagaccaaggctaaagcttgggcgctggttgccaagacagaggccaagagagaagcaatgacccagaccaaagctgaaactcatatattggctgaaaaagagacagagattaacagagtaatggttacacagagtgagaccttggcagtacccagggaagtggccaagatgggggccacgaacaagactggaattgtggatgaaaccaagacaagagctctggaagagactgtgagtgtggctaagactcagtctgaggccaggcctggtgccacagttgatgctaggggaaatcccaatggcatgtccagggaggtggctggagtggacatgaagtcctgtgcacagtctcaggctgtgaccaagatccagggtgatgacatgcctggtactggggttgaggacatggggaattgtaaaaccatgtctagggcagagtctggggcagacacgagggcttctgctcagcctcaaatttttgccaaaacccagactgaggccattcctggggcaaagattgatgccgggggtaacaccaatgccatgtgtaaggtgggggcaggggcagatgtgagagcttgtatacaacctcagactgtggccaagaaacaggctgaggtgacgtctggtgccagggttgatggtaggggaaataccaatgtcatatctaaggcaataactggagctgacatgagagctgctgctcagcctcaagctgttgccagtactcacgctgaggccatgtctgatgctaaggttaagaacagaggcaatcccaatgccatgactaaagcaggggccaaggcaaacttgagggccaattcccaggttgaggccttgcctgatgccagggataagagcagaggcaatcccaatgttatggctaaggtgggggatgggacagacatgttgtcctgtacacagcctcagcttgtggccagtgttcaggctgataccttgtctgatggcaaaattaaggtcaggggcaatgtcaataccatgcctaaggaaggagctggggtggatatgaaggctcaaggtatggcccagagccagggtgaagccttacctaatactagaggtaaggctaggggcaaagccaaagccaagtgtaagacagggcctgggatggacatgaaaacctgtacacaacctcaggctggggtcaagaccccagctgaggccttgcttgattccagggttgatggtaggggcaatcctaatgccacttctaaagccgggactaaggcagaccagagggtctgtggtcagcccctggttgtggccaatccccagggtgaggccttgcctggtgccaagaataaagtcaagggcaatccccatactgtgcttaaggtgggggctggagaaggtacaacagactctgcccagcctgaggcagtggtcagtttccagggtgaggccttgcttggcaccaagaataaagttaagggtaatcccaatgttgtgcttaaggcagaagttggggaaggtgcaatgggcactgcccagcttcagattatggccagttccaagggtgaggccttgcttgattctaagaataaggtcaagggtaattccaatgctgtgtctaaggcaggggctgggacagatacaacaggctctgtccagccccagattgtggccaattcccagggtgaggtcttgcctggtgccaagaataagatcagaggcaatcccactactgtgcctaattcaggggttgggccatatacaacagactctgcccggctccaggctgtggccaattctcagggtgaggtcttgcctggtgccaaaaataaggtcaaggccaatcttaatgctgtgtctaaggcagaagctgggatgggtgcaacaggctctgtccagccccaggctgtggctaattcccattgtgagaccttgcctggtgccaagaataaggtcaggggaaattggaatgctgtgtctaaggcaggggctgggatggatacaaggggctctgcccagccccaggctgtggccaattcccagggtgaagtcttgcctggtgccaagaataaggtcaagggcaatcccaatgtcgtgtctaaggcaggggccagagaagatacagtgggctctacccagcctcaggttttggccagctcccagcgtgagaccttgcctggtgccaggaataaggtcaagggcaattccaatgttgtgtctaaggcaggggccagagaagatacaatgggctctgcccagcctcaggttgtggccaactcccagcgtgagaccttgcctggtgccaggaataaggtcaagggcaattccaatgctatttctaaggcagaggctggggcaggcataatgggctctgtccaggtccaggttgtggccagttttcagggtgaggtcttgcctggggccaaaaataaggtcaggggcaattccaatgctgtgcctaaggcagaggctggggcagatacagtgggctctgcccagccccaagctgtcgctaattcccagagtgagaccttgcttggtgccaggaataaggtcaagggcaataccattgctgtgcctaaagcagggactggggcaggcacaaggcactctgcccagcctcagattgtggccggttcccagggtgagaccttgcctggggcaagggacaagtctatgtccacttctgaggcagaagccacagcagaagatgaggcctatgcaaagcctgaggctgaggccatgcccacttctgagagtgagggtgggtcaggcactcaagcctgcagaaagactcagcctaacatccatgactactactggaatgggattggtgttgaagactggattgctgctgagcggtggatcaaatttaggtttcagaccatggatggagactgggaaaatagcgtgtcctgggctgatgatgagaatgaagccagtattgggtcctggagtggggctagtgataaggctgggattattcggtcttgggctgtggcttgtgatgagaccagtgttaagtcctgggctggggccagggctgagaatgtggttggtattgggacttgggctagagctggggagcaggccagtggagggctctgggctgggggtcagactagtgaggggacctgggctggggacaaggccagtggaggagcctggactggggctgagaaccaggccagtggggggtcttgggctctcgctgggaatcaggccattggagagctttgggctgcgggtcaggccagtgatgggtcctggcctgggggacaggccagtggggtgtcctgggttggggaagaggccattggagggtcctggactggggctgagaaccaagccagtgaagggtcttgggctggagctggggctgggaatatgagtagtgtttcatactgggctggggttgtggatcaggccggtggagggtcctgggctgggactagtgatcaatctggtggtgggtccaagcctagatttgaggatcaagccagtggagaagggtcctgggctggggctggtggccaggctagtggagggtcaatgttggggcctgaggaccagtccagtggaaggtcttgggctgacactgcagaccaagccagtggagggtctaggctgggccacgtagatcagtccagtggtggggcctgggctgggacacttgatcagtctggtggtgggtccaagcctagatttgaaaatcagaccacagaagaagggtcttgggctggggctggtggccaggctggtggagggtccaaggtggggcctgaagaccagtccagtggaaggtcatgggctaactctggggaccaaatcagtggaggattcttagttgggattgtggaccaggccaatggagggtcctggactggggctgggcatccagctagtgttgggccaaagcctatatttgaggatcaggtcagtggcagagggtcctgggctgatgccagggagcaggttgttggagattctaggctggggcttagggaccagtctagtggagattcctgggctggcactggggaccaggccagtggatggttctgtgtttgccctgggagtcagacgaatggagggtcttggggtggggctagtggccaggatgttggagggtctaggccagggcccacgaaccagtccagtgctgggtcctgggatagccctgggagtcaggtcagtggaagctgctggactggggctggggctgtggatcaggctggtggttgttccaaacctggatttgaggatcaggccattggaggggggttctggcctggtgctggggaccagactggtggaggctccaggccagggtctgaggatcagtccagtggaataggttcctggggtgtggctggtggccaggtccttgggggagctaggccggggcctgcagaccagtccagtggtgggtcctgggctggcactgggaatcagtccagtggaaggtcctggattgggcctggggatcaggctgttgactgttccaagcctgaatttgaggatcaggcttgtggaggaggctcctgggctggtgctgggagccaagccagtggagaatcctgggctggatctaggcctgggaatgaggccattggaggatctaggatgggatctgaggaccaggccactggaggatcctgggctagatctgaggaccaggccagtggaaggttccaggtcagttttgaggtggaggccaatgaaggattctggtttgggcctggagctgaggccgttatagggtcttggtgctggacagaggaaaaagctgatattgtgtccaggcctgatgataaagatgaggccactactgcatccagatcaggggctggggaagaggccatgatttgttctaggattgaggctgagaacaaggctagtagtggctcctggattagatctgaggaggtggcttatatgggctcctgtgtaggggctgaggctggggctggggctgaggctggggctggggctgaggctggggctggggctggggctgaggctggggctgaggctggggctggggctggggctgggcctgggactgagtctggggctgggatttggtcctgggatggagatgcaaccactgtagagtctaggcttggggctggggaagaggctggtgtagagtcctggaccttggctaggaatgtgggagaggatgagctaagtagagagtccagccctgatattgaggagatcagtttaaggtctttgttttgggctgagagtgagaacagtaatacgttcagatctaagagtgggaaagatgccagttttgagtctggagctggggataacaccagcatcaaggataagtttgaggctgctggtggagttgatatagggtcttggttctgtgctggtaatgaaaacacaagtgaggacaaatctgcacctaaggctaaagccaaaaagtcatctgagtcaagaggcatatatccgtacatggtccctggggcaggaatggggtcatgggatggagccatgatctggtcggaaactaagtttgcacaccaaagtgaggccagcttcccagttgaagatgagtccagaaaacaaaccaggactggggaaaaaactcggccctggtcttgccgctgtaaacacgaagctaatatggatccacgagatcttgaaaaactcatttgcatgattgagatgactgaagatccttctgttcatgaaatagccaataatgctttatataacagtgctgattattcttattctcatgaagttgttcgtaatgtaggtggaatttcagttattgaaagcttgctcaataatccctaccccagtgttaggcagaaggctttaaatgcactgaataatatctcagtggctgctgaaaaccataggaaggttaaaacttacttaaaccaagtatgtgaagacactgtcacctatcccttgaattcaaatgtgcagttggctggactaaggttgataaggcatctgactattaccagtgaatatcagcatatggttacaaattatatttcagaatttcttcgtttgttaacggtgggaagtggagaaactaaagaccatgttttgggaatgcttttgaatttctctaaaaatccatctatgacaaaagacttgctcattgccaatgcaccaacatcactgattaacatttttagcaagaaagagacaaaggagaatattcttaatgctctttcactatttgaaaatataaattaccattttaaaagaagagcaaaagcatttacccaggacaaattcagtaaaaattccctttatttcctattccaacgacctaaagcatgtgccaagaaacttcgagccttagcagcagaatgcaatgaccctgaggtgaaagagagagttgagctattaataagtaaactctgattggctgtatgttcccaaacaaatttgagtaatattttggttttgcactctggaagtaatgcacattgtaaattgcattataactttgaaactgatgttacctatgatggtctatagctggaccattttatgaacaccaaatgaattcaagcttgtactaaaaatacatgtgttgatttttatcttgtctggattgagatatttttagtatgcttcatgagcagaaactgaatggattcttcataagtaaggtaatctttggtcctttgtgtggacttatgtttatacatttaagactatttttatgtcatcaataaagttgtgtgttttaagcagcagaaaaaagtca

SEQ ID NO: 108856 - DNA, 2872 bp, Homo sapiens
  Payload ID: 1383
  Gene Symbol: ARMCX4
  Gene Name: armadillo repeat containing, X-linked 4
  ENST ID: ENST00000445416
  CDS Start-End: 438-593
gtgcgcactggggcaccgagcacagaccagagaacggggatgtctgtgcgtgcggagtggaggaggggggagttcctggtgactggccgccggcccttggtgggtggtagggggtgctggggaggagggcgagctcggcggtgacgcgcggtcctcacgtgacccggagctgcagagctacgcagccttcgttgcagtcgtcactcgcatctggctaccagctccccgctgccctgcgctcggcgggctggcatcgggcccggggaaagcggagcagtagttcggtgtagcactgtttgcggcgaggagaaaggaaggagaggagaaaactgcactggatcaaggaggtcttcccataggcctgcagtagggctgtttaccattggaagcaagggaaagaggaggagatcaatctagaagcatggagatctgcctgcatgtctgctgcagggcttaagatcactggaagcaaagaaacaaagaggagattgctcctgatcagtatagactgggtgtactgccaagagaagcaagaggagaggagggaactgcctcggatcattacaggtgttgatcccaagagcattccctagtaaaaacgcttcatgctgaactctatctctgggcctgcttcctgggaagccaacctgcaacagttggtacaagaagtggttcgagaaagcaaacactgtgatgaaattttggagatgaatcacctgctacccagctgtcaatgaagactccatcattggtggtaggtggagtagataggcctctggaataaggtagcagaggaattgttaaaattttcaatggtggttaactgggttggcatactggtaaaatgggacacattaactggtgccatgtatcagacctttgagaaatatgggatatattaaatataaggaaggccagaaaattgggcggctgttgctaagcagattgagctctggaaaagaataacaaaaagctgaattaaattaatcaacaattgaaagctatgtttgaaagtcagatggctttattcataacatataaagaggctctcatcttttccaggtagaaggtggagaaatctgaggagtagactcaggatttgttaaaagcaagcttcaaagaaagttaaaattctaaccaagacaagtcttctatgccgagttatgtgccatggttaagaaggaatgggactctgacacttggaatgggggacatctggattgatgtccctaaaaatcttatatccccagattcccctgagccccttgagaagtgtcctactcctccctattaagggctggcactccatcttgcttcaatatatggaatcctttcccctgtaagataacctgggttttcctcagaatctgcccgcacctcctatcctggccactgggcctataactagggttaagccacgcataatctagctggtgatgtgctgggtgtaataaggaaagaaagagaatacaccaacaaagagtttcgggacataacctagccagcatatactagaaggtgctgagggagtaagtatggcatcaaattctaaggagcttgatcaggagggctggaatataaactggaatatgggagaattaatcaatttgaaagtgctttcccagaatacaggatttaataccctggagaaaaccacaggaaatgacacgaactcattactgcgatggctcctcgaagtatggaaaaagccatggcgtacataaagtgaggtgtaaatgccagagttgccatagaagatggcgggaaaagggatcaaagactcagagagacataaaggagaagatttgggagagggagaggattaatcctgatttgaactcttcgaatttgaagtgcttatgtactatgatttgaatatggtttatccccatccaaagtcatgttgaggatgggttcccaatgtgacagtgttgggaggtggtacccttaagaggcatttgtgtcatggggaatctctcctgatgagggtatgaatgcagtctctttggagtgggagagttcttgtgctcatgggactggattagttactgtgaggaggttggttgttataaagtgagtctgcctcttgtgcttggtgtcttttgcgtgtacctgtttccccttttgtttctttgccatgttttgatgccctcaaaagaagttgtcggatgtgactgcccagtcttgaacttcccagccctcaaaactaacagaacatatcttccagtagcttcctgagaaagtgtatatgcaaagcacacttctgagatctttcagatggttttgccacattgcccaggatggccttgaactcctgggctcaagtgatccacttgccttggccccccaaagtgctgggattacaggttgctatgaaaagaaaaatcatgatattaactaaagaacgttcaattcctcaactgtagttatatctgcatccaaatctctaacaaatgtgtcgtgttattagagcttcagttgtattataatacggtaattttggagtcctaataaaggaaaaggagtcaggctggcgggagcaggagaaagcaagaagagaaagcagataatctataagcctgtctttcttcatggtccaggacacacacccctcctgcgcagataactcacaatcttcttgtgtccagctattaccaaaccctcgtctgatagaaaaatgcaagttagctcactgcagccttggcattatcagtactgcacgcagccctctccagcacaagcaccgtcctaaaaaatcgccagcaagcctttgtctttttgcagtcagctcctctcttcctgatttgcttgttgctttcttgcagcatattttcatactttctctaataaatttacctttatttacctacaa

SEQ ID NO: 108857 - DNA, 1829 bp, Homo sapiens
  Payload ID: 1383
  Gene Symbol: ARMCX4
  Gene Name: armadillo repeat containing, X-linked 4
  Uniprot ID: Q5H9R4
  ENST ID: ENST00000455331
  CDS Start-End: 236-1282
gtcactcgcatctggctaccagctccccgctgccctgcgctcggcgggctggcatcgggcccggggaaagcggagcagttcggtgtagcactgtttgcggcgaggagaaaggaaggagaggagaaaactgcactggatcaaggaggtcttcccataggcctgcagtagggctgtttaccattggaagcaagggaaagaggaggagatcaatctagaagcatggagatctgcctgcatgtctgctgcagggcttaagatcactggaagcaaagaaacaaagaggagattgctcctgatcagtatagactgggtgtactgccaagagaagcaagaggagaggagggaactgcctcggatcattacaggtccacctccagaggcagctgtagtggcctttgagtggctgaagaccagcaccctcacaggcctacacccacaactaccactctctttaccccagcccgagtgcgctctaccataccttgttcgtgcttttagcaggggtgattacatgggccgcattcaggaagtgggctgggtgactgcaggactggtgatctgggctggcacctgctactacatttacaaatttaccaagggaagagcccagagtgtgaggactcttgccagaaatggatccacagttaagatggagactgtggttggggtacagagccagaccttggccataaatgaagcagagattaagactaaaccccaagtcgagattggagcagaaactggagcaagaagtgggcctagggctgaagtagagaccaaggccactgctatagccatacacagagccaactctcaggccaaggcaatggttggggcagagccagagactcaatctgagtccaaagtggtggctggaacactggtcatgacagaggcagtgactctgactgaggtcaaggccaaagccagggaagtggccatgaaagaagcagtgacccaaactgatgctgaggctggcaaaatagttaagaaagaagcagtgacacagaccaaggctaaagcttgggcgctggttgccaagacagaggccaagagagaagcaatgacccagaccaaagctgaaactcatatattggctgaaaaagagacagagattaacagagtaatggttacacagagtgagaccttggcagtacccagggaagtggccaagatgggggccacgaacaagactggaattgtggatgaaaccaagacaagagctctggaagagactgtgttgatcccaagagcattccctagtaaaaacgcttcatgctgaactctatctctgggcctgcttcctgggaagccaacctgcaacagttggtacaagaagtggttcgagaaagcaaacactgtgatgaaattttggagatgaatcacctgctacccagctgtcaatgaagactccatcattggtggtagaaggtggagaaatctgaggagtagactcaggatttgttaaaagcaagcttcaaagaaagttaaaattctaaccaagacaagtcttctatgccgagttatgtgccatggttaagaaggaatgggactctgacacttggaatgggggacatctggattgatgtccctaaaaatcttatatccccagattcccctgagccccttgagaagtgtcctactcctccctattaagggctggcactccatcttgcttcaatatatggaatcctttcccctgtaagataacctgggttttcctcagaatctgcccgcacctcctatcctggccactgggcctataactagggttaagccacgcataatctagctggtgatgtgctgggtgtaataaggaaagaaagaga

SEQ ID NO: 108858 - DNA, 3788 bp, Homo sapiens
  Payload ID: 1383
  Gene Symbol: ARMCX4
  Gene Name: armadillo repeat containing, X-linked 4
  Uniprot ID: Q5H9R4
  ENST ID: ENST00000354842
  CDS Start-End: 217-1263
ctccccgctgccctgcgctcggcgggctggcatcgggcccggggaaagcggagcagtagttcggtgtagcactgtttgcggcgaggagaaaggaaggagaggagaaaactgcactggatcaaggaggtcttcccataggcctgcagtagggctgtttaccattggaagcaagggaaagaggaggagatcaatctagaagcatggagatctgcctgcatgtctgctgcagggcttaagatcactggaagcaaagaaacaaagaggagattgctcctgatcagtatagactgggtgtactgccaagagaagcaagaggagaggagggaactgcctcggatcattacaggtccacctccagaggcagctgtagtggcctttgagtggctgaagaccagcaccctcacaggcctacacccacaactaccactctctttaccccagcccgagtgcgctctaccataccttgttcgtgcttttagcaggggtgattacatgggccgcattcaggaagtgggctgggtgactgcaggactggtgatctgggctggcacctgctactacatttacaaatttaccaagggaagagcccagagtgtgaggactcttgccagaaatggatccacagttaagatggagactgtggttggggtacagagccagaccttggccataaatgaagcagagattaagactaaaccccaagtcgagattggagcagaaactggagcaagaagtgggcctagggctgaagtagagaccaaggccactgctatagccatacacagagccaactctcaggccaaggcaatggttggggcagagccagagactcaatctgagtccaaagtggtggctggaacactggtcatgacagaggcagtgactctgactgaggtcaaggccaaagccagggaagtggccatgaaagaagcagtgacccaaactgatgctgaggctggcaaaatagttaagaaagaagcagtgacacagaccaaggctaaagcttgggcgctggttgccaagacagaggccaagagagaagcaatgacccagaccaaagctgaaactcatatattggctgaaaaagagacagagattaacagagtaatggttacacagagtgagaccttggcagtacccagggaagtggccaagatgggggccacgaacaagactggaattgtggatgaaaccaagacaagagctctggaagagactgtgttgatcccaagagcattccctagtaaaaacgcttcatgctgaactctatctctgggcctgcttcctgggaagccaacctgcaacagttggtacaagaagtggttcgagaaagcaaacactgtgatgaaattttggagatgaatcacctgctacccagctgtcaatgaagactccatcattggtggtaggtggagtagataggcctctggaataaggtagcagaggaattgttaaaattttcaatggtggttaactgggttggcatactggtaaaatgggacacattaactggtgccatgtatcagacctttgagaaatatgggatatattaaatataaggaaggccagaaaattgggcggctgttgctaagcagattgagctctggaaaagaataacaaaaagctgaattaaattaatcaacaattgaaagctatgtttgaaagtcagatggctttattcataacatataaagaggctctcatcttttccaggtagaaggtggagaaatctgaggagtagactcaggatttgttaaaagcaagcttcaaagaaagttaaaattctaaccaagacaagtcttctatgccgagttatgtgccatggttaagaaggaatgggactctgacacttggaatgggggacatctggattgatgtccctaaaaatcttatatccccagattcccctgagccccttgagaagtgtcctactcctccctattaagggctggcactccatcttgcttcaatatatggaatcctttcccctgtaagataacctgggttttcctcagaatctgcccgcacctcctatcctggccactgggcctataactagggttaagccacgcataatctagctggtgatgtgctgggtgtaataaggaaagaaagagaatacaccaacaaagagtttcgggacataacctagccagcatatactagaaggtgctgagggagtaagtatggcatcaaattctaaggagcttgatcaggagggctggaatataaactggaatatgggagaattaatcaatttgaaagtgctttcccagaatacaggatttaataccctggagaaaaccacaggaaatgacacgaactcattactgcgatggctcctcgaagtatggaaaaagccatggcgtacataaagtgaggtgtaaatgccagagttgccatagaagatggcgggaaaagggatcaaagactcagagagacataaaggagaagatttgggagagggagaggattaatcctgatttgaactcttcgaatttgaagtgcttatgtactatgatttgaatatggtttatccccatccaaagtcatgttgaggatgggttcccaatgtgacagtgttgggaggtggtacccttaagaggcatttgtgtcatggggaatctctcctgatgagggtatgaatgcagtctctttggagtgggagagttcttgtgctcatgggactggattagttactgtgaggaggttggttgttataaagtgagtctgcctcttgtgcttggtgtcttttgcgtgtacctgtttccccttttgtttctttgccatgttttgatgccctcaaaagaagttgtcggatgtgactgcccagtcttgaacttcccagccctcaaaactaacatatcttccagtagcttcctgagaaagtgtatatgcaaagcacacttctgagatctttcagatggttttgccacattgcccaggatggccttgaactcctgggctcaagtgatccacttgccttggccccccaaagtgctgggattacaggttgctatgaaaagaaaaatcatgatattaaattttagcatcgatattatggaagctatgcctggactcaacaacacgaacttctactcaccaaggctgatcttgtactaatactaagtgcccaacctgacaacagagaagatgatgagcctttataagacaccattccttaggggcatcagccagtcccatggtgttaggattattacatgggacacctttcatcatcatgaaaacagaaacttttcctcatggaaatgaatatgtattttagacacacatttaccttctttgctgacaatgattctgtcatcaccatctccatggacttccagaatgccttaatcatcatcagagtatcctacacaaagttgtctctgaccaaggaactcatttaatgggactgcatcccccagactccatttgtaattgacttctgcttgggtttggtcaatggaatgccctggcacagctttggagggaagaagagagaagacaatgtatttcttcactgctcccactctgatttgggctatgttttattggcagggactgcatcccttcaagattttagcttcttccagaagtcccctcctccatgactctagctctcactaggctccagaaatactatttcttcctcttgccctcttaggcctagggtaacagctacctgctattgctaacctctgggtgccacaaaattgcttgttgggtctcataatcttgcatatacctctgtaagtagtccctacattaaagtcccttgaaccatc

SEQ ID NO: 108859 - DNA, 5399 bp, Homo sapiens
  Payload ID: 1383
  Gene Symbol: ARMCX4
  Gene Name: armadillo repeat containing, X-linked 4
  Uniprot ID: Q5H9R4
  ENST ID: ENST00000433011
  CDS Start-End: 487-1569
gtcgggaaatggcggccgcggccgggctggggcttcagcgggaggcagcagaggggaagtggtcagcgtggcgaatgacggaagaaactcgcattgtctactggatcaaggacagacagctcaccaaccgtgacagcaccatactggaacttcaaaaagttctgaaaacatgttgtgctcagagcatgaaaattttctgctgtctttggaactttgtctacaaacagttagaagatgcagcccaagggctcaccatgggtggcgatgttgaagaacatgaagaccttactgctgatagcaccatcttcaaatttgtggaagcttattagttcggtgtagcactgtttgcggcgaggagaaaggaaggagaggagaaaactgcactggatcaaggaggtcttcccataggcctgcagtagggctgtttaccattggaagcaagggaaagaggaggagatcaatctagaagcatggagatctgcctgcatgtctgctgcagggcttaagatcactggaagcaaagaaacaaagaggagattgctcctgatcagtatagactggtccagagatctcatgaatttatgtatctactttagggtgtactgccaagagaagcaagaggagaggagggaactgcctcggatcattacaggtccacctccagaggcagctgtagtggcctttgagtggctgaagaccagcaccctcacaggcctacacccacaactaccactctctttaccccagcccgagtgcgctctaccataccttgttcgtgcttttagcaggggtgattacatgggccgcattcaggaagtgggctgggtgactgcaggactggtgatctgggctggcacctgctactacatttacaaatttaccaagggaagagcccagagtgtgaggactcttgccagaaatggatccacagttaagatggagactgtggttggggtacagagccagaccttggccataaatgaagcagagattaagactaaaccccaagtcgagattggagcagaaactggagcaagaagtgggcctagggctgaagtagagaccaaggccactgctatagccatacacagagccaactctcaggccaaggcaatggttggggcagagccagagactcaatctgagtccaaagtggtggctggaacactggtcatgacagaggcagtgactctgactgaggtcaaggccaaagccagggaagtggccatgaaagaagcagtgacccaaactgatgctgaggctggcaaaatagttaagaaagaagcagtgacacagaccaaggctaaagcttgggcgctggttgccaagacagaggccaagagagaagcaatgacccagaccaaagctgaaactcatatattggctgaaaaagagacagagattaacagagtaatggttacacagagtgagaccttggcagtacccagggaagtggccaagatgggggccacgaacaagactggaattgtggatgaaaccaagacaagagctctggaagagactgtgttgatcccaagagcattccctagtaaaaacgcttcatgctgaactctatctctgggcctgcttcctgggaagccaacctgcaacagttggtacaagaagtggttcgagaaagcaaacactgtgatgaaattttggagatgaatcacctgctacccagctgtcaatgaagactccatcattggtggtaggtggagtagataggcctctggaataaggtagcagaggaattgttaaaattttcaatggtggttaactgggttggcatactggtaaaatgggacacattaactggtgccatgtatcagacctttgagaaatatgggatatattaaatataaggaaggccagaaaattgggcggctgttgctaagcagattgagctctggaaaagaataacaaaaagctgaattaaattaatcaacaattgaaagctatgtttgaaagtcagatggctttattcataacatataaagaggctctcatcttttccaggtagaaggtggagaaatctgaggagtagactcaggatttgttaaaagcaagcttcaaagaaagttaaaattctaaccaagacaagtcttctatgccgagttatgtgccatggttaagaaggaatgggactctgacacttggaatgggggacatctggattgatgtccctaaaaatcttatatccccagattcccctgagccccttgagaagtgtcctactcctccctattaagggctggcactccatcttgcttcaatatatggaatcctttcccctgtaagataacctgggttttcctcagaatctgcccgcacctcctatcctggccactgggcctataactagggttaagccacgcataatctagctggtgatgtgctgggtgtaataaggaaagaaagagaatacaccaacaaagagtttcgggacataacctagccagcatatactagaaggtgctgagggagtaagtatggcatcaaattctaaggagcttgatcaggagggctggaatataaactggaatatgggagaattaatcaatttgaaagtgctttcccagaatacaggatttaataccctggagaaaaccacaggaaatgacacgaactcattactgcgatggctcctcgaagtatggaaaaagccatggcgtacataaagtgaggtgtaaatgccagagttgccatagaagatggcgggaaaagggatcaaagactcagagagacataaaggagaagatttgggagagggagaggattaatcctgatttgaactcttcgaatttgaagtgcttatgtactatgatttgaatatggtttatccccatccaaagtcatgttgaggatgggttcccaatgtgacagtgttgggaggtggtacccttaagaggcatttgtgtcatggggaatctctcctgatgagggtatgaatgcagtctctttggagtgggagagttcttgtgctcatgggactggattagttactgtgaggaggttggttgttataaagtgagtctgcctcttgtgcttggtgtcttttgcgtgtacctgtttccccttttgtttctttgccatgttttgatgccctcaaaagaagttgtcggatgtgactgcccagtcttgaacttcccagccctcaaaactaacagaacatatcttccagtagcttcctgagaaagtgtatatgcaaagcacacttctgagatctttcagatggttttgccacattgcccaggatggccttgaactcctgggctcaagtgatccacttgccttggccccccaaagtgctgggattacaggttgctatgaaaagaaaaatcatgatattaaatttgttgaaagatataaatttataaattcaagaagtttcatgaattccaaatggaataatctcaaagaaaaccacctctaggcacatcttattgaactgctgaaaatgaaaagtaaagaaaaaattttagactgatcattccaagatggccaaataggaacagctccggtctacagcttccagtgtgatcgttgcagaagacgggtgatttctgcatttccaactgagattttagcatcgatattatggaagctatgcctggactcaacaacacgaacttctactcaccaaggctgatcttgtactaatactaagtgcccaacctgacaacagagaagatgatgagcctttataagacaccattccttaggggcatcagccagtcccatggtgttaggattattacatgggacacctttcatcatcatgaaaacagaaacttttcctcatggaaatgaatatgtattttagacacacatttaccttctttgctgacaatgattctgtcatcaccatctccatggacttccagaatgccttaatcatcatcagagtatcctacacaaagttgtctctgaccaaggaactcatttaatggtaagtgaagtgcacatccaaagattcactagtctttactacttactttaccatgcagaagcagcttgccttacacaaaaataaataacttactggaagcttagttatgggatcagctgttcctgggagtactgtacgacaagattgcaatagatgctttaacagagccacccatatatggtgctttttttccccatagtgaggttacacaggactaggaataaagaagtcatgaaagcagtggcccttttcactattgcaccagttaacctactgaagaagtatgtgattctttttttctgtctccacaaccttgggctcttaggtatatcagggatgaatgctttcaccagggaataaagccatggttccattatattaaaagctgagactacattctggccatttttgtcctctcgtgccactgaactgacaggcagggaaaggggctgctatagtggctagagggattgagcccaattactaaggggaaataaggttgctgatatacaaacagggagagcaatgctcagagcccagggatactcactggggcacctcctagtactgctttgcctaatagtcctgggaagtgggaaagtgcagaaattcaataaatacaggattgaagattagggtcactacatcagggaaataattttgaccaggtttctgtaaggggaatatgaaatgggtggtagaagaatgaagttgattattgactttggcctcatgatcagcttcagtgggaaactgtaacagctatgcacatctttgttaatttatttttctcttcctttcctctgattatatgaaaaatacttgagataattgttataaatcaggtttcaggtgggcgaatatgattgaattagcattatcccgtgacagtacggtggctgatgggattttttttgtccctgcctccctgttgggagaatagaataacaagaatagatgctgaatgtgaaaggagtgggccatggtggttagtctttattttcccacacatcctgattcatttcctgtccttctctgtcttgttctatgccctgggcggctgatccttagggactgcatcccccagactccatttgtaattgacttctgcttgggtttggtcaatggaatgccctggcacagctttggagggaagaagagagaagacaatgtatttcttcactgctcccactctgatttgggctatgttttattggcagggactgcatcccttcaagattttagcttcttccagaagtcccctcctccatgactctagctctcactaggctccagaaatactatttcttcctcttgccctcttaggcctagggtaacagctacctgctattgctaacctctgggtgccacaaaattgcttgttgggtctcataatcttgcatatacctctgtaagtagtccctacattaaagtcccttgaaccatc

SEQ ID NO: 108860 - DNA, 3872 bp, Homo sapiens
  Payload ID: 1383
  Gene Symbol: ARMCX4
  Gene Name: armadillo repeat containing, X-linked 4
  Uniprot ID: Q5H9R4
  ENST ID: ENST00000452188
  CDS Start-End: 265-1347
acgcagccttcgttgcagtcgtcactcgcatctggctaccagctccccgctgccctgcgctcggcgggctggcatcgggcccggggaaagcggagcagtagttcggtgtagcactgtttgcggcgaggagaaaggaaggagaggagaaaactgcactggatcaaggaggttagtgtcttcccataggcctgcagtagggctgtttaccattggaagcaagggaaagaggaggagatcaatctagaagcatggagatctgcctgcatgtctgctgcagggcttaagatcactggaagcaaagaaacaaagaggagattgctcctgatcagtatagactggtccagagatctcatgaatttatgtatctactttagggtgtactgccaagagaagcaagaggagaggagggaactgcctcggatcattacaggtccacctccagaggcagctgtagtggcctttgagtggctgaagaccagcaccctcacaggcctacacccacaactaccactctctttaccccagcccgagtgcgctctaccataccttgttcgtgcttttagcaggggtgattacatgggccgcattcaggaagtgggctgggtgactgcaggactggtgatctgggctggcacctgctactacatttacaaatttaccaagggaagagcccagagtgtgaggactcttgccagaaatggatccacagttaagatggagactgtggttggggtacagagccagaccttggccataaatgaagcagagattaagactaaaccccaagtcgagattggagcagaaactggagcaagaagtgggcctagggctgaagtagagaccaaggccactgctatagccatacacagagccaactctcaggccaaggcaatggttggggcagagccagagactcaatctgagtccaaagtggtggctggaacactggtcatgacagaggcagtgactctgactgaggtcaaggccaaagccagggaagtggccatgaaagaagcagtgacccaaactgatgctgaggctggcaaaatagttaagaaagaagcagtgacacagaccaaggctaaagcttgggcgctggttgccaagacagaggccaagagagaagcaatgacccagaccaaagctgaaactcatatattggctgaaaaagagacagagattaacagagtaatggttacacagagtgagaccttggcagtacccagggaagtggccaagatgggggccacgaacaagactggaattgtggatgaaaccaagacaagagctctggaagagactgtgttgatcccaagagcattccctagtaaaaacgcttcatgctgaactctatctctgggcctgcttcctgggaagccaacctgcaacagttggtacaagaagtggttcgagaaagcaaacactgtgatgaaattttggagatgaatcacctgctacccagctgtcaatgaagactccatcattggtggtaggtggagtagataggcctctggaataaggtagcagaggaattgttaaaattttcaatggtggttaactgggttggcatactggtaaaatgggacacattaactggtgccatgtatcagacctttgagaaatatgggatatattaaatataaggaaggccagaaaattgggcggctgttgctaagcagattgagctctggaaaagaataacaaaaagctgaattaaattaatcaacaattgaaagctatgtttgaaagtcagatggctttattcataacatataaagaggctctcatcttttccaggtagaaggtggagaaatctgaggagtagactcaggatttgttaaaagcaagcttcaaagaaagttaaaattctaaccaagacaagtcttctatgccgagttatgtgccatggttaagaaggaatgggactctgacacttggaatgggggacatctggattgatgtccctaaaaatcttatatccccagattcccctgagccccttgagaagtgtcctactcctccctattaagggctggcactccatcttgcttcaatatatggaatcctttcccctgtaagataacctgggttttcctcagaatctgcccgcacctcctatcctggccactgggcctataactagggttaagccacgcataatctagctggtgatgtgctgggtgtaataaggaaagaaagagaatacaccaacaaagagtttcgggacataacctagccagcatatactagaaggtgctgagggagtaagtatggcatcaaattctaaggagcttgatcaggagggctggaatataaactggaatatgggagaattaatcaatttgaaagtgctttcccagaatacaggatttaataccctggagaaaaccacaggaaatgacacgaactcattactgcgatggctcctcgaagtatggaaaaagccatggcgtacataaagtgaggtgtaaatgccagagttgccatagaagatggcgggaaaagggatcaaagactcagagagacataaaggagaagatttgggagagggagaggattaatcctgatttgaactcttcgaatttgaagtgcttatgtactatgatttgaatatggtttatccccatccaaagtcatgttgaggatgggttcccaatgtgacagtgttgggaggtggtacccttaagaggcatttgtgtcatggggaatctctcctgatgagggtatgaatgcagtctctttggagtgggagagttcttgtgctcatgggactggattagttactgtgaggaggttggttgttataaagtgagtctgcctcttgtgcttggtgtcttttgcgtgtacctgtttccccttttgtttctttgccatgttttgatgccctcaaaagaagttgtcggatgtgactgcccagtcttgaacttcccagccctcaaaactaacatatcttccagtagcttcctgagaaagtgtatatgcaaagcacacttctgagatctttcagatggttttgccacattgcccaggatggccttgaactcctgggctcaagtgatccacttgccttggccccccaaagtgctgggattacaggttgctatgaaaagaaaaatcatgatattaaattttagcatcgatattatggaagctatgcctggactcaacaacacgaacttctactcaccaaggctgatcttgtactaatactaagtgcccaacctgacaacagagaagatgatgagcctttataagacaccattccttaggggcatcagccagtcccatggtgttaggattattacatgggacacctttcatcatcatgaaaacagaaacttttcctcatggaaatgaatatgtattttagacacacatttaccttctttgctgacaatgattctgtcatcaccatctccatggacttccagaatgccttaatcatcatcagagtatcctacacaaagttgtctctgaccaaggaactcatttaatgggactgcatcccccagactccatttgtaattgacttctgcttgggtttggtcaatggaatgccctggcacagctttggagggaagaagagagaagacaatgtatttcttcactgctcccactctgatttgggctatgttttattggcagggactgcatcccttcaagattttagcttcttccagaagtcccctcctccatgactctagctctcactaggctccagaaatactatttcttcctcttgccctcttaggcctagggtaacagctacctgctattgctaacctctgggtgccacaaaattgcttgttgggtctcataatcttgcatatacctctgtaagtagtccctacattaaagtcccttgaaccatc

SEQ ID NO: 108861 - DNA, 3170 bp, Homo sapiens
  Payload ID: 1383
  Gene Symbol: ARMCX4
  Gene Name: armadillo repeat containing, X-linked 4
  ENST ID: ENST00000442270
  CDS Start-End: 242-397
actcgcatctggctaccagctccccgctgccctgcgctcggcgggctggcatcgggcccggggaaagcggagcagtagttcggtgtagcactgtttgcggcgaggagaaaggaaggagaggagaaaactgcactggatcaaggaggttagtgtcttcccataggcctgcagtagggctgtttaccattggaagcaagggaaagaggaggagatcaatctagaagcatggagatctgcctgcatgtctgctgcagggcttaagatcactggaagcaaagaaacaaagaggagattgctcctgatcagtatagactgggtgtactgccaagagaagcaagaggagaggagggaactgcctcggatcattacaggtgttgatcccaagagcattccctagtaaaaacgcttcatgctgaactctatctctgggcctgcttcctgggaagccaacctgcaacagttggtacaagaagtggttcgagaaagcaaacactgtgatgaaattttggagatgaatcacctgctacccagctgtcaatgaagactccatcattggtggtaggtggagtagataggcctctggaataaggtagcagaggaattgttaaaattttcaatggtggttaactgggttggcatactggtaaaatgggacacattaactggtgccatgtatcagacctttgagaaatatgggatatattaaatataaggaaggccagaaaattgggcggctgttgctaagcagattgagctctggaaaagaataacaaaaagctgaattaaattaatcaacaattgaaagctatgtttgaaagtcagatggctttattcataacatataaagaggctctcatcttttccaggtagaaggtggagaaatctgaggagtagactcaggatttgttaaaagcaagcttcaaagaaagttaaaattctaaccaagacaagtcttctatgccgagttatgtgccatggttaagaaggaatgggactctgacacttggaatgggggacatctggattgatgtccctaaaaatcttatatccccagattcccctgagccccttgagaagtgtcctactcctccctattaagggctggcactccatcttgcttcaatatatggaatcctttcccctgtaagataacctgggttttcctcagaatctgcccgcacctcctatcctggccactgggcctataactagggttaagccacgcataatctagctggtgatgtgctgggtgtaataaggaaagaaagagaatacaccaacaaagagtttcgggacataacctagccagcatatactagaaggtgctgagggagtaagtatggcatcaaattctaaggagcttgatcaggagggctggaatataaactggaatatgggagaattaatcaatttgaaagtgctttcccagaatacaggatttaataccctggagaaaaccacaggaaatgacacgaactcattactgcgatggctcctcgaagtatggaaaaagccatggcgtacataaagtgaggtgtaaatgccagagttgccatagaagatggcgggaaaagggatcaaagactcagagagacataaaggagaagatttgggagagggagaggattaatcctgatttgaactcttcgaatttgaagtgcttatgtactatgatttgaatatggtttatccccatccaaagtcatgttgaggatgggttcccaatgtgacagtgttgggaggtggtacccttaagaggcatttgtgtcatggggaatctctcctgatgagggtatgaatgcagtctctttggagtgggagagttcttgtgctcatgggactggattagttactgtgaggaggttggttgttataaagtgagtctgcctcttgtgcttggtgtcttttgcgtgtacctgtttccccttttgtttctttgccatgttttgatgccctcaaaagaagttgtcggatgtgactgcccagtcttgaacttcccagccctcaaaactaacatatcttccagtagcttcctgagaaagtgtatatgcaaagcacacttctgagatctttcagatggttttgccacattgcccaggatggccttgaactcctgggctcaagtgatccacttgccttggccccccaaagtgctgggattacaggttgctatgaaaagaaaaatcatgatattaaatttgttgaaagatataaatttataaattcaagaagtttcatgaattccaaatggaataatctcaaagaaaaccacctctaggcacatcttattgaactgctgaaaatgaaaagtaaagaaaaaattttagactgatcattccaagatggccaaataggaacagctccggtctacagcttccagtgtgatcgttgcagaagacgggtgatttctgcatttccaactgagattttagcatcgatattatggaagctatgcctggactcaacaacacgaacttctactcaccaaggctgatcttgtactaatactaagtgcccaacctgacaacagagaagatgatgagcctttataagacaccattccttaggggcatcagccagtcccatggtgttaggattattacatgggacacctttcatcatcatgaaaacagaaacttttcctcatggaaatgaatatgtattttagacacacatttaccttctttgctgacaatgattctgtcatcaccatctccatggacttccagaatgccttaatcatcatcagagtatcctacacaaagttgtctctgaccaaggaactcatttaatgggactgcatcccccagactccatttgtaattgacttctgcttgggtttggtcaatggaatgccctggcacagctttggagggaagaagagagaagacaatgtatttcttcactgctcccactctgatttgggctatgttttattggcagggactgcatcccttcaagattttagcttcttccagaagtcccctcctccatgactctagctctcactaggctccagaaatactatttcttcctcttgccctcttaggcctagggtaacagctacctgctattgctaacctctgggtgccacaaaattgcttgttgggtctcataatcttgcatatacctctgtaagtagtccctacattaaagtcccttgaaccatc

SEQ ID NO: 108862 - DNA, 2899 bp, Homo sapiens
  Payload ID: 1384
  Gene Symbol: ARMCX5
  Gene Name: armadillo repeat containing, X-linked 5
  Uniprot ID: Q6P1M9
  ENST ID: ENST00000246174
  CDS Start-End: 882-2558
gaacttcgaaagactggaacacttccgcctgtcaggccagaagagatttcctgacaccacagctggaaacccatgtgcatttcagttcaggaaagaatgcgccgttttccctatatccggaattcgtccctgcgcattccaatacctgaagcggccacagggtacaggacagggagccctccgacagaaaagagtcgcggcgctaaacaaagcctgatatcactccgcttccataagccggatccccataaactacgctctagctcctcccactgccgttgtgggtaacgcggacgtggaagaacctcgtctgcggaggaaaaggtgccgagtcaatccccatacacagccgccgccattgcctcgagtccttgtgtctgactgtctgttcctgctgctgtatgacacagcacctcgaggcaaggaaataagaaaactgcctctgatccaagcagagaaggtagatctgtccccaggtctgtggaactgtcagttgtgaagttttgtaaaatggtcacccaacttaaaactaggaaattacgaagaagagaaaattgccctgtatctgttaaggtctgcctgtagatctgctgtagggcttgtcaccattggaagcaaggtcctacttcagtggcagatctggtggccttggagtggctgaagaccaccaccctccacagggctgggcccatgcacagccatccttccctaccttgagtgagcttcctctgcatgttttctatatcactggcagagcctgtagttggaaaggggacagagtgactactggactttgtgtgaaaacaccaaccgggacaaaacttcagtcaaggctgagacgggtgggggtatataacttgtccttacgttaaacttggaacatggttgactctgggacagaagcaagggctagaggaaaggctgaggctggcctgcaagatggaatcagtggtcctgccactgctagagtgaatggtaaaacccaggccgaggcagtggctgaggcagaactgaaaacagaatcagtgacccaggccaaagctggtgatggagcaatgaccaggacacatacagtgacctacagggaggctatggctgtgacaagggaagtgatcaaggtggaagatacaactaagactagagtcatggttgagactaagacaaaacccctggcagaacgcagtatagtgccacaaaccaagtcaaaggccatgcctatgtctagggtcagtactgtaaccaagtctgaagtcaaggttgttgctgtcattgaggcaaatattaggtcctatgccaagtcacatgataaggccaatactgggtccagacctgacagaagggaagagaccagcattgggatgaaatccagtgatgaggatgaagaaaatatatgctcctggttctggactggagaagagcctagtgtagggtcctggttctggcctgaagaagagacctctcttcaagtttataagcccctacctaagatccaggaaaagcccaagcccacacacaaacccacacttactataaaacaaaaggtaatagcatggtcaagggccaggtatattgtcctagttccagttgaaggaggggagcaatccttgcctccagaaggaaactggaccctggttgagaccttgattgaaactcctctggggattcgacctttgaccaagatcccaccttatcatgggccttattaccagaccttagctgagatcaaaaaacagattaggcaaagggaaaagtatgggcctaatccgaaggcctgccactgcaaatcacgtggctttagtttagagcctaaagagtttgataaacttgttgccctccttaagttaactaaggatcctttcattcatgaaatagctacaatgataatgggcatcagtcctgcttatccatttactcaagatataattcatgatgtaggtattactgttatgattgaaaacttggtcaataatcccaatgttaaagaacaccctggagctttaagtatggtggatgacagctctgagtcttccgaagaaccaaaatcaggggagtcatatatacatcaagtttgtaaaggcataatctcttgccccttgaactcccctgtgcagctggctggactgaaattactagggcacttgagtataaaatttgaagatcactatgtgattaccagttatattccagatttcctcaccttgttaaacaagggaagtgtcaaaaccaagttttatgttttaaaagtgttttcgtgtttgtctaaaaatcacgccaatacaagagaattgatcagtgccaaagtactgtcatcattggttgcaccctttaacaagaatgagtcaaaggccaatattcttaatattattgaaatatttgagaatataaattttcagttcaaaacaaaggcaaagctatttaccaaggaaaagttcactaaatctgagcttatttcaatattccaggaagcaaaacagtttggtcagaaactccaagacttagcagagcacagtgatcccgaagtgagagataaagtcatacgattaatactaaaactctgaatacccctctgttctcataaagcctcaaacagttttttggagttgcaatatgaaaccaatgcatattgtaattataaattcaatacttatgttttccatgttgattgagggaggcaattttatggataccaattaatcttgagatcctgaacatgtgctgatttttattgtgctatatagtatataaattgagatatttttggtatttctgcaacgtgacctgataatgaatctattcatcctgagtaagctatacttctgtgctttatattgatatgtgtattcttttgagattttatttacatgttgttaataaagttgcatgctaaaactggtgaaaa

SEQ ID NO: 108863 - DNA, 2647 bp, Homo sapiens
  Payload ID: 1384
  Gene Symbol: ARMCX5
  Gene Name: armadillo repeat containing, X-linked 5
  Uniprot ID: Q6P1M9
  ENST ID: ENST00000372742
  CDS Start-End: 636-2312
gctgctgatttagttgggagtcttggtaagttgtgggggtacagaatgctaagctgcctttcccactctccactgcttgtcctgctctcacgcttgaacctagtctaatctgaacgagggacattctagggcaatcactgaagaggaagatggtgggcaataggaaggaggaggaggagtagccctgaaacaaagcagtgggggagaggggataggaggagggaaacactagacaaaatctggaaaggcaagaataagggcaagggaccaaggtctgtcaccaggagatcagtttccacattctcctgtttgtttatttgtccataggtctgcctgtagatctgctgtagggcttgtcaccattggaagcaaggtcctacttcagtggcagatctggtggccttggagtggctgaagaccaccaccctccacagggctgggcccatgcacagccatccttccctaccttgagtgagcttcctctgcatgttttctatatcactggcagagcctgtagttggaaaggggacagagtgactactggactttgtgtgaaaacaccaaccgggacaaaacttcagtcaaggctgagacgggtgggggtatataacttgtccttacgttaaacttggaacatggttgactctgggacagaagcaagggctagaggaaaggctgaggctggcctgcaagatggaatcagtggtcctgccactgctagagtgaatggtaaaacccaggccgaggcagtggctgaggcagaactgaaaacagaatcagtgacccaggccaaagctggtgatggagcaatgaccaggacacatacagtgacctacagggaggctatggctgtgacaagggaagtgatcaaggtggaagatacaactaagactagagtcatggttgagactaagacaaaacccctggcagaacgcagtatagtgccacaaaccaagtcaaaggccatgcctatgtctagggtcagtactgtaaccaagtctgaagtcaaggttgttgctgtcattgaggcaaatattaggtcctatgccaagtcacatgataaggccaatactgggtccagacctgacagaagggaagagaccagcattgggatgaaatccagtgatgaggatgaagaaaatatatgctcctggttctggactggagaagagcctagtgtagggtcctggttctggcctgaagaagagacctctcttcaagtttataagcccctacctaagatccaggaaaagcccaagcccacacacaaacccacacttactataaaacaaaaggtaatagcatggtcaagggccaggtatattgtcctagttccagttgaaggaggggagcaatccttgcctccagaaggaaactggaccctggttgagaccttgattgaaactcctctggggattcgacctttgaccaagatcccaccttatcatgggccttattaccagaccttagctgagatcaaaaaacagattaggcaaagggaaaagtatgggcctaatccgaaggcctgccactgcaaatcacgtggctttagtttagagcctaaagagtttgataaacttgttgccctccttaagttaactaaggatcctttcattcatgaaatagctacaatgataatgggcatcagtcctgcttatccatttactcaagatataattcatgatgtaggtattactgttatgattgaaaacttggtcaataatcccaatgttaaagaacaccctggagctttaagtatggtggatgacagctctgagtcttccgaagaaccaaaatcaggggagtcatatatacatcaagtttgtaaaggcataatctcttgccccttgaactcccctgtgcagctggctggactgaaattactagggcacttgagtataaaatttgaagatcactatgtgattaccagttatattccagatttcctcaccttgttaaacaagggaagtgtcaaaaccaagttttatgttttaaaagtgttttcgtgtttgtctaaaaatcacgccaatacaagagaattgatcagtgccaaagtactgtcatcattggttgcaccctttaacaagaatgagtcaaaggccaatattcttaatattattgaaatatttgagaatataaattttcagttcaaaacaaaggcaaagctatttaccaaggaaaagttcactaaatctgagcttatttcaatattccaggaagcaaaacagtttggtcagaaactccaagacttagcagagcacagtgatcccgaagtgagagataaagtcatacgattaatactaaaactctgaatacccctctgttctcataaagcctcaaacagttttttggagttgcaatatgaaaccaatgcatattgtaattataaattcaatacttatgttttccatgttgattgagggaggcaattttatggataccaattaatcttgagatcctgaacatgtgctgatttttattgtgctatatagtatataaattgagatatttttggtatttctgcaacgtgacctgataatgaatctattcatcctgagtaagctatacttctgtgctttatattgatatgtgtattcttttgagattttatttacatgttgttaataaagttgcatgctaaaactgg

SEQ ID NO: 108864 - DNA, 782 bp, Homo sapiens
  Payload ID: 1384
  Gene Symbol: ARMCX5
  Gene Name: armadillo repeat containing, X-linked 5
  ENST ID: ENST00000473968
  CDS Start-End: 760-782
agctcctcccactgccgttgtgggtaacgcggacgtggaagaacctcgtctgcggaggaaaaggtagatgttaaatggtaactacgcgcgaggttctgaggagccctgggaacaggaaggagaaaagaataccaaaagtgacaacagtttgccaatcgcagtctttaatctgataaagcggttatctcgtcttgagtcccaggtgccgagtcaatccccatacacagccgccgccattgcctcgagtccttgtgtctgactgtctgttcctgctgctgtatgacacagcacctcgaggcaaggaaataagaaaactgcctctgatccaagcagagaaggtagatctgtccccaggtctgtggaactgtcagttgtgaagttttgtaaaatggtcacccaacttaaaactaggaaattacgaagaagagaaaattgccctgtatctgttaaggtctgcctgtagatctgctgtagggcttgtcaccattggaagcaaggtcctacttcagtggcagatctggtggccttggagtggctgaagaccaccaccctccacagggctgggcccatgcacagccatccttccctaccttgagtgagcttcctctgcatgttttctatatcactggcagagcctgtagttggaaaggggacagagtgactactggactttgtgtgaaaacaccaaccgggacaaaacttcagtcaaggctgagacgggtgggggtatataacttgtccttacgttaaacttggaacatggttgactctgggacagaagc

SEQ ID NO: 108865 - DNA, 822 bp, Homo sapiens
  Payload ID: 1384
  Gene Symbol: ARMCX5
  Gene Name: armadillo repeat containing, X-linked 5
  ENST ID: ENST00000479502
  CDS Start-End: 619-822
gcggacgtggaagaacctcgtctgcggaggaaaaggtagatgttaaatggtaactacgcgcgaggttctgaggagccctgggaacaggaaggagaaaagaataccaaaagtgacaacagtttgccaatcgcagtctttaatctgataaagcggttatctcgtcttgagtcccaggtgccgagtcaatccccatacacagccgccgccattgcctcgagtccttgtgtctgactgtctgttcctgctgctgtatgacacagcacctcgaggcaaggaaataagaaaactgcctctgatccaagcagagaaggtctgcctgtagatctgctgtagggcttgtcaccattggaagcaaggtcctacttcagtggcagatctggtggccttggagtggctgaagaccaccaccctccacagggctgggcccatgcacagccatccttccctaccttgagtgagcttcctctgcatgttttctatatcactggcagagcctgtagttggaaaggggacagagtgactactggactttgtgtgaaaacaccaaccgggacaaaacttcagtcaaggctgagacgggtgggggtatataacttgtccttacgttaaacttggaacatggttgactctgggacagaagcaagggctagaggaaaggctgaggctggcctgcaagatggaatcagtggtcctgccactgctagagtgaatggtaaaacccaggccgaggcagtggctgaggcagaactgaaaacagaatcagtgacccaggccaaagctggtgatggagcaatgaccaggacacatacagtgacctacagg

SEQ ID NO: 108866 - DNA, 859 bp, Homo sapiens
  Payload ID: 1384
  Gene Symbol: ARMCX5
  Gene Name: armadillo repeat containing, X-linked 5
  ENST ID: ENST00000477663
  CDS Start-End: 647-859
tgccgttgtgggtaacgcggacgtggaagaacctcgtctgcggaggaaaaggtagatgttaaatggtaactacgcgcgaggttctgaggagccctgggaacaggaaggagaaaagaataccaaaagtgacaacagtttgccaatcgcagtctttaatctgataaagcggttatctcgtcttgagtcccaggtgccgagtcaatccccatacacagccgccgccattgcctcgagtccttgtgtctgactgtctgttcctgctgctgtatgacacagcacctcgaggcaaggaaataagaaaactgcctctgatccaagcagagaaggtcagtgagaaggtctgcctgtagatctgctgtagggcttgtcaccattggaagcaaggtcctacttcagtggcagatctggtggccttggagtggctgaagaccaccaccctccacagggctgggcccatgcacagccatccttccctaccttgagtgagcttcctctgcatgttttctatatcactggcagagcctgtagttggaaaggggacagagtgactactggactttgtgtgaaaacaccaaccgggacaaaacttcagtcaaggctgagacgggtgggggtatataacttgtccttacgttaaacttggaacatggttgactctgggacagaagcaagggctagaggaaaggctgaggctggcctgcaagatggaatcagtggtcctgccactgctagagtgaatggtaaaacccaggccgaggcagtggctgaggcagaactgaaaacagaatcagtgacccaggccaaagctggtgatggagcaatgaccaggacacatacagtgacctacagggaggctatg

SEQ ID NO: 108867 - DNA, 4640 bp, Homo sapiens
  Payload ID: 1384
  Gene Symbol: ARMCX5
  Gene Name: armadillo repeat containing, X-linked 5
  Uniprot ID: Q6P1M9
  ENST ID: ENST00000604957
  CDS Start-End: 2623-4299
actgccgttgtgggtaacgcggacgtggaagaacctcgtctgcggaggaaaaggtagatgttaaatggtaactacgcgcgaggttctgaggagccctgggaacaggaaggagaaaagaataccaaaagtgacaacagtttgccaatcgcagtctttaatctgataaagcggttatctcgtcttgagtcccaggtgccgagtcaatccccatacacagccgccgccattgcctcgagtccttgtgtctgactgtctgttcctgctgctgtatgacacagcacctcgaggcaaggaaataagaaaactgcctctgatccaagcagagaaggtcagtgagaaggtgcgcatcgcttgggggtggatgtgggtatcagaggtgaacactggatacgcgacctggtcatgggaggcgggcggtgagaaggagagagagatgggtaattggaatggcacacaacaattaaaaaaaaatgatctaccttttgctagcttgatttccatacactcggttcacctcagaccatgcttgggaagaaaaaggttgcagcttctagcagggaaaaggcagactagatgaggaagagagggctacttccacaggcgaggacagttgtctggggagccctgagagggagagaatgtaaaaagaggttgtaaatgtttgataatcaaggctctggatttgaaaagggtctcatgtcttggttactggtctgaccattaataaccacgtctctctctctgtcttttcatttgttctttgggtgtgtatcacgcgtttttatgtgtaaatctgttcctaagtttgcagcactccatgtttctgtaaagatctgtaggggacagcagacctcaaggggagaggagaaggaaaagaaaattggcctggtttgtacagagtgggcagtacttgggaggcagtacttggaggtggtagatggctaagattagagtaggcaggagtgtaagggagcctccagaactctctgccagctttcctaacatgtcctcccttacccgcattatgttgcagaaaatgataggctttgggagagaggaaggaaacataggaacccagatgaaatatggaaataaatacttttcattttttccccagcctccgtggtttgtctaggcatttcgtccctactaacaccactactactaccttgtagggatgtttgagttgtctctgtataggaattgtcagactttgagaatagagcagaggggcttggagatttaggagtgggagaaaaaggggagatagaaaatgtttgccaaacaggtacttatatccagaaagaaactgtgccctaggtgctggtctctaccaaaaacagcctcaactgtctcctgtgtcttcatttattggtctctgtttttgtgaatccctgtaggtagatctgtccccaggtctgtggaactgtcagttgtgaagttttgtaaaatggtcacccaacttaaaactaggaaattacgaagaagagaaaattgccctgtatctgttaaggttggtgtaaaggtacagggacaggggggcaacttcgactagagaattccatctcttctgttttgtcattttaccaattattcccatctgccccaccccctgctgctgctgatttagttgggagtcttggtaagttgtgggggtacagaatgctaagctgcctttcccactctccactgcttgtcctgctctcacgcttgaacctagtctaatctgaacgagggacattctagggcaatcactgaagaggaagatggtgggcaataggaaggaggaggaggagtagccctgaaacaaagcagtgggggagaggggataggaggagggaaacactagacaaaatctggaaaggcaagaataagggcaagggaccaaggtctgtcaccaggagatcagtttccacattctcctgtttgtttatttgtccataggtctgcctgtagatctgctgtagggcttgtcaccattggaagcaaggtaaggaggagaaagttactccagatcagtgcaggttggtatgagtgtggggattgcctgggtagacctgtaggatggagtagtggagagctgcttggctccagcaggggtcaagaaccactaaagggattcctcagcttctcatccagttttcctactccttatgctcctgtttggtgactggaaagaaggctgatggcacttggaagtgtagggagtgggtgaaatgaagggagagagagtttgctaattatctacctctctcacctagcactgaatcaccatattctcctgtctccctgtgctgatcagcatgaggagaaaaaagttggaagagactcaaagccccatttccttcctccacccctaggtcctacttcagtggcagatctggtggccttggagtggctgaagaccaccaccctccacagggctgggcccatgcacagccatccttccctaccttgagtgagcttcctctgcatgttttctatatcactggcagagcctgtagttggaaaggggacagagtgactactggactttgtgtgaaaacaccaaccgggacaaaacttcagtcaaggctgagacgggtgggggtatataacttgtccttacgttaaacttggaacatggttgactctgggacagaagcaagggctagaggaaaggctgaggctggcctgcaagatggaatcagtggtcctgccactgctagagtgaatggtaaaacccaggccgaggcagtggctgaggcagaactgaaaacagaatcagtgacccaggccaaagctggtgatggagcaatgaccaggacacatacagtgacctacagggaggctatggctgtgacaagggaagtgatcaaggtggaagatacaactaagactagagtcatggttgagactaagacaaaacccctggcagaacgcagtatagtgccacaaaccaagtcaaaggccatgcctatgtctagggtcagtactgtaaccaagtctgaagtcaaggttgttgctgtcattgaggcaaatattaggtcctatgccaagtcacatgataaggccaatactgggtccagacctgacagaagggaagagaccagcattgggatgaaatccagtgatgaggatgaagaaaatatatgctcctggttctggactggagaagagcctagtgtagggtcctggttctggcctgaagaagagacctctcttcaagtttataagcccctacctaagatccaggaaaagcccaagcccacacacaaacccacacttactataaaacaaaaggtaatagcatggtcaagggccaggtatattgtcctagttccagttgaaggaggggagcaatccttgcctccagaaggaaactggaccctggttgagaccttgattgaaactcctctggggattcgacctttgaccaagatcccaccttatcatgggccttattaccagaccttagctgagatcaaaaaacagattaggcaaagggaaaagtatgggcctaatccgaaggcctgccactgcaaatcacgtggctttagtttagagcctaaagagtttgataaacttgttgccctccttaagttaactaaggatcctttcattcatgaaatagctacaatgataatgggcatcagtcctgcttatccatttactcaagatataattcatgatgtaggtattactgttatgattgaaaacttggtcaataatcccaatgttaaagaacaccctggagctttaagtatggtggatgacagctctgagtcttccgaagaaccaaaatcaggggagtcatatatacatcaagtttgtaaaggcataatctcttgccccttgaactcccctgtgcagctggctggactgaaattactagggcacttgagtataaaatttgaagatcactatgtgattaccagttatattccagatttcctcaccttgttaaacaagggaagtgtcaaaaccaagttttatgttttaaaagtgttttcgtgtttgtctaaaaatcacgccaatacaagagaattgatcagtgccaaagtactgtcatcattggttgcaccctttaacaagaatgagtcaaaggccaatattcttaatattattgaaatatttgagaatataaattttcagttcaaaacaaaggcaaagctatttaccaaggaaaagttcactaaatctgagcttatttcaatattccaggaagcaaaacagtttggtcagaaactccaagacttagcagagcacagtgatcccgaagtgagagataaagtcatacgattaatactaaaactctgaatacccctctgttctcataaagcctcaaacagttttttggagttgcaatatgaaaccaatgcatattgtaattataaattcaatacttatgttttccatgttgattgagggaggcaattttatggataccaattaatcttgagatcctgaacatgtgctgatttttattgtgctatatagtatataaattgagatatttttggtatttctgcaacgtgacctgataatgaatctattcatcctgagtaagctatacttctgtgctttatattgatatgtgtattcttttgagattttatttacatgttgttaataaagttgcatgctaaaactggtgaaaa

SEQ ID NO: 108868 - DNA, 1846 bp, Homo sapiens
  Payload ID: 1385
  Gene Symbol: ARMCX6
  Gene Name: armadillo repeat containing, X-linked 6
  Uniprot ID: Q7L4S7
  ENST ID: ENST00000361910
  CDS Start-End: 346-1248
cacgtgaccaagagccgcctagagcacaagtcctgctagtcgcctccgtctgggtaccagccccctattactctgcaggcgtgtgaagaaagaaggaaactagctcggaccgtgcaggtttgtaggtctgttggcctgtaggtttcggcacaagtttcagcgagagaaggagaaaactgccttggttggaaccttgcagattcatcacaagagagctacaagagcctggaagaagctgaagactgctaccctccatccttactcaccctggacctgagagacctcttcaatcaggtggagcaaggccctctcctgtcctgccccaaggctggcacagacttgagcatgggccgggctcgggaagtgggttggatggcggcaggactgatgattggggctggtgcctgctactgcgtttacaaactgaccataggaagagatgacagtgagaagctggaggaggagggggaagaggagtgggacgatgaccaggagctggatgaggaggagcctgatatttggtttgattttgaaactatggctcggccctggactgaggatggggattggactgaacctggggccccaggtggcactgaggacaggccctcagggggaggcaaggccaaccgagcacacccaataaaacagcggccattcccctatgaacataaaaatacttggagtgctcaaaattgtaaaaatggcagttgtgttctggacctctccaagtgtcttttcattcagggaaaactgttgtttgccgagcccaaggatgcgggctttccatttagccaggatatcaatagccatttggccagcctctcaatggctagaaacacgagccccactccagaccccactgttagagaggctttgtgtgccccggataacttaaatgcgagtattgaaagtcagggccagattaagatgtacatcaatgaagtgtgtcgggagactgtgtcacgttgctgcaactcatttctgcagcaggccggattaaatttgttaataagcatgacagttattaataacatgcttgccaagtccgcttcagacttgaagtttcctttgatatcagagggaagtggatgtgctaaggttcaggttttgaaaccgctgatgggtttgtctgaaaagccagtcttggcgggggagttagtcggtgcccagatgctcttctcattcatgtccctctttatcagaaatggaaacagagagattctcctggaaacccctgccccataaacggccctctcgaacacaatgggacggaatccacccacaacgcgcttggtttgcagatgtcaaagaatctgcagagggtgctactgaagatccagccttagccaatcaccacctcattgggtgaaagttccagggctcaatccaggaccacactcttattggccaggcaggggctcccacagagctttgagtaacttcttggttgtgcagtctgcaggcaatgttggcattgtaaattcctcccttgcagcctccttcatgtggtgaggggatcacttcagctgcctgctgtggacaaagaacatcaaattacagcatcacgagtgctattgttgcctgtggtggtctccctgtccaagcgggaccgctttgcagagaccagaggcatatcgcggcttgagctgaaaatgcatttgttgcagcttaggttgaattatttttcgtttgctctttcttctacacgcgcctgatggatagtgaacctattcatcaaaaaagtgcactgctcttctgtctattgtaccgacttaacctcttccacccaagtccgcatctgtgtgtatcatcaataaagttgtgtgctttgattggcagaaaa

SEQ ID NO: 108869 - DNA, 1758 bp, Homo sapiens
  Payload ID: 1385
  Gene Symbol: ARMCX6
  Gene Name: armadillo repeat containing, X-linked 6
  Uniprot ID: Q7L4S7
  ENST ID: ENST00000538627
  CDS Start-End: 264-1166
cacgtgaccaagagccgcctagagcacaagtcctgctagtcgcctccgtctgggtaccagccccctattactctgcaggcgtgtgaagaaagaaggaaactagctcggaccgtgcagattcatcacaagagagctacaagagcctggaagaagctgaagactgctaccctccatccttactcaccctggacctgagagacctcttcaatcaggtggagcaaggccctctcctgtcctgccccaaggctggcacagacttgagcatgggccgggctcgggaagtgggttggatggcggcaggactgatgattggggctggtgcctgctactgcgtttacaaactgaccataggaagagatgacagtgagaagctggaggaggagggggaagaggagtgggacgatgaccaggagctggatgaggaggagcctgatatttggtttgattttgaaactatggctcggccctggactgaggatggggattggactgaacctggggccccaggtggcactgaggacaggccctcagggggaggcaaggccaaccgagcacacccaataaaacagcggccattcccctatgaacataaaaatacttggagtgctcaaaattgtaaaaatggcagttgtgttctggacctctccaagtgtcttttcattcagggaaaactgttgtttgccgagcccaaggatgcgggctttccatttagccaggatatcaatagccatttggccagcctctcaatggctagaaacacgagccccactccagaccccactgttagagaggctttgtgtgccccggataacttaaatgcgagtattgaaagtcagggccagattaagatgtacatcaatgaagtgtgtcgggagactgtgtcacgttgctgcaactcatttctgcagcaggccggattaaatttgttaataagcatgacagttattaataacatgcttgccaagtccgcttcagacttgaagtttcctttgatatcagagggaagtggatgtgctaaggttcaggttttgaaaccgctgatgggtttgtctgaaaagccagtcttggcgggggagttagtcggtgcccagatgctcttctcattcatgtccctctttatcagaaatggaaacagagagattctcctggaaacccctgccccataaacggccctctcgaacacaatgggacggaatccacccacaacgcgcttggtttgcagatgtcaaagaatctgcagagggtgctactgaagatccagccttagccaatcaccacctcattgggtgaaagttccagggctcaatccaggaccacactcttattggccaggcaggggctcccacagagctttgagtaacttcttggttgtgcagtctgcaggcaatgttggcattgtaaattcctcccttgcagcctccttcatgtggtgaggggatcacttcagctgcctgctgtggacaaagaacatcaaattacagcatcacgagtgctattgttgcctgtggtggtctccctgtccaagcgggaccgctttgcagagaccagaggcatatcgcggcttgagctgaaaatgcatttgttgcagcttaggttgaattatttttcgtttgctctttcttctacacgcgcctgatggatagtgaacctattcatcaaaaaagtgcactgctcttctgtctattgtaccgacttaacctcttccacccaagtccgcatctgtgtgtatcatcaataaagttgtgtgctttgattggc

SEQ ID NO: 108870 - DNA, 1928 bp, Homo sapiens
  Payload ID: 1385
  Gene Symbol: ARMCX6
  Gene Name: armadillo repeat containing, X-linked 6
  Uniprot ID: Q7L4S7
  ENST ID: ENST00000539247
  CDS Start-End: 434-1336
cacgtgaccaagagccgcctagagcacaagtcctgctagtcgcctccgtctgggtaccagccccctattactctgcaggcgtgtgaagaaagaaggaaactagctcggaccgtgcaggtttgtaggtctgttggcctgtaggtttcggcacaagtttcagcgagagaaggagaaaactgccttggttggaaccttgcagtgcagggaaaggggtgtggcggcctttgctggggaaatggcggacgacaagtggggcggaggaggcctgcgtccggaaagtcagtagaattcatcacaagagagctacaagagcctggaagaagctgaagactgctaccctccatccttactcaccctggacctgagagacctcttcaatcaggtggagcaaggccctctcctgtcctgccccaaggctggcacagacttgagcatgggccgggctcgggaagtgggttggatggcggcaggactgatgattggggctggtgcctgctactgcgtttacaaactgaccataggaagagatgacagtgagaagctggaggaggagggggaagaggagtgggacgatgaccaggagctggatgaggaggagcctgatatttggtttgattttgaaactatggctcggccctggactgaggatggggattggactgaacctggggccccaggtggcactgaggacaggccctcagggggaggcaaggccaaccgagcacacccaataaaacagcggccattcccctatgaacataaaaatacttggagtgctcaaaattgtaaaaatggcagttgtgttctggacctctccaagtgtcttttcattcagggaaaactgttgtttgccgagcccaaggatgcgggctttccatttagccaggatatcaatagccatttggccagcctctcaatggctagaaacacgagccccactccagaccccactgttagagaggctttgtgtgccccggataacttaaatgcgagtattgaaagtcagggccagattaagatgtacatcaatgaagtgtgtcgggagactgtgtcacgttgctgcaactcatttctgcagcaggccggattaaatttgttaataagcatgacagttattaataacatgcttgccaagtccgcttcagacttgaagtttcctttgatatcagagggaagtggatgtgctaaggttcaggttttgaaaccgctgatgggtttgtctgaaaagccagtcttggcgggggagttagtcggtgcccagatgctcttctcattcatgtccctctttatcagaaatggaaacagagagattctcctggaaacccctgccccataaacggccctctcgaacacaatgggacggaatccacccacaacgcgcttggtttgcagatgtcaaagaatctgcagagggtgctactgaagatccagccttagccaatcaccacctcattgggtgaaagttccagggctcaatccaggaccacactcttattggccaggcaggggctcccacagagctttgagtaacttcttggttgtgcagtctgcaggcaatgttggcattgtaaattcctcccttgcagcctccttcatgtggtgaggggatcacttcagctgcctgctgtggacaaagaacatcaaattacagcatcacgagtgctattgttgcctgtggtggtctccctgtccaagcgggaccgctttgcagagaccagaggcatatcgcggcttgagctgaaaatgcatttgttgcagcttaggttgaattatttttcgtttgctctttcttctacacgcgcctgatggatagtgaacctattcatcaaaaaagtgcactgctcttctgtctattgtaccgacttaacctcttccacccaagtccgcatctgtgtgtatcatcaataaagttgtgtgctttgattggc

SEQ ID NO: 108871 - DNA, 4041 bp, Homo sapiens
  Payload ID: 1386
  Gene Symbol: ARVCF
  Gene Name: armadillo repeat gene deleted in velocardiofacial syndrome
  Uniprot ID: O00192
  ENST ID: ENST00000263207
  CDS Start-End: 293-3181
gagggcgggagggctggcccggggtctcgggttgcgcgctgggcctggagggagggggcggcccccgcaccggtccgagttgcggccgcgtggactgcgacccgcgccgcgccgcaccgcgccgcgccctgggaacgccgctccccgcgcgccaacggacccggggaagcccttctggggtccgaggccgcgctgcggggccgcccacgctgcgctccaggagccagagcctgcagggtgggtgtcgggacatgctgatcttccctcaagacagctggcgggcgctctggtcatggaggactgcaatgtgcactcggccgccagcatcctggcctcggtgaaggagcaggaggcccgcttcgagaggctgacacgggcactggagcaggagcggcgccatgttgccctacagctggagcgtgcccagcagcctggcatggtcagtggtggcatgggcagtgggcagcccctgccaatggcctggcaacagctggtcctccaggagcagagcccaggcagccaggcctcactggccacgatgccggaggcacctgatgtgctggaggagaccgtgacggtggaggaggaccccggcacacccacttcccatgtgtctattgtcacatccgaagatggcacaacccggcgcaccgagaccaaggtcaccaagactgtcaagacggtgaccactcggacagtacgccaggtgcccgtgggcccagatggactccccctgctggatggcggccccccactaggcccttttgcagatggtgccctggaccggcatttcctgctgcgtggtggtggcccagtggccacactctctcgagcctacctcagcagtgggggtggctttcccgaaggccccgagccccgggacagccccagctatggcagcctgtcccgagggctgggcatgcggcccccacgtgctggcccccttggcccaggccctggtgatggctgcttcacactgcctggccaccgggaagccttcccggtgggtcctgagcctgggccaccaggtggccgctccctgcccgagcgcttccaggcagagccgtatggcttggaggatgacacgcgcagcctggccgctgatgacgagggtggccctgagctggagcctgactatggcacggccacaaggaggaggcctgagtgtgggcggggccttcataccagggcctacgaggacacagcagatgatggcggcgagctggcggacgagcggcctgcgttcccaatggtgacggcgcccctggcccagcctgaacggggcagcatgggcagcctggaccggctggtgcggcgctcgccctcagtggatagcgcccgcaaggagccgcgctggcgggaccctgagctgcctgaggtgctggccatgctgcggcaccccgtggaccccgtgaaggccaatgcggccgcctacctgcagcatctgtgctttgagaacgagggtgtcaagcggcgtgtacggcagttgcgggggctgccgctgcttgtggcactgctggaccacccgcgggctgaggtgcggcgccgggcctgtggggcactgcgcaacctctcctatggccgcgacactgacaacaaggccgccatccgggactgcggtggtgtgcctgccctggtgcgcctgctgagggctgcccgggacaacgaggtccgtgagcttgtcactggcaccctgtggaacctgtcatcctatgagcccctgaagatggtcatcattgaccatggcctgcagacgctgacccacgaggtgatcgtgccccactcaggatgggagcgtgagcccaacgaggactccaagccacgggacgccgagtggacaactgtcttcaagaacacgtcgggctgcctgaggaatgtgagctccgatggtgctgaggcccggcggcgactccgggagtgtgaagggctggtggacgcgctcctgcatgccctgcagtcggctgtgggccggaaggacactgacaacaagtcggtggagaactgcgtgtgcatcatgcggaacctgtcctaccacgtgcacaaggaggtgcccggggccgacaggtaccaggaggccgagcccgggcccctgggcagtgctgtaggctcccagcgccggaggcgggatgatgccagctgctttggaggcaagaaggccaaagaggagtggttccaccaaggaaagaaggatggtgagatggaccggaactttgacacgctagacctgcccaagcgaactgaggccgccaaaggctttgagctgctgtaccagcccgaggtggtacgtctctacctctccctcctcacggagagccggaacttcaacaccctggaggctgccgccggcgctctgcagaacctcagtgccggcaactggatgtgggccacgtacatccgcgccacagtgcgcaaagagcgcgggctgccggtgcttgtggaactgctgcagtctgagaccgacaaggtggtgcgcgccgtcgccatcgctctgcgcaacctctcgctggaccggcgcaacaaagacctcatcgggagctacgccatggctgagcttgtgcggaatgtgcgcaatgcacaggctccgccgcgaccgggggcctgcctggaggaagacaccgtggtggcggtgctcaacaccatccacgaaatcgtgtccgacagcctggataacgcgcgctcgctcctgcaggcacgcggggtgccagcgttggtggctctcgtggcctccagccaatcggtacgcgaagcgaaggcggcgtcacacgtgctgcagacagtgtggagctacaaggagctgcgtggtaccttgcagaaagatggttggaccaaggcgcgcttccagtcagctgctgctactgccaaggggcctaagggagcactgagtcctgggggcttcgatgacagcacgctgccactggtggacaagagccttgagggcgagaaaactggcagccgggatgtgatccccatggatgcgctgggcccagacggatactccacggtggaccggagggagcggaggccacggggcgccagctctgcaggagaggcctctgagaaggaacccttgaaactcgaccccagcaggaaggcccctccccccgggcccagcaggcccgcggtcaggctggtggacgccgtaggggacgctaagcctcagcccgttgattcctgggtctagcttgcatgcctgggcccaggcccagcctcttgttcttagggcttggatcgtggaagaagggccaccctgagcagatcgtgccgtggagcttggagccccctggcggcaggggttggcagcgcctcgccccagccaagcctgactttggggacaccctcctgcccccccaccccactccccccatcctacctaactccctaggcctgagttagctgtttactgacatggtgctgtgtgtgagcgagtgacagaaggcccgaggaggccgactgggctgctggggcagggcccagggaggtggcagggaagggtgcctggctgggctttggggctggtgggataggagggtgcccctgggaacacagtgccccagtggtgcgggccaggtctggcgccaggggcaggcagctaggcagggagggggctgggaaagaacttggacttctaaaggcggagggtctccctgggcaccctgcaggcaggcagaccacggtgtggggggtgccccacaaggcccagccctgggcaaggaagctttggaagcagcaaggtgggggtcaggctacaggtgccccacctccccagagccctgcagtcacgtgaggcccctgtgcagtagagagcctttctccagcccatgctggctggggccggggctgccgcatctgcctggagcctgggcagcacctccgggactgaccttcggcagtggctgggggactgctttcagtgcctgctgttcgtgactcagaaacagaagaaaaacactgagaaaaagcattaaaaataagccaaaataagactattggtaaacacctaaatttttgtaagaaaatttaaaaattaaagcagcaaaggaa

SEQ ID NO: 108872 - DNA, 2700 bp, Homo sapiens
  Payload ID: 1386
  Gene Symbol: ARVCF
  Gene Name: armadillo repeat gene deleted in velocardiofacial syndrome
  Uniprot ID: O00192
  ENST ID: ENST00000401994
  CDS Start-End: 1-2700
atgccggccgaactcagacaggagcagagcccaggcagccaggcctcactggccacgatgccggaggcacctgatgtgctggaggagaccgtgacggtggaggaggaccccggcacacccacttcccatgtgtctattgtcacatccgaagatggcacaacccggcgcaccgagaccaaggtcaccaagactgtcaagacggtgaccactcggacagtacgccaggtgcccgtgggcccagatggactccccctgctggatggcggccccccactaggcccttttgcagatggtgccctggaccggcatttcctgctgcgtggtggtggcccagtggccacactctctcgagcctacctcagcagtgggggtggctttcccgaaggccccgagccccgggacagccccagctatggcagcctgtcccgagggctgggcatgcggcccccacgtgctggcccccttggcccaggccctggtgatggctgcttcacactgcctggccaccgggaagccttcccggtgggtcctgagcctgggccaccaggtggccgctccctgcccgagcgcttccaggcagagccgtatggcttggaggatgacacgcgcagcctggccgctgatgacgagggtggccctgagctggagcctgactatggcacggccacaaggaggaggcctgagtgtgggcggggccttcataccagggcctacgaggacacagcagatgatggcggcgagctggcggacgagcggcctgcgttcccaatggtgacggcgcccctggcccagcctgaacggggcagcatgggcagcctggaccggctggtgcggcgctcgccctcagtggatagcgcccgcaaggagccgcgctggcgggaccctgagctgcctgaggtgctggccatgctgcggcaccccgtggaccccgtgaaggccaatgcggccgcctacctgcagcatctgtgctttgagaacgagggtgtcaagcggcgtgtacggcagttgcgggggctgccgctgcttgtggcactgctggaccacccgcgggctgaggtgcggcgccgggcctgtggggcactgcgcaacctctcctatggccgcgacactgacaacaaggccgccatccgggactgcggtggtgtgcctgccctggtgcgcctgctgagggctgcccgggacaacgaggtccgtgagcttgtcactggcaccctgtggaacctgtcatcctatgagcccctgaagatggtcatcattgaccatggcctgcagacgctgacccacgaggtgatcgtgccccactcaggatgggagcgtgagcccaacgaggactccaagccacgggacgccgagtggacaactgtcttcaagaacacgtcgggctgcctgaggaatgtgagctccgatggtgctgaggcccggcggcgactccgggagtgtgaagggctggtggacgcgctcctgcatgccctgcagtcggctgtgggccggaaggacactgacaacaagtcggtggagaactgcgtgtgcatcatgcggaacctgtcctaccacgtgcacaaggaggtgcccggggccgacaggtaccaggaggccgagcccgggcccctgggcagtgctgtaggctcccagcgccggaggcgggatgatgccagctgctttggaggcaagaaggccaaagaggagtggttccaccaaggaaagaaggatggtgagatggaccggaactttgacacgctagacctgcccaagcgaactgaggccgccaaaggctttgagctgctgtaccagcccgaggtggtacgtctctacctctccctcctcacggagagccggaacttcaacaccctggaggctgccgccggcgctctgcagaacctcagtgccggcaactggatgtgggccacgtacatccgcgccacagtgcgcaaagagcgcgggctgccggtgcttgtggaactgctgcagtctgagaccgacaaggtggtgcgcgccgtcgccatcgctctgcgcaacctctcgctggaccggcgcaacaaagacctcatcgggagctacgccatggctgagcttgtgcggaatgtgcgcaatgcacaggctccgccgcgaccgggggcctgcctggaggaagacaccgtggtggcggtgctcaacaccatccacgaaatcgtgtccgacagcctggataacgcgcgctcgctcctgcaggcacgcggggtgccagcgttggtggctctcgtggcctccagccaatcggtacgcgaagcgaaggcggcgtcacacgtgctgcagacagtgtggagctacaaggagctgcgtggtaccttgcagaaagatggttggaccaaggcgcgcttccagtcagctgctgctactgccaaggggcctaagggagcactgagtcctgggggcttcgatgacagcacgctgccactggtggacaagagccttgagggcgagaaaactggcagccgggatgtgatccccatggatgcgctgggcccagacggatactccacggtggaccggagggagcggaggccacggggcgccagctctgcaggagaggcctctgagaaggaacccttgaaactcgaccccagcaggaaggcccctccccccgggcccagcaggcccgcggtcaggctggtggacgccgtaggggacgctaagcctcagcccgttgattcctgggtctag

SEQ ID NO: 108873 - DNA, 2682 bp, Homo sapiens
  Payload ID: 1386
  Gene Symbol: ARVCF
  Gene Name: armadillo repeat gene deleted in velocardiofacial syndrome
  ENST ID: ENST00000406522
  CDS Start-End: 1-2682
atgccggccgaactcagacaggagcagagcccaggcagccaggcctcactggccacgatgccggaggcacctgatgtgctggaggagaccgtgacggtggaggaggaccccggcacacccacttcccatgtgtctattgtcacatccgaagatggcacaacccggcgcaccgagaccaaggtcaccaagactgtcaagacggtgaccactcggacagtacgccaggtgcccgtgggcccagatggactccccctgctggatggcggccccccactaggcccttttgcagatggtgccctggaccggcatttcctgctgcgtggtggtggcccagtggccacactctctcgagcctacctcagcagtgggggtggctttcccgaaggccccgagccccgggacagccccagctatggcagcctgtcccgagggctgggcatgcggcccccacgtgctggcccccttggcccaggccctggtgatggctgcttcacactgcctggccaccgggaagccttcccggtgggtcctgagcctgggccaccaggtggccgctccctgcccgagcgcttccaggcagagccgtatggcttggaggatgacacgcgcagcctggccgctgatgacgagggtggccctgagctggagcctgactatggcacggccacaaggaggaggcctgagtgtgggcggggccttcataccagggcctacgaggacacagcagatgatggcggcgagctggcggacgagcggcctgcgttcccaatggtgacggcgcccctggcccagcctgaacggggcagcatgggcagcctggaccggctggtgcggcgctcgccctcagtggatagcgcccgcaaggagccgcgctggcgggaccctgagctgcctgaggtgctggccatgctgcggcaccccgtggaccccgtgaaggccaatgcggccgcctacctgcagcatctgtgctttgagaacgagggtgtcaagcggcgtgtacggcagttgcgggggctgccgctgcttgtggcactgctggaccacccgcgggctgaggtgcggcgccgggcctgtggggcactgcgcaacctctcctatggccgcgacactgacaacaaggccgccatccgggactgcggtggtgtgcctgccctggtgcgcctgctgagggctgcccgggacaacgaggtccgtgagcttgtcactggcaccctgtggaacctgtcatcctatgagcccctgaagatggtcatcattgaccatggcctgcagacgctgacccacgaggtgatcgtgccccactcaggatgggagcgtgagcccaacgaggactccaagccacgggacgccgagtggacaactgtcttcaagaacacgtcgggctgcctgaggaatgtgagctccgatggtgctgaggcccggcggcgactccgggagtgtgaagggctggtggacgcgctcctgcatgccctgcagtcggctgtgggccggaaggacactgacaacaagtcggtggagaactgcgtgtgcatcatgcggaacctgtcctaccacgtgcacaaggaggtgcccggggccgacaggtaccaggaggccgagcccgggcccctgggcagtgctgtaggctcccagcgccggaggcgggatgatgccagctgctttggaggcaagaaggccaaaggaaagaaggatggtgagatggaccggaactttgacacgctagacctgcccaagcgaactgaggccgccaaaggctttgagctgctgtaccagcccgaggtggtacgtctctacctctccctcctcacggagagccggaacttcaacaccctggaggctgccgccggcgctctgcagaacctcagtgccggcaactggatgtgggccacgtacatccgcgccacagtgcgcaaagagcgcgggctgccggtgcttgtggaactgctgcagtctgagaccgacaaggtggtgcgcgccgtcgccatcgctctgcgcaacctctcgctggaccggcgcaacaaagacctcatcgggagctacgccatggctgagcttgtgcggaatgtgcgcaatgcacaggctccgccgcgaccgggggcctgcctggaggaagacaccgtggtggcggtgctcaacaccatccacgaaatcgtgtccgacagcctggataacgcgcgctcgctcctgcaggcacgcggggtgccagcgttggtggctctcgtggcctccagccaatcggtacgcgaagcgaaggcggcgtcacacgtgctgcagacagtgtggagctacaaggagctgcgtggtaccttgcagaaagatggttggaccaaggcgcgcttccagtcagctgctgctactgccaaggggcctaagggagcactgagtcctgggggcttcgatgacagcacgctgccactggtggacaagagccttgagggcgagaaaactggcagccgggatgtgatccccatggatgcgctgggcccagacggatactccacggtggaccggagggagcggaggccacggggcgccagctctgcaggagaggcctctgagaaggaacccttgaaactcgaccccagcaggaaggcccctccccccgggcccagcaggcccgcggtcaggctggtggacgccgtaggggacgctaagcctcagcccgttgattcctgggtctag

SEQ ID NO: 108874 - DNA, 2871 bp, Homo sapiens
  Payload ID: 1386
  Gene Symbol: ARVCF
  Gene Name: armadillo repeat gene deleted in velocardiofacial syndrome
  ENST ID: ENST00000406259
  CDS Start-End: 1-2871
atggaggactgcaatgtgcactcggccgccagcatcctggcctcggtgaaggagcaggaggcccgcttcgagaggctgacacgggcactggagcaggagcggcgccatgttgccctacagctggagcgtgcccagcagcctggcatggtcagtggtggcatgggcagtgggcagcccctgccaatggcctggcaacagctggtcctccaggagcagagcccaggcagccaggcctcactggccacgatgccggaggcacctgatgtgctggaggagaccgtgacggtggaggaggaccccggcacacccacttcccatgtgtctattgtcacatccgaagatggcacaacccggcgcaccgagaccaaggtcaccaagactgtcaagacggtgaccactcggacagtacgccaggtgcccgtgggcccagatggactccccctgctggatggcggccccccactaggcccttttgcagatggtgccctggaccggcatttcctgctgcgtggtggtggcccagtggccacactctctcgagcctacctcagcagtgggggtggctttcccgaaggccccgagccccgggacagccccagctatggcagcctgtcccgagggctgggcatgcggcccccacgtgctggcccccttggcccaggccctggtgatggctgcttcacactgcctggccaccgggaagccttcccggtgggtcctgagcctgggccaccaggtggccgctccctgcccgagcgcttccaggcagagccgtatggcttggaggatgacacgcgcagcctggccgctgatgacgagggtggccctgagctggagcctgactatggcacggccacaaggaggaggcctgagtgtgggcggggccttcataccagggcctacgaggacacagcagatgatggcggcgagctggcggacgagcggcctgcgttcccaatggtgacggcgcccctggcccagcctgaacggggcagcatgggcagcctggaccggctggtgcggcgctcgccctcagtggatagcgcccgcaaggagccgcgctggcgggaccctgagctgcctgaggtgctggccatgctgcggcaccccgtggaccccgtgaaggccaatgcggccgcctacctgcagcatctgtgctttgagaacgagggtgtcaagcggcgtgtacggcagttgcgggggctgccgctgcttgtggcactgctggaccacccgcgggctgaggtgcggcgccgggcctgtggggcactgcgcaacctctcctatggccgcgacactgacaacaaggccgccatccgggactgcggtggtgtgcctgccctggtgcgcctgctgagggctgcccgggacaacgaggtccgtgagcttgtcactggcaccctgtggaacctgtcatcctatgagcccctgaagatggtcatcattgaccatggcctgcagacgctgacccacgaggtgatcgtgccccactcaggatgggagcgtgagcccaacgaggactccaagccacgggacgccgagtggacaactgtcttcaagaacacgtcgggctgcctgaggaatgtgagctccgatggtgctgaggcccggcggcgactccgggagtgtgaagggctggtggacgcgctcctgcatgccctgcagtcggctgtgggccggaaggacactgacaacaagtcggtggagaactgcgtgtgcatcatgcggaacctgtcctaccacgtgcacaaggaggtgcccggggccgacaggtaccaggaggccgagcccgggcccctgggcagtgctgtaggctcccagcgccggaggcgggatgatgccagctgctttggaggcaagaaggccaaaggaaagaaggatggtgagatggaccggaactttgacacgctagacctgcccaagcgaactgaggccgccaaaggctttgagctgctgtaccagcccgaggtggtacgtctctacctctccctcctcacggagagccggaacttcaacaccctggaggctgccgccggcgctctgcagaacctcagtgccggcaactggatgtgggccacgtacatccgcgccacagtgcgcaaagagcgcgggctgccggtgcttgtggaactgctgcagtctgagaccgacaaggtggtgcgcgccgtcgccatcgctctgcgcaacctctcgctggaccggcgcaacaaagacctcatcgggagctacgccatggctgagcttgtgcggaatgtgcgcaatgcacaggctccgccgcgaccgggggcctgcctggaggaagacaccgtggtggcggtgctcaacaccatccacgaaatcgtgtccgacagcctggataacgcgcgctcgctcctgcaggcacgcggggtgccagcgttggtggctctcgtggcctccagccaatcggtacgcgaagcgaaggcggcgtcacacgtgctgcagacagtgtggagctacaaggagctgcgtggtaccttgcagaaagatggttggaccaaggcgcgcttccagtcagctgctgctactgccaaggggcctaagggagcactgagtcctgggggcttcgatgacagcacgctgccactggtggacaagagccttgagggcgagaaaactggcagccgggatgtgatccccatggatgcgctgggcccagacggatactccacggtggaccggagggagcggaggccacggggcgccagctctgcaggagaggcctctgagaaggaacccttgaaactcgaccccagcaggaaggcccctccccccgggcccagcaggcccgcggtcaggctggtggacgccgtaggggacgctaagcctcagcccgttgattcctgggtctag

SEQ ID NO: 108875 - DNA, 2829 bp, Homo sapiens
  Payload ID: 1387
  Gene Symbol: ACTR1A
  Gene Name: ARP1 actin-related protein 1 homolog A, centractin alpha (yeast)
  Uniprot ID: P61163
  ENST ID: ENST00000369905
  CDS Start-End: 65-1195
tcagtggcgctagcggcggacccggctgggcagttccttccccagaaggagagattcctctgccatggagtcctacgatgtgatcgccaaccagcctgtcgtgatcgacaacggatccggtgtgattaaagctggttttgctggtgatcagatccccaaatactgctttccaaactatgtgggccgacccaagcacgttcgtgtcatggcaggagcccttgaaggcgacatcttcattggccccaaagctgaggagcaccgagggctgctttcaatccgctatcccatggagcatggcatcgtcaaggattggaacgacatggaacgcatttggcaatatgtctattctaaggaccagctgcagactttctcagaggagcatcctgtgctcctgactgaggcgcctttaaacccacgaaaaaaccgggaacgagctgccgaagttttcttcgagaccttcaatgtgcccgctcttttcatctccatgcaagctgtactcagcctttacgctacaggcaggaccacaggggtggtgctggattctggggatggagtcacccatgctgtgcccatctatgagggctttgccatgccccactccatcatgcgcatcgacatcgcgggccgggacgtctctcgcttcctgcgcctctacctgcgtaaggagggctacgacttccactcatcctctgagtttgagattgtcaaggccataaaagaaagagcctgttacctatccataaacccccaaaaggatgagacgctagagacagagaaagctcagtactacctgcctgatggcagcaccattgagattggtccttcccgattccgggcccctgagttgctcttcaggccagatttgattggagaggagagtgaaggcatccacgaggtcctggtgttcgccattcagaagtcagacatggacctgcggcgcacgcttttctctaacattgtcctctcaggaggctctaccctgttcaaaggttttggtgacaggctcctgagtgaagtgaagaaactagctccaaaagatgtgaagatcaggatatctgcacctcaggagagactgtattccacgtggattgggggctccatccttgcctccctggacacctttaagaagatgtgggtctccaaaaaggaatatgaggaagacggtgcccgatccatccacagaaaaaccttctaatgtcgggacatcatcttcacctctctctgaagttaactccactttaaaactcgctttcttgagtcggagtgtttgcgaggaactgcctgtgtgtgagtgcgtgtgtggatatgagtgtgtgtgcacatgcgagtgccgtgtggccctgggaccctgggcccagaaaggacgatgaactacctgcagtggtgatggcctgaggcctggggttgaccactaactggctcctgacagggaagagcgctggcagaggctgtgctccctcctcaggtggcctctggctggctgtgggggactccgtttactaccacagggagacagagggaggtaagccatcccccgggagaccttgctgctgaccatcctaggctgggctggccccaccctcacccccacccccagggtgccctgaggccccaggcagctgctgcctccactatcgatgcctcctgactgcacactgaggactgggactggggttgagttctgtctggttttgttgccattttggtttgggaggctggaaaagcaccccaagagctattacagagactggagtcaggagagagcaggaggccctcatgttcaccagggaacaggaccacaccggccactggaggagggcaggagcagtcctcactctgaatggctgcagagttaatgttcccagcccagtcccctttcgggggccttgggagagtttaaggcacctgctggttccaggacctcgctttccatctgttcttgttgcaatgccatcttcaaaccgttttatttattgaagtgtttgttcagttaggggctggagagagggagcttgctgcctcctgccttgctacactaatgtttacagcacctaagcttagcctccagggccccacctctcccagctgatggtgagctgacagtgtccacaggttccaggaccatttgagattggaagctacactcaaagacactcccaccaggctctttctcccttttcctcttgctcactgccctggaatcaacaggctggttgctggttagattttctgaaacaggaggtaaaatttttctttggcagaggcccctaagcaagggaggggtgttggagagccagtgcccttaagactggagaaagctgcaatttaccaagttgccttttgccactgtagctgaccaggggactaggttgtagaggtgggaaggccccctctgggctgatcttgtgccattcttgaccttggacctgcttggttaaggagggagtgggccagaccagagtgccaggagctaatggagccaggcctgactcctaggagtggtccaaaggccttcagcctagatggtgcaaagctggggccagcctgtcttcaccggcaccctcacctgtgacaccaagacccaccccaatcccagacttcacacagtattctcccccacgccgtcctatgaccaaaggcccctgccaggtgtgggccacagcagcaggtatgtgtgaaagcaacgtagcgccccgcggactgcagtgcgcttaaccaactcacctcccttctcttagcccaagcctgtccctcgcacagcctcgcacaaaccacattgcctggtggggcccagtgtactgaaataaagtcgttccgatagacacgtca

SEQ ID NO: 108876 - DNA, 2726 bp, Homo sapiens
  Payload ID: 1387
  Gene Symbol: ACTR1A
  Gene Name: ARP1 actin-related protein 1 homolog A, centractin alpha (yeast)
  ENST ID: ENST00000487599
  CDS Start-End: 32-1030
ttccttccccagaaggagagattcctctgccatggagtcctacgatgtgatcgccaaccagcctgtcgtgatcgacaacggatccggtgtgattaaagctggttttgctggtgatcagatccccaaatactgctttccaaactatgtgggccgacccaagcacgttcgtgtcatggcaggagcccttgaaggcgacatcttcattggccccaaagctgaggagcaccgagggctgctttcaatccgctatcccatggagcatggcatcgtcaaggattggaacgacatggaacgcatttggcaatatgtctattctaaggaccagctgcagactttctcagaggagcatcctgtgctcctgactgaggcgcctttaaacccacgaaaaaaccgggaacgagctgccgaagttttcttcgagaccttcaatgtgcccgctcttttcatctccatgcaagctgtactcagcctttacgctacaggcaggaccacaggggtggtgctggattctggggatggagtcacccatgctgtgcccatctatgagggctttgccatgccccactccatcatgcgcatcgacatcgcgggccgggacgtctctcgcttcctgcgcctctacctgcgtaaggagggctacgacttccactcatcctctgagtttgagattgtcaaggccataaaagaaagagcctgttacctatccataaacccccaaaaggatgagacgctagagacagagaaagctcagtactacctgcctgatggcagcaccattgagattggtccttcccgattccgggcccctgagttgctcttcaggccagatttgattggagaggagagtgaaggcatccacgaggtcctggtgttcgccattcagaagtcagacatggacctgcggcgcacgcttttctctaacattgtcctctcaggaggctctaccctgttcaaagatatctgcacctcaggagagactgtattccacgtggattgggggctccatccttgcctccctggacacctttaagaagatgtgggtctccaaaaaggaatatgaggaagacggtgcccgatccatccacagaaaaaccttctaatgtcgggacatcatcttcacctctctctgaagttaactccactttaaaactcgctttcttgagtcggagtgtttgcgaggaactgcctgtgtgtgagtgcgtgtgtggatatgagtgtgtgtgcacatgcgagtgccgtgtggccctgggaccctgggcccagaaaggacgatgaactacctgcagtggtgatggcctgaggcctggggttgaccactaactggctcctgacagggaagagcgctggcagaggctgtgctccctcctcaggtggcctctggctggctgtgggggactccgtttactaccacagggagacagagggaggtaagccatcccccgggagaccttgctgctgaccatcctaggctgggctggccccaccctcacccccacccccagggtgccctgaggccccaggcagctgctgcctccactatcgatgcctcctgactgcacactgaggactgggactggggttgagttctgtctggttttgttgccattttggtttgggaggctggaaaagcaccccaagagctattacagagactggagtcaggagagagcaggaggccctcatgttcaccagggaacaggaccacaccggccactggaggagggcaggagcagtcctcactctgaatggctgcagagttaatgttcccagcccagtcccctttcgggggccttgggagagtttaaggcacctgctggttccaggacctcgctttccatctgttcttgttgcaatgccatcttcaaaccgttttatttattgaagtgtttgttcagttaggggctggagagagggagcttgctgcctcctgccttgctacactaatgtttacagcacctaagcttagcctccagggccccacctctcccagctgatggtgagctgacagtgtccacaggttccaggaccatttgagattggaagctacactcaaagacactcccaccaggctctttctcccttttcctcttgctcactgccctggaatcaacaggctggttgctggttagattttctgaaacaggaggtaaaatttttctttggcagaggcccctaagcaagggaggggtgttggagagccagtgcccttaagactggagaaagctgcaatttaccaagttgccttttgccactgtagctgaccaggggactaggttgtagaggtgggaaggccccctctgggctgatcttgtgccattcttgaccttggacctgcttggttaaggagggagtgggccagaccagagtgccaggagctaatggagccaggcctgactcctaggagtggtccaaaggccttcagcctagatggtgcaaagctggggccagcctgtcttcaccggcaccctcacctgtgacaccaagacccaccccaatcccagacttcacacagtattctcccccacgccgtcctatgaccaaaggcccctgccaggtgtgggccacagcagcaggtatgtgtgaaagcaacgtagcgccccgcggactgcagtgcgcttaaccaactcacctcccttctcttagcccaagcctgtccctcgcacagcctcgcacaaaccacattgcctggtggggcccagtgtactgaaataaagtcgttccgatag

SEQ ID NO: 108877 - DNA, 2243 bp, Homo sapiens
  Payload ID: 1388
  Gene Symbol: ACTR1B
  Gene Name: ARP1 actin-related protein 1 homolog B, centractin beta (yeast)
  Uniprot ID: P42025
  ENST ID: ENST00000289228
  CDS Start-End: 218-1348
cccgggcacctgctgtcaatcgggccaggtgggagcgatgattggccgccgggcccgccctccagaaagccccgcggggctcgcgtaggctgcaggctcggggagggagggcagcggcgccgcgtcgggagccgccgccgtcccggtcctcccgcccgcccgcccatccggtgcctcctgcagcccgcctgctgggcagggccggcgcggcccggccatggagtcctacgacatcatcgccaaccagcctgtggtcatcgacaacggttcgggggtgattaaagctggctttgcaggagaccagattcccaaatactgtttcccaaactatgtcgggcggccgaagcacatgcgggtgatggctggagccctggagggggacctcttcatcggaccaaaagcagaggagcaccgggggctgctgaccatccgctaccccatggagcacggcgtggtgcgagactggaacgacatggaacgcatctggcagtacgtctactccaaggatcagctgcagaccttctcggaggagcatcctgtgctcctcacggaggccccgctcaacccgagtaagaaccgggagaaggcggcagaggtgttctttgagaccttcaacgtgccggccctgttcatctccatgcaggctgtgctcagtctgtacgcaacaggacgcacgacaggagtggttctagactcaggggacggggtcactcatgctgtgcccatctatgagggctttgccatgcctcactccatcatgcgggtggacattgccggccgcgacgtctcccgctacctccgactcctgctgcgcaaggaaggggttgacttccatacctcggctgagtttgaggttgtccggacaatcaaagagcgagcgtgctacctgtccatcaacccacagaaggatgaggctctggagacggagaaggtgcagtacacgttgccagacggcagcacgcttgatgtggggcctgcacgattccgggcccccgagctgctgttccagccggaccttgtcggggatgagagtgaggggctccatgaggtggtggccttcgccatacacaagtccgacatggacctgcgccggacgctgttcgccaacatcgtgctctcaggtggctcaacgcttttcaaaggcttcggagaccgattactcagtgaagtgaagaagcttgccccaaaggatatcaaaatcaagatctcagccccgcaggaacggctgtactccacatggattggcggctccatcctggcctcgctggacacttttaagaagatgtgggtgtccaaaaaggagtatgaagaggatggctcccgtgctattcatcgcaaaactttctagtgcccaaggagggcggggcatgttgggagagggggagggaggggagacagagcctttaaccctttttggtcttggctcgtatactaggcttagggtcccctgcatgccctgaacccctgggtgggtggcacagcagtgcccccctgcagccttcccctctacacaggacatgcacacacaagtaacattgagctgcatggacaggagccttgagctggcgtgtgggaattgagcgccatgtcaggctgttgtgggtatccccctggcagggccagctaggcctgtggttccctgctccgactctcagggctgcctccctgagctccagggccagaatgcctggatgcctgggtagccagtttggggagtgggctgcaaggggcagccagcagctcccactggtgtgtcactgcatccattgccacctcctgttcgtgacctgacagggtgacacagcccctttcacactctgtcctcctatcttcctgggtagatgccctggtgtagggctgagtactgaatggtcttccatccccagcaagggggtgcagcccagggtcaggcccttcagagccagggcagaggatgcacggtggctagagccgctgcactatccttttcagagcacttcatccacttgctcctccctctaccctcggcaccctgggtgggaaagggttgatgctcatcatttattgaggggaagccacttaataaggagtcagacctaaaagggggtgggggacattttcttacctcacccaagaaagaggtcgtcacttttgctgtggccagggccccacctccctctctcagatatgtacaataatttaacacggttgcctgaaaaaaacttttgtaaatcattatagtaataattatggacaaggcccag

SEQ ID NO: 108878 - DNA, 3861 bp, Homo sapiens
  Payload ID: 1389
  Gene Symbol: ACTR2
  Gene Name: ARP2 actin-related protein 2 homolog (yeast)
  Uniprot ID: P61160
  ENST ID: ENST00000260641
  CDS Start-End: 158-1342
agctaaatgacgggcggagcccggcggcggcttccggtcgggggaaaaaagttgggccgaaggaggggccgggaagacgcaagaggaagaagagaaaacggccgggcggcggtggctgtaggttgtgcggctgcagcggctcttccctgggcggacgatggacagccagggcaggaaggtggtggtgtgcgacaacggcaccgggtttgtgaagtgtggatatgcaggctctaactttccagaacacatcttcccagctttggttggaagacctattatcagatcaaccaccaaagtgggaaacattgaaatcaaggatcttatggttggtgatgaggcaagtgaattacgatcaatgttagaagttaactaccctatggaaaatggcatagtacgaaattgggatgacatgaaacacctgtgggactacacatttggaccagagaaacttaatatagataccagaaattgtaaaatcttactcacagaacctcctatgaacccaaccaaaaacagagagaagattgtagaggtaatgtttgaaacttaccagttttccggtgtatatgtagccatccaggcagttctgactttgtacgctcaaggtttattgactggtgtagtggtagactctggagatggtgtgactcacatttgcccagtatatgaaggcttttctctccctcatcttaccaggagactggatattgctgggagggatataactagatatcttatcaagctacttctgttgcgaggatacgccttcaaccactctgctgattttgaaacggttcgcatgattaaagaaaaactgtgttacgtgggatataatattgagcaagagcagaaactggccttagaaaccacagtattagttgaatcttatacactcccagatggacgtatcatcaaagttgggggagagagatttgaagcaccagaagctttatttcagcctcacttgatcaatgttgaaggagttggtgttgctgaattgctttttaacacaattcaggcagctgacattgataccagatctgaattctacaaacacattgtgctttctggagggtctactatgtatcctggcctgccatcacggttggaacgagaacttaaacagctttacttagaacgagttttgaagggtgatgtggaaaaactttctaaatttaagatccgcattgaagacccaccccgcagaaagcacatggtattcctgggtggtgcagttctagcggatatcatgaaagacaaagacaacttttggatgacccgacaagagtaccaagaaaagggtgtccgtgtgctagagaaacttggtgtgactgttcgataaactccaaagcttgttcccgtcatacccgtaatgctttcttttttcctttattgccaatctttgaactcattcaactccaggacatggaagaggcctctctctgccctttgactggaaaggtcaagttttattctggtgtcttggggaagctttgttaaatttttgttaatgtgggtaaatctgagtttaattcaactgcttccctacatagactagagggctaaggattctgtctgctgctttgtttcttctaagtaggcatttagatcattcctataggcttcctattttcactttactgctctaatgctgctagtcgtagtctttagcacactaggtggtatgcctttattagcataaaacaaaaaaaactttaacaggagcttttacatattactgggatggggggtggttcgggatgggtgggcagctgctgaaccctttagggcatttcctctgtaatgtggcgctttcaactgtactgctgcagctttaagtaccttaaagcttctcctgtgaacttcttagggaaatgttaggttcagaactaaagtgttttgggtgggttttgttgcgggggggagggtaacaatgggtggtcttctgatttttatttttgaggttttgtcaactggagtacgtagaggaactttatttacagtactttgatttggcaggttttcttctacttgtgctctgcctggagctgtttccatatgatataaaaagcaagtgtagtattccattactatgtggcttagggatttatttgttttttaaaatcaaccatgttagctgggattagactccctacagtccttcaatggaaaagtaacatttaaaaatcctttgggtaattcgaattacagatttaaaagagcttaagatctggtgttttgttaatgcttctgtttattccagaagcattaaggtaacccattgccaagtatcattcttgcaaattattcttttatataactgaccagtgcttaataaaacaagcaggtacttacaaataattactggcagtaggttataattggtggtttaaaaataacattggaatacaggacttgttgccaattgggtaattttcattagttgttttgtttgttttgatttgaaacctggaaatacagtaaaatttgactgtttaaaatgttggccaaaaaaatcaagatttaatttttttatttgtactgaaaaactaatcataactgttaattctcagccatctttgaagcttgaaagaagagtctttggtattttgtaaacgttagcagactttcctgccagtgtcagaaaatcctatttatgaatcctgtcggtattccttggtatctgaaaaaaataccaaatagtaccatacatgagttatttctaagtttgaaaaataaaaagaaattgcatcacactaattacaaaatacaagttctggaaaaaatatttttcttcattttaaaacttttttttaactaataatagctttgaaagaagaggcttaatttgggggtggtaactaaaatcaaaagaaatgattgacttgagggtctctgtttggtaagaatacatcattagcttaaataagcagcagaaggttagttttaattatgtagcttctgttaatattaagtgttttttgtctgttttacctcaatttgaacagataagtttgcctgcatgctggacatgcctcagaaccctgaatagcccgtactagatcttgggaacatggatcttagagtcactttggaataagttcttatataaatacccccagccttttgagaacggggcttgttaaaggacgcgtatgtagggcccgtacctactggcagttgggttcagggaaatgggattgacttggccttcaggctcctttggtcataattttaaaatatgggagtagaaaacaacaaagaatggaatggactcttaaaacaatgaaagagcatttatcgtttgtcccttgaatgtagaatttgtttttgatttcataattctgctggtaaatgtgacagttaaaatggtgcattatgtatatatattataatttagaaataccattttataattttactattccagggtgacataatgcatttaaatttgggatttgggtggagtattatgtttaactggagttgtcaagtatgagtccctcaggaaaaaaaaaaaattctgttttaaaaagcaatctgattcttagctcttgaaactattgctacttaaatttccaataattaaaaatttaaaatttttaaattagaattgccaatacttctacatttgagaagggtttttttagaaatacatttagtaaagtccccaagacattagtcttacatttaaacttttttctttaaaacatggttttggtggttaacttttacacagttctgagtactgttaatatctggaaagtatcttgagatatcagtggaaagctaaacagtctaaattaacatgaaatacttcattttgattgagaaaataaaatcagattttttcaaagtcaa

SEQ ID NO: 108879 - DNA, 2685 bp, Homo sapiens
  Payload ID: 1389
  Gene Symbol: ACTR2
  Gene Name: ARP2 actin-related protein 2 homolog (yeast)
  Uniprot ID: P61160
  ENST ID: ENST00000377982
  CDS Start-End: 74-1273
ggaagaagagaaaacggccgggcggcggtggctgtaggttgtgcggctgcagcggctcttccctgggcggacgatggacagccagggcaggaaggtggtggtgtgcgacaacggcaccgggtttgtgaagtgtggatatgcaggctctaactttccagaacacatcttcccagctttggttggaagacctattatcagatcaaccaccaaagtgggaaacattgaaatcaagaataacaaaaagatggatcttatggttggtgatgaggcaagtgaattacgatcaatgttagaagttaactaccctatggaaaatggcatagtacgaaattgggatgacatgaaacacctgtgggactacacatttggaccagagaaacttaatatagataccagaaattgtaaaatcttactcacagaacctcctatgaacccaaccaaaaacagagagaagattgtagaggtaatgtttgaaacttaccagttttccggtgtatatgtagccatccaggcagttctgactttgtacgctcaaggtttattgactggtgtagtggtagactctggagatggtgtgactcacatttgcccagtatatgaaggcttttctctccctcatcttaccaggagactggatattgctgggagggatataactagatatcttatcaagctacttctgttgcgaggatacgccttcaaccactctgctgattttgaaacggttcgcatgattaaagaaaaactgtgttacgtgggatataatattgagcaagagcagaaactggccttagaaaccacagtattagttgaatcttatacactcccagatggacgtatcatcaaagttgggggagagagatttgaagcaccagaagctttatttcagcctcacttgatcaatgttgaaggagttggtgttgctgaattgctttttaacacaattcaggcagctgacattgataccagatctgaattctacaaacacattgtgctttctggagggtctactatgtatcctggcctgccatcacggttggaacgagaacttaaacagctttacttagaacgagttttgaagggtgatgtggaaaaactttctaaatttaagatccgcattgaagacccaccccgcagaaagcacatggtattcctgggtggtgcagttctagcggatatcatgaaagacaaagacaacttttggatgacccgacaagagtaccaagaaaagggtgtccgtgtgctagagaaacttggtgtgactgttcgataaactccaaagcttgttcccgtcatacccgtaatgctttcttttttcctttattgccaatctttgaactcattcaactccaggacatggaagaggcctctctctgccctttgactggaaaggtcaagttttattctggtgtcttggggaagctttgttaaatttttgttaatgtgggtaaatctgagtttaattcaactgcttccctacatagactagagggctaaggattctgtctgctgctttgtttcttctaagtaggcatttagatcattcctataggcttcctattttcactttactgctctaatgctgctagtcgtagtctttagcacactaggtggtatgcctttattagcataaaacaaaaaaaactttaacaggagcttttacatattactgggatggggggtggttcgggatgggtgggcagctgctgaaccctttagggcatttcctctgtaatgtggcgctttcaactgtactgctgcagctttaagtaccttaaagcttctcctgtgaacttcttagggaaatgttaggttcagaactaaagtgttttgggtgggttttgttgcgggggggagggtaacaatgggtggtcttctgatttttatttttgaggttttgtcaactggagtacgtagaggaactttatttacagtactttgatttggcaggttttcttctacttgtgctctgcctggagctgtttccatatgatataaaaagcaagtgtagtattccattactatgtggcttagggatttatttgttttttaaaatcaaccatgttagctgggattagactccctacagtccttcaatggaaaagtaacatttaaaaatcctttgggtaattcgaattacagatttaaaagagcttaagatctggtgttttgttaatgcttctgtttattccagaagcattaaggtaacccattgccaagtatcattcttgcaaattattcttttatataactgaccagtgcttaataaaacaagcaggtacttacaaataattactggcagtaggttataattggtggtttaaaaataacattggaatacaggacttgttgccaattgggtaattttcattagttgttttgtttgttttgatttgaaacctggaaatacagtaaaatttgactgtttaaaatgttggccaaaaaaatcaagatttaatttttttatttgtactgaaaaactaatcataactgttaattctcagccatctttgaagcttgaaagaagagtctttggtattttgtaaacgttagcagactttcctgccagtgtcagaaaatcctatttatgaatcctgtcggtattccttggtatctgaaaaaaataccaaatagtaccatacatgagttatttctaagtttgaaaaataaaaagaaattgcatca

SEQ ID NO: 108880 - DNA, 1429 bp, Homo sapiens
  Payload ID: 1389
  Gene Symbol: ACTR2
  Gene Name: ARP2 actin-related protein 2 homolog (yeast)
  ENST ID: ENST00000542850
  CDS Start-End: 389-1408
gggtgggggcggcgggcgagaccggcactggacatggagcctactgaccgcccggcagggacctgctccgcgctaatgcgggggcaattgggctaaagcggacggaagcgtaaaaggctcggtttgtgtgttccgagaagggctcttttccccagggccaccggtttgtaaaaaggagaaagacctagaggccttcctcttcctgtatagttgaagatacaccaaacgagaagcaggaagcgggtttacttaaaaaaaaaaaaaaaaaaagtttgtgaagtgtggatatgcaggctctaactttccagaacacatcttcccagctttggttggaagacctattatcagatcaaccaccaaagtgggaaacattgaaatcaaggatcttatggttggtgatgaggcaagtgaattacgatcaatgttagaagttaactaccctatggaaaatggcatagtacgaaattgggatgacatgaaacacctgtgggactacacatttggaccagagaaacttaatatagataccagaaattgtaaaatcttactcacagaacctcctatgaacccaaccaaaaacagagagaagattgtagaggtaatgtttgaaacttaccagttttccggtgtatatgtagccatccaggcagttctgactttgtacgctcaaggtttattgactggtgtagtggtagactctggagatggtgtgactcacatttgcccagtatatgaaggcttttctctccctcatcttaccaggagactggatattgctgggagggatataactagatatcttatcaagctacttctgttgcgaggatacgccttcaaccactctgctgattttgaaacggttcgcatgattaaagaaaaactgtgttacgtgggatataatattgagcaagagcagaaactggccttagaaaccacagtattagttgaatcttatacactcccagatggacgtatcatcaaagttgggggagagagatttgaagcaccagaagctttatttcagcctcacttgatcaatgttgaaggagttggtgttgctgaattgctttttaacacaattcaggcagctgacattgataccagatctgaattctacaaacacattgtgctttctggagggtctactatgtatcctggcctgccatcacggttggaacgagaacttaaacagctttacttagaacgagttttgaagggtgatgtggaaaaactttctaaatttaagatccgcattgaagacccaccccgcagaaagcacatggtattcctgggtggtgcagttctagcggatatcatgaaagacaaagacaacttttggatgacccgacaagagtaccaagaaaagggtgtccgtgtgctagagaaacttggtgtgactgttcgataaactccaaagcttgttcccgtc

SEQ ID NO: 108881 - DNA, 6718 bp, Homo sapiens
  Payload ID: 1390
  Gene Symbol: ACTR3
  Gene Name: ARP3 actin-related protein 3 homolog (yeast)
  Uniprot ID: P61158
  ENST ID: ENST00000263238
  CDS Start-End: 321-1577
atcttggcttcccggggaaaggcggcgtgaggggaagaagttgtagggtgggggcaggagtgaggaggagggaagagagagggggaggaggccgcggcggggcagggcggggactgcctgcctgcctgggttgcggaagtgatagccgccgaccgagcctgctgctttcttgctactgcttcggcttcccggctaccccccggacggtgaaggcggcccagctgtggatggtcagatagcccttgtctcccgccgccaatctctggcccctagcagcacggagcagacggcggcagcagcagcagcaggcgaggaggaagatggcgggacggctgccggcctgtgtggtggactgtggcacggggtatacaaaactaggatatgctggaaatacagaaccacagtttatcatcccttcctgtattgctattaaggagtcagcaaaagtgggtgatcaagctcaaaggagggtgatgaaaggtgttgatgacctagacttcttcattggtgatgaagcaatagaaaaacctacatatgcaacaaagtggccaatccgccatggtatagttgaagattgggacttaatggaaaggtttatggagcaagtgatctttaaatatttaagggcagaacctgaagaccattattttcttttgactgaacctccattgaatactccagaaaacagggaatatactgctgaaataatgtttgagtccttcaatgttccaggcttgtacattgctgtgcaggctgttcttgccttagctgcatcttggacctcaagacaagtaggagaacggacgttgaccggtacggtaatagacagtggagatggtgtcactcatgtcattcctgtggctgaagggtatgtgattggcagctgtattaaacacattccaatcgcaggacgagatataacatattttattcagcaactgctgagagaccgagaagtaggaatccctccagaacaatccttggaaactgctaaggcagtaaaggagcgctatagttatgtctgcccagatttagtaaaagaatttaacaagtatgatacagatgggtcaaaatggattaaacagtatactggaatcaatgctatctcaaagaaagagttttctatcgatgttggttatgagagatttttgggacctgaaatcttttttcatccagagtttgctaatccagactttacacaacctatctcagaagttgtagatgaagtaattcagaattgtcctattgatgtcagacgtcctctctacaagaatattgtcctctctggaggttcaaccatgttcagggactttggacgtcgcttgcaaagagatttgaaaagaactgtagatgcccggctgaaattaagtgaggaattgagtggtggtagattgaagccaaaacctattgatgtacaagtcattacacaccacatgcagcgatatgcagtttggtttggaggatcaatgctggcttccacgcctgagttctaccaagtatgccacaccaaaaaggattatgaagaaattggacctagcatttgtcgtcacaatccagtgtttggagtcatgtcgtaaaattggcttcatagttattggggttagggaggtggggaagagataatctttctgattacctgttttgtctggatggctggttttgaggttttaaacctgacttgaaatagtaacaccaaacatgattatacaggaatattttaataagtgtatcaccatgcagatgtagaagagagcgaaagtgattgtgtttttctttagattgaatatttgaatcttatgtgtaacaaaaagaagtgggttttagttctttctgtgccctgatattttgtatattaatgaattatccaagattcgatgggatttatcagtgtgtagatagctctataatgcttgaattgtacacttctaagtgtgcagtgcaagagcttgtttatatttcatactttttatactttgaggaaaaaaagtcaaagaaaaattgtatttgagggaaaaaaccatgaccaagtaaaggataaattcaaaaaatagcctcatgagacttggcatacacactcgtgggattccagttattatggagtgcttccatccctctccaccccttccccccaaaaggttttctttgcaagtgcttttggaactaagagctagtatcttggattaactgatgcctgctagtgctttctgattactcgcattctgtttcttgctttaaaagaagagtaaagacaagagtgttggaccagtattgcagttctgtagtgtcatttcttataaaaaacaaaacaacaacaataatttatcaaaattggcatatttaaagcctaacattctaataaaggcacaaatttctttttaatacttgtttcagcctctttaatctctttataagttaactaataaatctattttcttcagacttctgcaatagttctttaaaatcacaacagttagcaagctgacttttgtaatgtgctcaatacaaatacttgtgaacttttaatatgttgagtgctttcattttgataactggatctccatttgatattttcatttgtataactcatttgcagtctgaaaattttttttagtgccagtccctgaacatatcattgaaagttaattttctttgcattttaaaatatctggattatgaagaaaaagtgatgaaaataaattaaaactgaattaccttttctaatgttttttttttttaagtaatgtaattctattttgtttttatgtatgtgatatctgtttctgttgagatttgggagttattgaaatctctgtaatgtgtatggtagaaaatttcttgtgaccttaaaattttaccagttatttatagaaagagaaaatgggaaatgttttataggctttttactagcagtatcagtgaacacttgaactccattattcatgaaaataacacgttaggattggaatacgtctattcaaaagtgaaagaatataaagtgtttagttttttgtttttactctaaagatagaattggggagtaaacttcagtttttgtttagagtggatctgaatatttaaaatcctataataatttttgtgaatcttcattctttgagtatgggattgtaaaagacaaactatatcctacagtagtatcatcatcagtatcaaaggtctcctttttttacttggaaaagtaattcacaaacattataaaaatactattcaaacagtaccaaagagtagattagcaaaagtaagtttttttccctagcctgtctcatttttccatcattacacagactacttggaatgtcttagatgtccttgtattgtaattttctgtgtaggtagaaataaatgtagctttcttattttacacaaataggaacttactgtatatactgttctgcactttgcttttattaaagatcttttgataaagaactatattgataagcagtaaagatgtcatgctcctggcccaataaaatattgttagcattgtcataaatatgtcttttccaccggcgatggttgggtagttaagtgaataagctagaaagacatgtttataaagctatttgatgacaatctcaggcatatttatacagagatgttcttaactgtttgctacaaaaacatgaagatcaaaaactttcttgaagcttacgcttaacttatttggggaaacaaaactccagcccttcttgtgtatgttctgatatccctttgctctacttttagaggagtgaaccctaataggatggtagcagcattcttgtttctttatatctctcctctgtgattgtataccgttttttcaacttaaagcaacttcagctggaaatatgtagaggttggccaaggtgaactaaatagtctgtaacattgattagatatcaagcaacgtgagcatggtagcaaaagcactaactgaagccagtgatttaatttttaattctgattctgataattgatgatatagctcctcgaactttgttttttgttaaaacttggaaaatatatttgtattattttggacaaattatttgaactctctggaccttgattcaatttatatataaggtaaaggcattatactggattatcctgcaatttctttgagttgttagaatataatgtagcttattaatagcaatattagcagtgtagtagattctgactgcaaaacctagccttttctattgattcattagtggtagtaaaggtattatctgatttatcctttttaataggcagtgctttgatcaagtgggaaatagtaatggacaaataaaatcaatgatcattatctaacttgatgcctgcttttcaaaaagtgagcaaatttcacatcttcacccttagacattaattcatggcacctactataagtactcatcctcttcttacctatcttcttttctataggagataaagtggttattcagaccccccaatacaattttttggtttgttttcacagctacttaaaagattaaaataactattcttgcagatatttctaggaatatttttagaaataatatgaaatacagggataataggccaattatgatctttatttttaatttctacagaaaagtactagagaatatatctatagaaacttctttcagataaccctaaagatgatactagaatgtttataaaattattgagaagattatttgtgttataaagcttatttgtaccatagtaaaggatgtttttgttcctcttcattctgggctaatctgtcaatactgaagtccagtcttttcccccttttcttaccagctcaaccttgattcctgtgacccattctttctgatctttcgtagttcatagtcaccaggcatgagtaccttggatagccctctgaagtctgttaccacccagatttccaactcgggttaattggtactaattctattagctggtataaataatccaaaatctgtgcagactctgggagcaaaatgttctactcagtttggaatactgtgccttaaaatatatttcattgtaacagcaccttgtatatatagttggccaaggacagagttgttacaagttacgtggaactttcatagcaaatcttgacagtaaataccttgttcttgtattaggtctatatcctgaattgacctttagcaagaatctttagatctgctggagggctgggatggcttttggacttcagtgaaaaagaatttctgctactcattgttgataacgcttcagtactgtataaatgtttatccttttccacgtaatttgttttctatgatatgagaacttttattataatttgcctcagtcttgatagaatcttaacaaaaataaaatctgtggtcgtctgaggtattctccatgctataacccagtttagctgatgcatttggagcttgggtgctgaaattaaatataacctatttgagttaaggatttattactagtgctccagtggtcacaggaacaataaaaaaggaacaacgatagaaatacgtgatctaggaaagaaggcaactgaaaaacctgaaagaaaaaaaatgaaagattaaaagtatacgatattctattttgatttagcaattacttgttttctagtgttctgtcaatttttggtgacttttataattacattaaaactaagatgctgaattaaaataaagtttctcttttattcaagcaccaacattcacttatattacctatatattgcatcaagttttgagccttcaatcccagaagcattgattgactgtctactgtggttcaagtactgtgcataaagatgaataaatattctgtccttggcttagtctaatagtaaaggcactcttagaggagggacaaatattttgcctagataagatttgagagatagtaagtgcggaatttctcttcataaaaatggtagtgttagttgtttagagggagaagtccagctatgtaaggtgaaagtggggcttataaaagtggatctattgtttaaaaattagtactttgctcctaaaatttttacctaagtgttacatccaacaacagatgaaagtaattcgacagtagcatctgctttattcatttcatatttccagtgcctgacatattgcttggcatatagtagtttagtggatgtgtttgatgaatgaatgagtaaaaattatttttcatgttaaaataaaactttgaattacatgagtatacaacttttgttccttcaaaatacccatatttgtcaaatatgaccgaattacgactttttttctgttccactagtttctaccttagaagtgacattctgcgtaaggtagtgggggattactaagtgatcatgacttttctgaagcaggtcttaaataattatctaagccttcagtcatttcaaaatctctgtagtgtaaatgatcacaggctctaaatcagattgttgtacaaggtaattgacatgtcctgaaatgtaacattcaacattaacagtagaaacaggcctcatttctccctctggcttttattgatcaattttgatattgtccagatcccatgttaaaccacttgatttagagatgacttaattctaaacttcctccatttttaattaataagattcaaggttgcagtaaattgttaatcttatttggaattatattagaaagtcgatatcggaattggaaccacacatctttttcttattgtgggtacatgggat

SEQ ID NO: 108882 - DNA, 818 bp, Homo sapiens
  Payload ID: 1390
  Gene Symbol: ACTR3
  Gene Name: ARP3 actin-related protein 3 homolog (yeast)
  ENST ID: ENST00000446821
  CDS Start-End: 183-308
gtgatagccgccgaccgagcctgctgctttcttgctactgcttcggcttcccggctaccccccggacggtgaaggcggcccagctgtggatggtcagatagcccttgtctcccgccgccaatctctggcccctagcagcacggagcagacggcggcagcagcagcagcaggcgaggaggaagatggcgggacggctgccggcctgtgtggtggactgtggcacggggtatacaaaactaggatatgctggaaatacagaaccacagtttatcatcccttccttggccaatccgccatggtatagttgaagattgggacttaatggaaaggtttatggagcaagtgatctttaaatatttaagggcagaacctgaagaccattattttcttttgactgaacctccattgaatactccagaaaacagggaatatactgctgaaataatgtttgagtccttcaatgttccaggcttgtacattgctgtgcaggctgttcttgccttagctgcatcttggacctcaagacaagtaggagaacggacgttgaccggtacggtaatagacagtggagatggtgtcactcatgtcattcctgtggctgaagggtatgtgattggcagctgtattaaacacattccaatcgcaggacgagatataacatattttattcagcaactgctgagagaccgagaagtaggaatccctccagaacaatccttggaaactgctaaggcagtaaaggagcgctatagttatgtctgcccagatttagtaaaagaatttaacaagtatgatacagatgggtcaaaatggattaa

SEQ ID NO: 108883 - DNA, 566 bp, Homo sapiens
  Payload ID: 1390
  Gene Symbol: ACTR3
  Gene Name: ARP3 actin-related protein 3 homolog (yeast)
  ENST ID: ENST00000443297
  CDS Start-End: 315-566
agggcggggactgcctgcctgcctgggttgcggaagtgatagccgccgaccgagcctgctgctttcttgctactgcttcggcttcccggctaccccccggacggtgaaggcggcccagctgtggatggtcagatagcccttgtctcccgccgccaatctctggcccctagcagcacggagcagacggcggcagcagcagcagcaggcgaggaggaagatggcgggacggctgccggcctgtgtggtggactgtggcacggggtattgctattaaggagtcagcaaaagtgggtgatcaagctcaaaggagggtgatgaaaggtgttgatgacctagacttcttcattggtgatgaagcaatagaaaaacctacatatgcaacaaagtggccaatccgccatggtatagttgaagattgggacttaatggaaaggtttatggagcaagtgatctttaaatatttaagggcagaacctgaagaccattattttcttttgactgaacctccattgaatactccagaaaacagggaatatactgctgaaataatgtttgagtccttcaat

SEQ ID NO: 108884 - DNA, 676 bp, Homo sapiens
  Payload ID: 1390
  Gene Symbol: ACTR3
  Gene Name: ARP3 actin-related protein 3 homolog (yeast)
  ENST ID: ENST00000415792
  CDS Start-End: 188-292
cggaagtgatagccgccgaccgagcctgctgctttcttgctactgcttcggcttcccggctaccccccggacggtgaaggcggcccagctgtggatggtcagatagcccttgtctcccgccgccaatctctggcccctagcagcacggagcagacggcggcagcagcagcagcaggcgaggaggaagatggcgggacggctgccggcctgtgtggtggactgtggcacggggtatacaaaactaggatatgctggaaatacagaaccacagtttatcatcccttcctactgaacctccattgaatactccagaaaacagggaatatactgctgaaataatgtttgagtccttcaatgttccaggcttgtacattgctgtgcaggctgttcttgccttagctgcatcttggacctcaagacaagtaggagaacggacgttgaccggtacggtaatagacagtggagatggtgtcactcatgtcattcctgtggctgaagggtatgtgattggcagctgtattaaacacattccaatcgcaggacgagatataacatattttattcagcaactgctgagagaccgagaagtaggaatccctccagaacaatccttggaaactgctaaggcagtaaaggtaaaaagtgtgataggagtgtaatttagttaaaaattaaa

SEQ ID NO: 108885 - DNA, 1530 bp, Homo sapiens
  Payload ID: 1390
  Gene Symbol: ACTR3
  Gene Name: ARP3 actin-related protein 3 homolog (yeast)
  ENST ID: ENST00000535589
  CDS Start-End: 291-1394
actacggtgggcagcgccgcccaaagggcgctggggacggtcgtcttgggggtggtccccgggcccgacccatccggctttcctttccctccgcgcccgtttttgccagtcggtttggggacccaggggccgagctcggggactggcctggcaggggagctagaaaagagaagcgctcctggtatacaaaactaggatatgctggaaatacagaaccacagtttatcatcccttcctgtattgctattaaggagtcagcaaaagtgggtgatcaagctcaaaggagggtgatgaaaggtgttgatgacctagacttcttcattggtgatgaagcaatagaaaaacctacatatgcaacaaagtggccaatccgccatggtatagttgaagattgggacttaatggaaaggtttatggagcaagtgatctttaaatatttaagggcagaacctgaagaccattattttcttttgactgaacctccattgaatactccagaaaacagggaatatactgctgaaataatgtttgagtccttcaatgttccaggcttgtacattgctgtgcaggctgttcttgccttagctgcatcttggacctcaagacaagtaggagaacggacgttgaccggtacggtaatagacagtggagatggtgtcactcatgtcattcctgtggctgaagggtatgtgattggcagctgtattaaacacattccaatcgcaggacgagatataacatattttattcagcaactgctgagagaccgagaagtaggaatccctccagaacaatccttggaaactgctaaggcagtaaaggagcgctatagttatgtctgcccagatttagtaaaagaatttaacaagtatgatacagatgggtcaaaatggattaaacagtatactggaatcaatgctatctcaaagaaagagttttctatcgatgttggttatgagagatttttgggacctgaaatcttttttcatccagagtttgctaatccagactttacacaacctatctcagaagttgtagatgaagtaattcagaattgtcctattgatgtcagacgtcctctctacaagaatattgtcctctctggaggttcaaccatgttcagggactttggacgtcgcttgcaaagagatttgaaaagaactgtagatgcccggctgaaattaagtgaggaattgagtggtggtagattgaagccaaaacctattgatgtacaagtcattacacaccacatgcagcgatatgcagtttggtttggaggatcaatgctggcttccacgcctgagttctaccaagtatgccacaccaaaaaggattatgaagaaattggacctagcatttgtcgtcacaatccagtgtttggagtcatgtcgtaaaattggcttcatagttattggggttagggaggtggggaagagataatctttctgattacctgttttgtctggatggctggttttgaggttttaaacctgacttgaaatagtaacaccaaacatgattatacaggaa

SEQ ID NO: 108886 - DNA, 2216 bp, Homo sapiens
  Payload ID: 1391
  Gene Symbol: ACTR3B
  Gene Name: ARP3 actin-related protein 3 homolog B (yeast)
  Uniprot ID: Q9P1U1
  ENST ID: ENST00000256001
  CDS Start-End: 135-1391
agcatccgggctcccggcagcggcgctgcggcggctcgcgggagacgctgcgcgcggggctagcgggcggcggagcggacggcgacggggcgctctcgggctgccggcggggccgagcgccgcgcgtcccgagcatggcaggctccctgcctccctgcgtggtggactgtggcaccgggtataccaagcttggctacgcaggcaacactgagccccagttcattattccttcatgtattgccatcagagagtcagcaaaggtagttgaccaagctcaaaggagagtgttgaggggagttgatgaccttgactttttcataggagatgaagccatcgataaacctacatatgctacaaagtggccgatacgacatggaatcattgaagactgggatcttatggaaaggttcatggagcaagtggtttttaaatatcttcgagctgaacctgaggaccattattttttaatgacagaacctccactcaatacaccagaaaacagagagtatcttgcagaaattatgtttgaatcatttaacgtaccaggactctacattgcagttcaggcagtgctggccttggcggcatcttggacatctcgacaagtgggtgaacgtacgttaacggggatagtcattgacagcggagatggagtcacccatgttatcccagtggcagaaggttatgtaattggaagctgcatcaaacacatcccgattgcaggtagagatattacgtatttcattcaacagctgctaagggagagggaggtgggaatccctcctgagcagtcactggagaccgcaaaagccattaaggagaaatactgttacatttgccccgatatagtcaaggaatttgccaagtatgatgtggatccccggaagtggatcaaacagtacacgggtatcaatgcgatcaaccagaagaagtttgttatagacgttggttacgaaagattcctgggacctgaaatattctttcacccggagtttgccaacccagactttatggagtccatctcagatgttgttgatgaagtaatacagaactgccccatcgatgtgcggcgcccgctgtataagaatgtcgtactctcaggaggctccaccatgttcagggatttcggacgccgactgcagagggatttgaagagagtggtggatgctaggctgaggctcagcgaggagctcagcggcgggaggatcaagccgaagcctgtggaggtccaggtggtcacgcatcacatgcagcgctacgccgtgtggttcggaggctccatgctggcctcgactcccgagttctttcaggtctgccacaccaagaaggactatgaagagtacgggcccagcatctgccgccacaaccccgtctttggagtcatgtcctagtgtctgcctgaacgcgtcgttcgatggtgtcacgttggggaacaagtgtccttcagaacccagagaaggccgccgttctgtaaatagcgacgtcggtgttgctgcccagcagcgtgcttgcattgccggtgcatgaggcgcggcgcgggcccttcagtaaaagccatttatccgtgtgccgaccgctgtctgccagcctcctccttctcccgccctcctcaccctcgctctccctcctcctcctcctccgagctgctagctgacaaatacaattctgaaggaatccaaatgtgactttgaaaattgttagagaaaacaacattagaaaatggcgcaaaatcgttaggtcccaggagagaatgtgggggcgcaaacccttttcctcccagcctatttttgtaaataaaatgtttaaacttgaaatacaaatcgatgtttatatttcctatcattttgtattttatggtatttggtacaactggctgatactaagcacgaatagatattgatgttatggagtgctgtaatccaaagtttttaattgtgaggcatgttctgatatgtttataggcaaacaaataaaacagcaaacttttttgccacatgtttgctagaaaatgattatactttattggagtgacatgaagtttgaacactaaacagtaatgtatgagaattactacagatacatgtatcttttagttttttttgtttgaactttctggagctgttttatagaagatgatggtttgttgtcggtgagtgttggatgaaatacttccttgcaccattgtaataaaagctgttagaatatttgtaaatatc

SEQ ID NO: 108887 - DNA, 1566 bp, Homo sapiens
  Payload ID: 1391
  Gene Symbol: ACTR3B
  Gene Name: ARP3 actin-related protein 3 homolog B (yeast)
  Uniprot ID: Q9P1U1
  ENST ID: ENST00000377776
  CDS Start-End: 135-1181
agcatccgggctcccggcagcggcgctgcggcggctcgcgggagacgctgcgcgcggggctagcgggcggcggagcggacggcgacggggcgctctcgggctgccggcggggccgagcgccgcgcgtcccgagcatggcaggctccctgcctccctgcgtggtggactgtggcaccgggtataccaagcttggctacgcaggcaacactgagccccagttcattattccttcatgtattgccatcagagagtcagcaaaggtagttgaccaagctcaaaggagagtgttgaggggagttgatgaccttgactttttcataggagatgaagccatcgataaacctacatatgctacaaagtggccgatacgacatggaatcattgaagactgggatcttatggaaaggttcatggagcaagtggtttttaaatatcttcgagctgaacctgaggaccattattttttaatgacagaacctccactcaatacaccagaaaacagagagtatcttgcagaaattatgtttgaatcatttaacgtaccaggactctacattgcagttcaggcagtgctggccttggcggcatcttggacatctcgacaagtgggtgaacgtacgttaacggggatagtcattgacagcggagatggagtcacccatgttatcccagtggcagaaggttatgtaattggaagctgcatcaaacacatcccgattgcaggtagagatattacgtatttcattcaacagctgctaagggagagggaggtgggaatccctcctgagcagtcactggagaccgcaaaagccattaaggagaaatactgttacatttgccccgatatagtcaaggaatttgccaagtatgatgtggatccccggaagtggatcaaacagtacacgggtatcaatgcgatcaaccagaagaagtttgttatagacgttggttacgaaagattcctgggacctgaaatattctttcacccggagtttgccaacccagactttatggagtccatctcagatgttgttgatgaagtaatacagaactgccccatcgatgtgcggcgcccgctgtataagcccgagttctttcaggtctgccacaccaagaaggactatgaagagtacgggcccagcatctgccgccacaaccccgtctttggagtcatgtcctagtgtctgcctgaacgcgtcgttcgatggtgtcacgttggggaacaagtgtccttcagaacccagagaaggccgccgttctgtaaatagcgacgtcggtgttgctgcccagcagcgtgcttgcattgccggtgcatgaggcgcggcgcgggcccttcagtaaaagccatttatccgtgtgccgaccgctgtctgccagcctcctccttctcccgccctcctcaccctcgctctccctcctcctcctcctccgagctgctagctgacaaatacaattctgaaggaatccaaatgtgactttgaaaattgttagagaaaacaacattagaaaatggcgcaaaatcgttaggtcccaggagagaatgtgggggcgcaaacccttttcctc

SEQ ID NO: 108888 - DNA, 1692 bp, Homo sapiens
  Payload ID: 1391
  Gene Symbol: ACTR3B
  Gene Name: ARP3 actin-related protein 3 homolog B (yeast)
  Uniprot ID: Q9P1U1
  ENST ID: ENST00000397282
  CDS Start-End: 304-1296
gggagacgctgcgcgcggggctagcgggcggcggagcggacggcgacggggcgctctcgggctgccggcggggccgagcgccgcgcgtcccgagcatggcaggctccctgcctccctgcgtggtggactgtggcaccgggtattgccatcagagagtcagcaaaggtagttgaccaagctcaaaggagagtgttgaggggagttgatgaccttgactttttcataggagatgaagccatcgataaacctacatatgctacaaagtggccgatacgacatggaatcattgaagactgggatcttatggaaaggttcatggagcaagtggtttttaaatatcttcgagctgaacctgaggaccattattttttaatgacagaacctccactcaatacaccagaaaacagagagtatcttgcagaaattatgtttgaatcatttaacgtaccaggactctacattgcagttcaggcagtgctggccttggcggcatcttggacatctcgacaagtgggtgaacgtacgttaacggggatagtcattgacagcggagatggagtcacccatgttatcccagtggcagaaggttatgtaattggaagctgcatcaaacacatcccgattgcaggtagagatattacgtatttcattcaacagctgctaagggagagggaggtgggaatccctcctgagcagtcactggagaccgcaaaagccattaaggagaaatactgttacatttgccccgatatagtcaaggaatttgccaagtatgatgtggatccccggaagtggatcaaacagtacacgggtatcaatgcgatcaaccagaagaagtttgttatagacgttggttacgaaagattcctgggacctgaaatattctttcacccggagtttgccaacccagactttatggagtccatctcagatgttgttgatgaagtaatacagaactgccccatcgatgtgcggcgcccgctgtataagaatgtcgtactctcaggaggctccaccatgttcagggatttcggacgccgactgcagagggatttgaagagagtggtggatgctaggctgaggctcagcgaggagctcagcggcgggaggatcaagccgaagcctgtggaggtccaggtggtcacgcatcacatgcagcgctacgccgtgtggttcggaggctccatgctggcctcgactcccgagttctttcaggtctgccacaccaagaaggactatgaagagtacgggcccagcatctgccgccacaaccccgtctttggagtcatgtcctagtgtctgcctgaacgcgtcgttcgatggtgtcacgttggggaacaagtgtccttcagaacccagagaaggccgccgttctgtaaatagcgacgtcggtgttgctgcccagcagcgtgcttgcattgccggtgcatgaggcgcggcgcgggcccttcagtaaaagccatttatccgtgtgccgaccgctgtctgccagcctcctccttctcccgccctcctcaccctcgctctccctcctcctcctcctccgagctgctagctgacaaatacaattctgaaggaatccaaatgtgactttgaaaattgttagagaaaacaacattagaaaatggcgcaaaatcgttaggtcccaggagagaatgtgggggcgcaaacccttttcctcccagcctattt

SEQ ID NO: 108889 - DNA, 1218 bp, Homo sapiens
  Payload ID: 1392
  Gene Symbol: ACTR3C
  Gene Name: ARP3 actin-related protein 3 homolog C (yeast)
  Uniprot ID: Q9C0K3
  ENST ID: ENST00000252071
  CDS Start-End: 191-823
gagagattcagctgctttcacaactctggctggattttacctatgtggagagtgtcacccatgttagggagcctctggccaggaggaagctgtggcaagatgtgctgcgtctcctgcttggcattgccatcttgctgccacagaacctccactcaatacaccagaaaacagagagtatcttgcagaaattatgttcgaatcatttaacgttccaggactctacattgcagttcaggcagtgctggccttggcggcatcttggacatctcgacaagtgggtgaacgtacattaacggggatagtcattgacagcggagatggagtcacccatgttatcccagtggcagaaggttatgtaattggaagctgcatcaaacacatcccgattgcaggtagagatattacgtatttcattcaacagctgctaagggagagggaggtgggaatccctcctgagcagtcactggagaccgcaaaagccattaaggagaaatactgttacatttgccccgatatagtcaaggaatttgccaagtatgatgtggatccccagaagtggatcaaacagtacacgggtatcaatgcgatcaaccagaagaagtttgttatagacgttggttacgaaagattcctgggacctgaaatattctttcacccggagtttgccaacccagactctatggagtccatctcagatgttgttgatgaagtaatacagaactgccccatcgatgtgcggcgtccgctgtataagatggaacaaattccactgagctatcctcaaggtcacggattccatcctctgtcacctccatttcattgagatgatatattgagcccatgcgtagccttttatttgagatttccaaggccagcaatgttctcttcctctcccttttctttgtataaaaattcattctcaagaaaaactctcatatcaattgtttacatgtcactatggctaagacactaaaagccctctccctgcaaaactggtggcaaagctctctagagaaccacaaactgttgcatccttactacgtggggcagcagcaagcccaggtgaagatgtgcatgttcttggagaaagtattaataacataccgacacttacatctgggtgaataatttcatcaaatctcttaactcacgcttgcacaaacttcacctggagagagagagggaaagctgtgccagaaataaatggttattgaggtc

SEQ ID NO: 108890 - DNA, 5697 bp, Homo sapiens
  Payload ID: 1392
  Gene Symbol: ACTR3C
  Gene Name: ARP3 actin-related protein 3 homolog C (yeast)
  ENST ID: ENST00000478393
  CDS Start-End: 1-627
agtccccgcttacctgaggggtggagccggcagcctgcggagccactggccaagctgggaagtccggcgcaactccgcaccgcagagccggcgcctcctcggcagacagaacctccactcaatacaccagaaaacagagagtatcttgcagaaggttatgtaattggaagctgcatcaaacacatcccgattgcaggtagagatattacgtatttcattcaacagctgctaagggagagggaggtgggaatccctcctgagcagtcactggagaccgcaaaagccattaaggagaaatactgttacatttgccccgatatagtcaaggaatttgccaagtatgatgtggatccccagaagtggatcaaacagtacacgggtatcaatgcgatcaaccagaagaagtttgttatagacgttggttacgaaagattcctgggacctgaaatattctttcacccggagtttgccaacccagactctatggagtccatctcagatgttgttgatgaagtaatacagaactgccccatcgatgtgcggcgtccgctgtataagatggaacaaattccactgagctatcctcaaggtcacggattccatcctctgtcacctccatttcattgagatgatatattgagcccatgcgtagccttttatttgaggtattctcatgattttcatttttaattctaggctctacttttgctgaaattttctatttttttcatttgtttcaagagaacccataattgcttattgaagcatttttatgacaattattctaaaattctttgcaggtaatcccagcacctgagtcatctttatgttggagtctcaatcgactcttcattcatttgtgatttttctggttcttgctatgataagtggttttttattgtattctggacattttgataagattgtgaatcctatttactttttttttttttgagacggagtctagctctatctccaggctggagtgcagtggtgcgatctcagctcactgcaacctctgcctcctgggttcaatcgattctcctgccacagcctcctgagtagctgggattgcaaacatgcgccaccacacccagctcatttttgtatttttagtagagatggggtttcaccatgttggccaggatgttctcgatctcctgatctcgtgatctgcccacctcggcctcccaaagtgttgggattacaggtgcgagccaccgcacccggcctactcttttttttttttaatagccagcttctctgttgagatgtagcaccagggctgtgtatctgttcagtctcctttgggcccagggccagtacgggagggaagggagagcagaacgcggaccactctaccttgagttgcctcattctgtatcatcgatgcctggtggaagtgggcttactctgcatcctgctgacaccgcagagaaactggagcccatggcctgcttccctgggacaggagctagggtggaaaatcagcttccagcttggccctgctgaaaccctggcaggggcaggttccattgtagtttggctggaatcgagcaggtattgccaacagcatcgtctattgttggagtacctttgccccagatcctgagatggggtaatttttaaagaaaagaggttcaattggctcacaagcctgaaggctgtaccagcatggtgcccagcttctggggagggctcagggagctttgactcacagaggaaggtgaagtgggagcaggcacttcacatggcaaaagcaagaacaaaagagtgggaggcagttgccacacacttctacatgaccagatctcttgtgaactcagagctcactcatcacccaagagatggcccacgccatccatgaggaatgcactcccatgatataaacacccccaccaggccccgcctccaagagtggagattacagttcaacacgagatttggtgggggcatatcaaaactacattaaccttaaattatgaagacggtaaactaaataatctgctttctttcctttcctgttttgtgtctgtttttcagatttccaaggccagcaatgttctcttcctctcccttttctttgtataaaaattcattctcaagaaaaactctcatatcaattgtttacatgtcactatggctaagacactaaaagccctctccctgcaaaactggtggcaaagctctctagagaaccacaaactgttgcatccttactacgtggggcagcagcaagcccaggtgaagatgtgcatgttcttggagaaagtattaataacataccgacacttacatctgggtgaataatttcatcaaatctcttaactcacgcttgcacaaacttcacctggagagagagagggaaagctgtgccagaaataaatggttattgaggtcactgtttgtttgtttttctcaggagtggaaggagattaaccagggtggcaataaacaaaattacttgctgttttaaaacttaatgacaaccctataggttattagcaatgccaaagttgcagggtgcggtggctcacgcctgtaatcccagcactttgggaggccgaggcgggcagatcatctgaggtcgggagttcgagaccagcctgaccaacatggagaaaccccgtctttactaaaaatacaaaaaaaattaaccgggtgtggtggtgcatacctgtaaccccagctactcaagaagtggaggcgggagaattgcttgaacacaggaggcggaggttgcgatgagccgagatcacgccattgtactccagcctgggcagcaagagtgaaactcagtctcaaaaaatacaaaacaaaacaaaacaaaaagccaaagtggaaaagcaaaaattttgtggtatttgcattcaattattatgctttaattcaaccattcacaatttctagggaacattaactttattgcaatcccaggtaaatttaggataatttaacaataatcgttggtgttctactcatctacttgtctttaaaatccacatatattttttaaaagatgacatcctttaaaaatattatattcagtgaattttcaatattattttaaatattatcatggacagttgttattggaaatgacagttcaccattgcaaatcaatgcagtggctacaagtcccccgtgtcacacaaaaatagacggggtagctctgacagcatgcatccttatgccctgttctattaatgatgcactgcaccccatcagggtctgcagctgtatcattactcacagagacggttctgcctttggctttccctggtcctccatggctaggaacatcatttaacagggttttgtagaattcactgggtggttagtcttagaaaacccaaggcagaaacacacagccaactatcccccaagtgcttgtgcttgaactttcagaacataagaaaattgtgttaagctggatctgcaagtacaaatggagagtgaaatgggttctatagaatccaaatgacacaatctttcctcctgctaagaattactggctattgaaccaattcctgcctattaactgtgaggtgaagtccaagatccacagtcaagcattcaaagatccaacctgatttttctctgcataactgttttactaggagtaagactgacttgcctggtttaccaagacaggctgtgagaattcttcccacttacctttactgagtcaatgtggacagtttgaaataacttgaaccattcttcttacatttttaaatcctacacaagcctcaaaacaaaatccaagtcacttttcctctgtgggatcttcactgagccccccagcaggcattcctcttgctatctcctgtgcgaatagctctgaaggtctgtattgcaaatatgacagtcaacacaccggctaaggtagaacaaaaagtggcattattaagctgaaaaaagcccggaccaaaatgaaagattcttattgtgggagcaattgctcacactcaccaatagctgcttgtttccttcttgggcacacagaaattacaattcccaactttcctgcagttggatagagccatgtgagtaattccagcctggggactctgactagagatgaaaatcccctccatggtggagcaaaatcccctgagtggccctccggccttctgttctccagctgtgctaacctggaagccacacattgagatgacagagcagcaaagtggagacaggccatgtctctgagtcaccatgtgacccacaggagattttgagtaaattaaaatacaaatctttgtcataataaaccacagatatttcagcaatgatttgcaaccatagcgtaagataacctatcatggctaatgctcctaggttctcaacctgtatccaccagtaactaggtagcttgggcaaattatcttctatgcaacctctggttgataatgaattccttttataagtaagagaatgagctggaacccaaatgtgtacagaggaaatctgaatgaagtgggaagggtaagatgcagagtgagtggagacttcactcattgttgaaagagggcagttgctactcggttattactgatgcttacatgaagaaatccagttttaatataaccacatcttgccatttctcaagggaagtcatgtactatctgtgtgtctgtccttcatatagctccatcaatattctcctcttaaatcttggagactgtgctggatgttttccaaatgtctctcctgatccagcctgcagtcttctctaccctggtttgggtatctggagccagacctgtatgtactgcatcagcaggttctcttcccttcgctttctgcatggtttccaccaccatgaggtcctggtgggagatcagaggctgggaagagcagaggctgggaagagcagaggcaggagaggcactgcataactcctctcaggccgtcctctctctctggctctctgtaggtttgggcaactgctccttccatccatatattcaggctgaggtgtggaaaaggctcccaaatggcattagctccagagtgatgcaccttccatatccttttattttcattatttctcctcctttgaagaagttgagtatttttgcaagaacattgactaacaggaactaatcaattattcttaaatttaaaaaattgaatgaatcaaatgttcaacaaaggatacacacacagactgaatgacaactaagttattttacagttccacaaacctagagagatctatcaatgaatggggtattacattctaatatttctaagactatattgaatattgaatattcaatattctaagactatattgaatattcaatattctaagactatattgaatattcaatattctaagactatattgaatattcaatattctaagactatattgaatattcaatattctaagactatattgaatattcaatattctaagactatattgaatattcaatattctaagactatattgaatattcaatattctaagactatattgaatattcaatattctaagactatattgaatattcaatattctaagactatactgaatactgaatgactacatcacctacaagaatacaatgagagtactaaactaacactcagtactaaacatttgtcctacactcagaggtaggcaccaggttctggtgtcaatgtatgatatgcctgtctctaaataaacattttatcaga

SEQ ID NO: 108891 - DNA, 502 bp, Homo sapiens
  Payload ID: 1392
  Gene Symbol: ACTR3C
  Gene Name: ARP3 actin-related protein 3 homolog C (yeast)
  ENST ID: ENST00000477367
  CDS Start-End: 350-502
agcgaaggggccgtgaggtcaacagtcggtaatcgtttatcggtgcggccttagagaaaggacctccaagcccttgttcaatacatgttgggtggtggtcacaggtgccagtctccggacggatggcggcctagatttcctcccggactcggtggcacccaaggccccctgcacgccggcgctgtgcgtgccaggctgaccgcccgagtgcgacccggacctcgtccgcacgtgcagatggaaggggccacaaagacgataaggatccaggtctcccgcgtggaaggctcatctatcgacagaacctccactcaatacaccagaaaacagagagtatcttgcagaaattatgttcgaatcatttaacgttccaggactctacattgcagttcaggcagtgctggccttggcggcatcttggacatctcgacaagtgggtgaacgtacattaacggggatagtcattgacagcggagatggagtcacccatgttatcccagtg

SEQ ID NO: 108892 - DNA, 678 bp, Homo sapiens
  Payload ID: 1392
  Gene Symbol: ACTR3C
  Gene Name: ARP3 actin-related protein 3 homolog C (yeast)
  ENST ID: ENST00000477871
  CDS Start-End: 12-678
cagagggagagatgggtaagggctggctgttccggaagattctggcctctcccagtgtgtttcggcgcgagggcaccgctggcccagcaggtggccccccggggccggcacgggccccgacagccgcccccttccctgaacctcggcggcccagtccccgcttacctgaggggtggagccggcagcctgcggagccactggccaagctgggaagtccggcgcaactccgcaccgcagagccggcgcctcctcggcagacagaacctccactcaatacaccagaaaacagagagtatcttgcagaaattatgttcgaatcatttaacgttccaggactctacattgcagttcaggcagtgctggccttggcggcatcttggacatctcgacaagtgggtgaacgtacattaacggggatagtcattgacagcggagatggagtcacccatgttatcccagtggcagaaggttatgtaattggaagctgcatcaaacacatcccgattgcaggtagagatattacgtatttcattcaacagctgctaagggagagggaggtgggaatccctcctgagcagtcactggagaccgcaaaagccattaaggagaaatactgttacatttgccccgatatagtcaaggaatttgccaagtatgatgtggatccccagaagtgga

SEQ ID NO: 108893 - DNA, 570 bp, Homo sapiens
  Payload ID: 1392
  Gene Symbol: ACTR3C
  Gene Name: ARP3 actin-related protein 3 homolog C (yeast)
  ENST ID: ENST00000539352
  CDS Start-End: 1-570
atgttcgaatcatttaacgttccaggactctacattgcagttcaggcagtgctggccttggcggcatcttggacatctcgacaagtgggtgaacgtacattaacggggatagtcattgacagcggagatggagtcacccatgttatcccagtggcagaaggttatgtaattggaagctgcatcaaacacatcccgattgcaggtagagatattacgtatttcattcaacagctgctaagggagagggaggtgggaatccctcctgagcagtcactggagaccgcaaaagccattaaggagaaatactgttacatttgccccgatatagtcaaggaatttgccaagtatgatgtggatccccagaagtggatcaaacagtacacgggtatcaatgcgatcaaccagaagaagtttgttatagacgttggttacgaaagattcctgggacctgaaatattctttcacccggagtttgccaacccagactctatggagtccatctcagatgttgttgatgaagtaatacagaactgccccatcgatgtgcggcgtccgctgtataaggtatga

SEQ ID NO: 108894 - DNA, 5142 bp, Homo sapiens
  Payload ID: 1392
  Gene Symbol: ACTR3C
  Gene Name: ARP3 actin-related protein 3 homolog C (yeast)
  ENST ID: ENST00000613959
  CDS Start-End: 1-75
tttcagatggaacaaattccactgagctatcctcaaggtcacggattccatcctctgtcacctccatttcattgagatgatatattgagcccatgcgtagccttttatttgaggtattctcatgattttcatttttaattctaggctctacttttgctgaaattttctatttttttcatttgtttcaagagaacccataattgcttattgaagcatttttatgacaattattctaaaattctttgcaggtaatcccagcacctgagtcatctttatgttggagtctcaatcgactcttcattcatttgtgatttttctggttcttgctatgataagtggttttttattgtattctggacattttgataagattgtgaatcctatttactttttttttttttgagacggagtctagctctatctccaggctggagtgcagtggtgcgatctcagctcactgcaacctctgcctcctgggttcaatcgattctcctgccacagcctcctgagtagctgggattgcaaacatgcgccaccacacccagctcatttttgtatttttagtagagatggggtttcaccatgttggccaggatgttctcgatctcctgatctcgtgatctgcccacctcggcctcccaaagtgttgggattacaggtgcgagccaccgcacccggcctactcttttttttttttaatagccagcttctctgttgagatgtagcaccagggctgtgtatctgttcagtctcctttgggcccagggccagtacgggagggaagggagagcagaacgcggaccactctaccttgagttgcctcattctgtatcatcgatgcctggtggaagtgggcttactctgcatcctgctgacaccgcagagaaactggagcccatggcctgcttccctgggacaggagctagggtggaaaatcagcttccagcttggccctgctgaaaccctggcaggggcaggttccattgtagtttggctggaatcgagcaggtattgccaacagcatcgtctattgttggagtacctttgccccagatcctgagatggggtaatttttaaagaaaagaggttcaattggctcacaagcctgaaggctgtaccagcatggtgcccagcttctggggagggctcagggagctttgactcacagaggaaggtgaagtgggagcaggcacttcacatggcaaaagcaagaacaaaagagtgggaggcagttgccacacacttctacatgaccagatctcttgtgaactcagagctcactcatcacccaagagatggcccacgccatccatgaggaatgcactcccatgatataaacacccccaccaggccccgcctccaagagtggagattacagttcaacacgagatttggtgggggcatatcaaaactacattaaccttaaattatgaagacggtaaactaaataatctgctttctttcctttcctgttttgtgtctgtttttcagatttccaaggccagcaatgttctcttcctctcccttttctttgtataaaaattcattctcaagaaaaactctcatatcaattgtttacatgtcactatggctaagacactaaaagccctctccctgcaaaactggtggcaaagctctctagagaaccacaaactgttgcatccttactacgtggggcagcagcaagcccaggtgaagatgtgcatgttcttggagaaagtattaataacataccgacacttacatctgggtgaataatttcatcaaatctcttaactcacgcttgcacaaacttcacctggagagagagagggaaagctgtgccagaaataaatggttattgaggtcactgtttgtttgtttttctcaggagtggaaggagattaaccagggtggcaataaacaaaattacttgctgttttaaaacttaatgacaaccctataggttattagcaatgccaaagttgcagggtgcggtggctcacgcctgtaatcccagcactttgggaggccgaggcgggcagatcatctgaggtcgggagttcgagaccagcctgaccaacatggagaaaccccgtctttactaaaaatacaaaaaaaattaaccgggtgtggtggtgcatacctgtaaccccagctactcaagaagtggaggcgggagaattgcttgaacacaggaggcggaggttgcgatgagccgagatcacgccattgtactccagcctgggcagcaagagtgaaactcagtctcaaaaaatacaaaacaaaacaaaacaaaaagccaaagtggaaaagcaaaaattttgtggtatttgcattcaattattatgctttaattcaaccattcacaatttctagggaacattaactttattgcaatcccaggtaaatttaggataatttaacaataatcgttggtgttctactcatctacttgtctttaaaatccacatatattttttaaaagatgacatcctttaaaaatattatattcagtgaattttcaatattattttaaatattatcatggacagttgttattggaaatgacagttcaccattgcaaatcaatgcagtggctacaagtcccccgtgtcacacaaaaatagacggggtagctctgacagcatgcatccttatgccctgttctattaatgatgcactgcaccccatcagggtctgcagctgtatcattactcacagagacggttctgcctttggctttccctggtcctccatggctaggaacatcatttaacagggttttgtagaattcactgggtggttagtcttagaaaacccaaggcagaaacacacagccaactatcccccaagtgcttgtgcttgaactttcagaacataagaaaattgtgttaagctggatctgcaagtacaaatggagagtgaaatgggttctatagaatccaaatgacacaatctttcctcctgctaagaattactggctattgaaccaattcctgcctattaactgtgaggtgaagtccaagatccacagtcaagcattcaaagatccaacctgatttttctctgcataactgttttactaggagtaagactgacttgcctggtttaccaagacaggctgtgagaattcttcccacttacctttactgagtcaatgtggacagtttgaaataacttgaaccattcttcttacatttttaaatcctacacaagcctcaaaacaaaatccaagtcacttttcctctgtgggatcttcactgagccccccagcaggcattcctcttgctatctcctgtgcgaatagctctgaaggtctgtattgcaaatatgacagtcaacacaccggctaaggtagaacaaaaagtggcattattaagctgaaaaaagcccggaccaaaatgaaagattcttattgtgggagcaattgctcacactcaccaatagctgcttgtttccttcttgggcacacagaaattacaattcccaactttcctgcagttggatagagccatgtgagtaattccagcctggggactctgactagagatgaaaatcccctccatggtggagcaaaatcccctgagtggccctccggccttctgttctccagctgtgctaacctggaagccacacattgagatgacagagcagcaaagtggagacaggccatgtctctgagtcaccatgtgacccacaggagattttgagtaaattaaaatacaaatctttgtcataataaaccacagatatttcagcaatgatttgcaaccatagcgtaagataacctatcatggctaatgctcctaggttctcaacctgtatccaccagtaactaggtagcttgggcaaattatcttctatgcaacctctggttgataatgaattccttttataagtaagagaatgagctggaacccaaatgtgtacagaggaaatctgaatgaagtgggaagggtaagatgcagagtgagtggagacttcactcattgttgaaagagggcagttgctactcggttattactgatgcttacatgaagaaatccagttttaatataaccacatcttgccatttctcaagggaagtcatgtactatctgtgtgtctgtccttcatatagctccatcaatattctcctcttaaatcttggagactgtgctggatgttttccaaatgtctctcctgatccagcctgcagtcttctctaccctggtttgggtatctggagccagacctgtatgtactgcatcagcaggttctcttcccttcgctttctgcatggtttccaccaccatgaggtcctggtgggagatcagaggctgggaagagcagaggctgggaagagcagaggcaggagaggcactgcataactcctctcaggccgtcctctctctctggctctctgtaggtttgggcaactgctccttccatccatatattcaggctgaggtgtggaaaaggctcccaaatggcattagctccagagtgatgcaccttccatatccttttattttcattatttctcctcctttgaagaagttgagtatttttgcaagaacattgactaacaggaactaatcaattattcttaaatttaaaaaattgaatgaatcaaatgttcaacaaaggatacacacacagactgaatgacaactaagttattttacagttccacaaacctagagagatctatcaatgaatggggtattacattctaatatttctaagactatattgaatattgaatattcaatattctaagactatattgaatattcaatattctaagactatattgaatattcaatattctaagactatattgaatattcaatattctaagactatattgaatattcaatattctaagactatattgaatattcaatattctaagactatattgaatattcaatattctaagactatattgaatattcaatattctaagactatattgaatattcaatattctaagactatattgaatattcaatattctaagactatactgaatactgaatgactacatcacctacaagaatacaatgagagtactaaactaacactcagtactaaacatttgtcctacactcagaggtaggcaccaggttctggtgtcaatgtatgatatgcctgtctctaaataaacattttatc

SEQ ID NO: 108895 - DNA, 2565 bp, Homo sapiens
  Payload ID: 1393
  Gene Symbol: ACTR5
  Gene Name: ARP5 actin-related protein 5 homolog (yeast)
  Uniprot ID: Q9H9F9
  ENST ID: ENST00000243903
  CDS Start-End: 38-1861
actgcgccgaggggcggggctggacgcgcgctccaagatggcggcgaacgtgttcccgttccgcgacgcccgtgccgcaccggacccagtgctggaggccggcccggtggcacacgggccactgccggtaccgctggtgctggacaacgggtcgttccaagtccgcgctggctgggcgtgtcccgggcaggacccaggtcccgagccgcgcctgcagttccgcgcggtgtgcgcccgcggtcgtggcggggcacggggcgcgtcgggcccgcaggtggggaacgctctgggcagcctggagccactgcgctggatgctgcgctcgcccttcgaccgcaacgtgccggtcaacctggagcttcaggagttgctgctggactacagcttccagcacctgggtgtctcctcacagggctgtgttgatcatcccatagttttgacagaagctgtgtgcaacccactgtattcacggcaaatgatgtctgagcttctttttgagtgctacgggattcccaaggttgcctatggaatagacagcctcttcagcttctaccacaataagccaaagaactcgatgtgcagtgggctaatcatttcatctggataccagtgtacgcatgttttacccatcttagaagggagattagatgctaaaaactgcaagcgcatcaatcttggaggaagccaagcagctggttacctccagcgtctcctccagctgaagtaccctgggcacctggcagccatcaccctcagccgcatggaggagattctgcatgagcacagctacatcgctgaggattatgtggaagaattacacaaatggcggtgtcctgattattatgagaataatgtccacaagatgcagctcccattttccagcaagctcctgggcagcactctgacctctgaggagaaacaagaaaggcggcagcagcaattgcggcggctgcaggagctcaatgcccggcggcgggaggagaagctgcagctggatcaggagcgtctggaccgactgctatatgtgcaggaacttctagaggatggccagatggatcagtttcacaaagctctgatagagctgaatatggactccccagaagagctgcagtcctacatccagaagctcagtatagcagtggagcaggctaagcagaaaatcctccaagcggaagtcaacctcgaggtggatgtggtagacagcaagccagagacccctgacctggagcagctggagccgtctttggaagatgtggaaagcatgaatgattttgatcccttgttttcagaggaaacacctggagtggagaagccggtcaccactgttcagcccgtgtttaacttggcagcatatcatcagctatttgttgggacagaaagaattcgagctccagagattattttccagccatctctcataggagaagaacaggctgggattgcagagactcttcagtacattctggacaggtacccaaaggacattcaggaaatgctggttcagaacgttttcctcactggcggcaacacgatgtatcctggcatgaaagccagaatggagaaggaactgttggagatgagacccttccggtcttcttttcaggttcaacttgcctcgaaccctgtgctggatgcctggtacggtgctcgtgactgggccttgaaccacctagatgataatgaagtttggatcaccaggaaagagtatgaagaaaagggaggagagtacctcaaggagcactgtgcttccaacatctatgtccccatccgcctgccgaagcaggcctcccgctcctcagatgcccaggcatccagcaagggctccgctgctggtggaggtggtgctggtgagcaggcatagcagaggccctccagagagactgccctgcacgccatgccttgggccacgttggcagtgtgacaggactgtgattgtgctagatgtacctgcccaagtctgctggtcacatttggcagcaaaatggatttctcctggggagaacaaagttaagggacactgagacctgcccttcagaattcggttcacttgggggcttctgtggtagagactaactggccttctgatgtctttgttcaactgtggccagctgtggcatcagcttcctggagcagtaaatgaagacagagtggaggacacaaatgtacaaaatgcacaagactgatttcttaccacattttagtctttcttgttttaaaaaaaattctttaaaatttatcttgtccgtgtagatactttattcttctggatgtattcagaaattgcatgaatgcccagtgaggggaggtctttcatgcatataaaaaggtaatgtttattgccgggcacagtggcacgtgcctgttaaggcccagctttgtgggaggctaaggcaggaggatcgctggagcttaggagttcgaggctatcgtgtgctgtgatcgcacctgtgaataaccactgcactccagcctgggcaacataggaagacattgtctctaaaaagatacatttttcataaaaggtaatgtttattcaataaaagcagttgcctcaggaaccggaaa

SEQ ID NO: 108896 - DNA, 2464 bp, Homo sapiens
  Payload ID: 1394
  Gene Symbol: ACTR6
  Gene Name: ARP6 actin-related protein 6 homolog (yeast)
  Uniprot ID: Q9GZN1
  ENST ID: ENST00000188312
  CDS Start-End: 766-1956
ctcgctctgtcgcccaggctggagtgtagtggagccatctcggctcactgcaacctccgcctccccggttcaagcaattctcccgcctcagcctcccgagtacttgggattacaggcgcccgccacctcgcccggctactttttgtatttttaatagagacggggtttcgccgtgttggtcaggctggtctcaagctcctgacctcaagtgatctgcttgccttggtctcctaaagtgctgggattacaggcgtgagccaccgcgtccggcccaaaagccttttttggatgagaaagactcactcagcttcgtcctgaagagcaagtgggctggggaagaggagagtatgaatgtgagtccaagagcaagttttgcacttttttcttcaaagaatgtcaccgtctgaagaatgcgattggaagacacacacacacacacacacacacacacacacgcagccggttctctacaggattagaaaaaacttgcgcgaattaatctgcgtagttaaaaacaaatacgaaatgagcgagaaagcacatagtagtcaaatctcgccaccacataaacaggttaagtttggaagcacagcccctaacattcggtgctgcttagcatctccgacttccggcgtcctccgttgctaaggtgaccagaggcgcgtcctaacgctccgcccaacaaaccatagagtaccggaaaaagctcgagcagaggggtcggaaagggaaaacaactacggctgcggtgtggttggtggtgagatgacgaccttagtgctggataatggagcttacaacgccaaaatcggttacagccatgaaaatgtgtcggttattcctaattgtcagttccggtcaaaaacagcacgtcttaaaacttttactgccaaccagatagatgaaataaaagacccttctggactcttttacatcctcccttttcaaaagggctacttggtgaattgggatgttcagagacaagtttgggattacctttttggaaaagaaatgtatcaggttgattttttagatactaatattattatcactgaaccatactttaacttcacttcaattcaagaatcaatgaatgaaattctatttgaagaataccagtttcaagcagtattaagagtaaatgctggggctctcagtgcacataggtatttccgagataatccttccgaattatgctgtatcattgttgatagtggatattcctttacacatatagttccttattgtagaagtaaaaagaaaaaagaagcaattattcggataaatgtgggaggaaaactcttaaccaatcatctaaaggagatcatatcttacaggcagctacatgttatggatgaaacacatgtgattaatcaagtgaaagaagatgtatgctatgtgtctcaggatttttatagagacatggatattgcaaagttgaaaggagaagaaaatacagtaatgatagactatgtcttgcctgacttcagtacaattaaaaagggcttttgtaagccaagggaagagatggtgttgagtggaaaatacaaatctggggaacaaattcttcgtttggccaatgagagatttgctgttccggaaatactctttaatccttctgatataggcattcaagaaatgggaattccagaagctattgtctattcaattcaaaatctacctgaagaaatgcagccgcatttttttaagaacattgtcttgacaggaggaaattcccttttcccaggatttagggatcgggtttactcagaagttcgatgtcttactccaacagattatgatgtttctgttgtgctgcctgaaaaccctattacttatgcctgggaaggtggaaaattgatatcagagaatgatgattttgaagatatggtggtaacaagagaagattacgaagaaaatggacatagcgtctgtgaagagaaatttgatatttaagcaacatttttgaatgaaagttgtgaccataaggtttaatttcaaagttccttttaaaagaggttaaggaactgtgttaccttttgtcctaagaaaaaggcttgaatttatgtaaatactttgatcgattgctaattttcaaaggcttcttaggtaggttactacagtaaactgtaactcagtccacattttcatttaggagctagactaccataacaatgcttatgctgtttccaagggtaggttatttttcattaaaagaagaatgaatgcattttaagtttaattcttcatagctgaaagcacaaatttaacggcttcactggacagttttccttagaaggtagttttgtgtgactgtgactaaactattttattttaaaatgtcattcttatttatacattctaaagttggaaagactgatcttatatgtgtataatgtttattttgtacctagagtacatttaaaagggtggagactaagctaataaagtttttttggccact

SEQ ID NO: 108897 - DNA, 1659 bp, Homo sapiens
  Payload ID: 1394
  Gene Symbol: ACTR6
  Gene Name: ARP6 actin-related protein 6 homolog (yeast)
  ENST ID: ENST00000552376
  CDS Start-End: 23-1153
ctgcggtgtggttggtggtgagatgacgaccttagtgctggataatggagcttacaacgccaaaatcggttacagccatgaaaatgtgtcggttattcctaattgtcagttccggtcaaaaacagcacgtcttaaaacttttactgccaaccagatagatgaaataaaagacccttctggactcttttacatcctcccttttcaaaagggctacttggtgaattgggatgttcagagacaagtttgggattacctttttggaaaagaaatgtatcaggttgattttttagatactaatattattatcactgaaccatactttaacttcacttcaattcaagaatcaatgaatgaaattctatttgaagaataccagtttcaagcagtattaagagtaaatgctggggctctcagtgcacataggtatttccgagataatccttccgaattatgctgtatcattgttgatagtggatattcctttacacatatagttccttattgtagaagtaaaaagaaaaaagaagcaattattcggataaatgtgggaggaaaactcttaaccaatcatctaaaggagatcatatcttacaggcagctacatgttatggatgaaacacatgtgattaatcaagtgaaagaagatgtatgctatgtgtctcaggatttttatagagacatggatattgcaaagttgaaaggagaagaaaatacagtaatgatagactatgtcttgcctgacttcagtacaattaaaaagggcttttgtaagccaagggaagagatggtgttgagtggaaaatacaaatctggggaacaaattcttcgtttggccaatgagagatttgctgttccggaaatactctttaatccttctgatataggcattcaagaaatgggaattccagaagctattgtctattcaattcaaaatctacctgaaggatttagggatcgggtttactcagaagttcgatgtcttactccaacagattatgatgtttctgttgtgctgcctgaaaaccctattacttatgcctgggaaggtggaaaattgatatcagagaatgatgattttgaagatatggtggtaacaagagaagattacgaagaaaatggacatagcgtctgtgaagagaaatttgatatttaagcaacatttttgaatgaaagttgtgaccataaggtttaatttcaaagttccttttaaaagaggttaaggaactgtgttaccttttgtcctaagaaaaaggcttgaatttatgtaaatactttgatcgattgctaattttcaaaggcttcttaggtaggttactacagtaaactgtaactcagtccacattttcatttaggagctagactaccataacaatgcttatgctgtttccaagggtaggttatttttcattaaaagaagaatgaatgcattttaagtttaattcttcatagctgaaagcacaaatttaacggcttcactggacagttttccttagaaggtagttttgtgtgactgtgactaaactattttattttaaaatgtcattcttatttatacattctaaagttggaaagactgatcttatatgtgtataatgtttattttgtacctagagtacatttaaaagggtggagactaagctaataaagtttttttggcca

SEQ ID NO: 108898 - DNA, 595 bp, Homo sapiens
  Payload ID: 1394
  Gene Symbol: ACTR6
  Gene Name: ARP6 actin-related protein 6 homolog (yeast)
  ENST ID: ENST00000547458
  CDS Start-End: 36-470
aaaacaactacggctgcggtgtggttggtggtgagatgacgaccttagtgctggataatggagcttacaacgccaaaatcggttacagccatgaaaatgtgtcggttattcctaattgtcagttccggtcaaaaacagcacgtcttaaaacttttactgccaaccagatagatgaaataaaagacccttctggactcttttacatcctcccttttcaaaagggctacttggtgaattgggatgttcagagacaagtttgggattacctttttggaaaagaaatgtatcaggttgattttttagatactaatattattatcactgaaccatactttaacttcacttcaattcaagaatcaatgaatgaaattctatttgaagaataccagtttcaagcagtattaagagtaaatgggtcttgctctgttgcccaggctagagtgtggtggcacaaacatggctcactgtagcctccacctcctgggctcaagggatcctcccgcctcagcctcccaagtagctgggaccacagctggggctctcagtgcacataggtatttccgagataatccttccgaattatgctgtatcattg

SEQ ID NO: 108899 - DNA, 2045 bp, Homo sapiens
  Payload ID: 1394
  Gene Symbol: ACTR6
  Gene Name: ARP6 actin-related protein 6 homolog (yeast)
  ENST ID: ENST00000553038
  CDS Start-End: 988-1371
ggctgctgcgctccctgcccccgcggtgcccccttcccgccgccccgctcctctctcaggcgctcaaagtggcctggaatttgtagaacgcccccctccaagcccgttggcagttgtcctagcccgctggcccttgcccccgcccgctggccgttgcccccgcgacgccccggaagccaggtcctgcctcccgcacctgccaagtccccgccctgccggagtctcgctctgtcgcccaggctggagtgtagtggagccatctcggctcactgcaacctccgcctccccggttcaagcaattctcccgcctcagcctcccgagtacttgggattacaggcgcccgccacctcgcccggctactttttgtatttttaatagagacggggtttcgccgtgttggtcaggctggtctcaagctcctgacctcaagtgatctgcttgccttggtctcctaaagtgctgggattacaggcgtgagccaccgcgtccggcccaaaagccttttttggatgagaaagactcactcagcttcgtcctgaagagcaagtgggctggggaagaggagagtatgaatgtgagtccaagagcaagttttgcacttttttcttcaaagaatgtcaccgtctgaagaatgcgattggaagacacacacacacacacacacacacacacacacgcagccggttctctacaggattagaaaaaacttgcgcgaattaatctgcgtagttaaaaacaaatacgaaatgagcgagaaagcacatagtagtcaaatctcgccaccacataaacaggttaagtttggaagcacagcccctaacattcggtgctgcttagcatctccgacttccggcgtcctccgttgctaaggtgaccagaggcgcgtcctaacgctccgcccaacaaaccatagagtaccggaaaaagctcgagcagaggggtcggaaagggaaaacaactacggctgcggtgtggttggtggtgagatgacgaccttagtgctggataatggagcttacaacgccaaaatcggttacagccatgaaaatgtgtcggttattcctaattgtcagttccggtcaaaaacagcacgtcttaaaacttttactgccaaccagatagatgaaataaaagacccttctggactcttttacatcctcccttttcaaaagggctacttggtgaattgggatgttcagagacaagtttgggattacctttttggaaaagaaatgtatcaggttgattttttagatactaatattattatcactgaaccatactttaacttcacttcaattcaagaatcaatgaatgaaattctatttgaagaataccagtttcaagcagtattaagagtaaatggataaatgtgggaggaaaactcttaaccaatcatctaaaggagatcatatcttacaggcagctacatgttatggatgaaacacatgtgattaatcaagtgaaagaagatgtatgctatgtgtctcaggatttttatagagacatggatattgcaaagttgaaaggagaagaaaatacagtaatgatagactatgtcttgcctgacttcagtacaattaaaaagggcttttgtaagccaagggaagagatggtgttgagtggaaaatacaaatctggggaacaaattcttcgtttggccaatgagagatttgctgttccggaaatactctttaatccttctgatataggcattcaagaaatgggaattccagaagctattgtctattcaattcaaaatctacctgaagaaatgcagccgcatttttttaagaacattgtcttgacaggaggaaattcccttttcccaggatttagggatcgggtttactcagaagttcgatgtcttactccaacagattatgatgtttctgttgtgctgcctgaaaaagagatgctggggttactattaatctcaagagccaactggtgtagatactgaattgtccttcccttctgcttttcaaactccttgtatgtcaagggttggcaaaacgtaaagcctggaaaaaaaaaaaaaaaa

SEQ ID NO: 108900 - DNA, 1715 bp, Homo sapiens
  Payload ID: 1394
  Gene Symbol: ACTR6
  Gene Name: ARP6 actin-related protein 6 homolog (yeast)
  ENST ID: ENST00000551617
  CDS Start-End: 389-1273
gatgacgaccttagtgctggataatggagcttacaacgccaaaatcggttacagccatgaaaatgtgtcgtaagtactttctttctccgagggacaagatatatacgcctagtggtttcatgtgctacgtttcatctccggacatcaatgaactgcagacacccccgcgcggccctgacttagccagagggattccctggttggagctggggttattcctaattgtcagttccggtcaaaaacagcacgtcttaaaacttttactgccaaccagatagatgaaataaaagacccttctggactcttttacatcctcccttttcaaaagggctacttggtgaattgggatgttcagagacaagtttgggattacctttttggaaaagaaatgtatcaggttgattttttagatactaatattattatcactgaaccatactttaacttcacttcaattcaagaatcaatgaatgaaattctatttgaagaataccagtttcaagcagtattaagagtaaatgctggggctctcagtgcacataggtatttccgagataatccttccgaattatgctgtatcattgttgatagtggatattcctttacacatatagttccttattgtagaagtaaaaagaaaaaagaagcaattattcggataaatgtgggaggaaaactcttaaccaatcatctaaaggagatcatatcttacaggcagctacatgttatggatgaaacacatgtgattaatcaagtgaaagaagatgtatgctatgtgtctcaggatttttatagagacatggatattgcaaagttgaaaggagaagaaaatacagtaatgatagactatgtcttgcctgacttcagtacaattaaaaagggcttttgtaagccaagggaagagatggtgttgagtggaaaatacaaatctggggaacaaattcttcgtttggccaatgagagatttgctgttccggaaatactctttaatccttctgatataggcattcaagaaatgggaattccagaagctattgtctattcaattcaaaatctacctgaaggatttagggatcgggtttactcagaagttcgatgtcttactccaacagattatgatgtttctgttgtgctgcctgaaaaccctattacttatgcctgggaaggtggaaaattgatatcagagaatgatgattttgaagatatggtggtaacaagagaagattacgaagaaaatggacatagcgtctgtgaagagaaatttgatatttaagcaacatttttgaatgaaagttgtgaccataaggtttaatttcaaagttccttttaaaagaggttaaggaactgtgttaccttttgtcctaagaaaaaggcttgaatttatgtaaatactttgatcgattgctaattttcaaaggcttcttaggtaggttactacagtaaactgtaactcagtccacattttcatttaggagctagactaccataacaatgcttatgctgtttccaagggtaggttatttttcattaaaagaagaatgaatgcattttaagtttaattcttcatagctgaaagcacaaatttaacggcttcactggacagttttccttagaaggtagttttgtgtgactgtgactaaactattttattttaaaatgtcattcttatttatacattctaaagttggaaagactgatcttatatgtgtataatg

SEQ ID NO: 108901 - DNA, 780 bp, Homo sapiens
  Payload ID: 1394
  Gene Symbol: ACTR6
  Gene Name: ARP6 actin-related protein 6 homolog (yeast)
  ENST ID: ENST00000552064
  CDS Start-End: 23-289
ctgcggtgtggttggtggtgagatgacgaccttagtgctggataatggagcttacaacgccaaaatcggttacagccatgaaaatgtgtcggttattcctaattgtcagttccggtcaaaaacagcacgtcttaaaacttttactgccaaccagatagatgaaataaaagacccttctggactcttttacatcctcccttttcaaaagggctacttggtgaattgggatgttcagagacaagtttgggattacctttttggaaaagaaatgtatcaggtaacaaattagagttgattttttagatactaatattattatcactgaaccatactttaacttcacttcaattcaagaatcaatgaatgaaattctatttgaagaataccagtttcaagcagtattaagagtaaatggataaatgtgggaggaaaactcttaaccaatcatctaaaggagatcatatcttacaggcagctacatgttatggatgaaacacatgtgattaatcaagtgaaagaagatgtatgctatgtgtctcaggatttttatagagacatggatattgcaaagttgaaaggagaagaaaatacagtaatgatagactatgtcttgcctgacttcagtacaattaaaaagggcttttgtaagccaagggaagagatggtgttgagtggaaaatacaaatctggggaacaaattcttcgtttggccaatgagagatttgctgttccggaaatactctttaatccttctgatataggcattcaagaaatgggaat

SEQ ID NO: 108902 - DNA, 582 bp, Homo sapiens
  Payload ID: 1394
  Gene Symbol: ACTR6
  Gene Name: ARP6 actin-related protein 6 homolog (yeast)
  ENST ID: ENST00000551652
  CDS Start-End: 6-582
aactgatgtaccaaggtcctagcagagttctaaaggaggcccctggggcagaagcctacggttatgaatgcttgggagggctgcaccggacatccacgggatgctggggggttattcctaattgtcagttccggtcaaaaacagcacgtcttaaaacttttactgccaaccagatagatgaaataaaagacccttctggactcttttacatcctcccttttcaaaagggctacttggtgaattgggatgttcagagacaagtttgggattacctttttggaaaagaaatgtatcaggttgattttttagatactaatattattatcactgaaccatactttaacttcacttcaattcaagaatcaatgaatgaaattctatttgaagaataccagtttcaagcagtattaagagtaaatgctggggctctcagtgcacataggtatttccgagataatccttccgaattatgctgtatcattgttgatagtggatattcctttacacatatagttccttattgtagaagtaaaaagaaaaaagaagcaattattcggataaatgtgggaggaaaactcttaa

SEQ ID NO: 108903 - DNA, 1877 bp, Homo sapiens
  Payload ID: 1394
  Gene Symbol: ACTR6
  Gene Name: ARP6 actin-related protein 6 homolog (yeast)
  ENST ID: ENST00000546902
  CDS Start-End: 424-1368
gaaaacaactacggctgcggtgtggttggtggtgagatgacgaccttagtgctggataatggagcttacaacgccaaaatcggttacagccatgaaaatgtgtcgtaagtactttctttctccgagggacaagatatatacgcctagtggtttcatgtgctacgtttcatctccggacatcaatgaactgcagacacccccgcgcggccctgacttagccagagggattccctggttggagctggggttattcctaattgtcagttccggtcaaaaacagcacgtcttaaaacttttactgccaaccagatagatgaaataaaagacccttctggactcttttacatcctcccttttcaaaagggctacttggtgaattgggatgttcagagacaagtttgggattacctttttggaaaagaaatgtatcaggttgattttttagatactaatattattatcactgaaccatactttaacttcacttcaattcaagaatcaatgaatgaaattctatttgaagaataccagtttcaagcagtattaagagtaaatgctggggctctcagtgcacataggtatttccgagataatccttccgaattatgctgtatcattgttgatagtggatattcctttacacatatagttccttattgtagaagtaaaaagaaaaaagaagcaattattcggataaatgtgggaggaaaactcttaaccaatcatctaaaggagatcatatcttacaggcagctacatgttatggatgaaacacatgtgattaatcaagtgaaagaagatgtatgctatgtgtctcaggatttttatagagacatggatattgcaaagttgaaaggagaagaaaatacagtaatgatagactatgtcttgcctgacttcagtacaattaaaaagggcttttgtaagccaagggaagagatggtgttgagtggaaaatacaaatctggggaacaaattcttcgtttggccaatgagagatttgctgttccggaaatactctttaatccttctgatataggcattcaagaaatgggaattccagaagctattgtctattcaattcaaaatctacctgaagaaatgcagccgcatttttttaagaacattgtcttgacaggaggaaattcccttttcccaggatttagggatcgggtttactcagaagttcgatgtcttactccaacagattatgatgtttctgttgtgctgcctgaaaaccctattacttatgcctgggaaggtggaaaattgatatcagagaatgatgattttgaagatatggtggtaacaagagaagattacgaagaaaatggacatagcgtctgtgaagagaaatttgatatttaagcaacatttttgaatgaaagttgtgaccataaggtttaatttcaaagttccttttaaaagaggttaaggaactgtgttaccttttgtcctaagaaaaaggcttgaatttatgtaaatactttgatcgattgctaattttcaaaggcttcttaggtaggttactacagtaaactgtaactcagtccacattttcatttaggagctagactaccataacaatgcttatgctgtttccaagggtaggttatttttcattaaaagaagaatgaatgcattttaagtttaattcttcatagctgaaagcacaaatttaacggcttcactggacagttttccttagaaggtagttttgtgtgactgtgactaaactattttattttaaaatgtcattcttatttatacattctaaagttggaaagactgatcttatatgtgtataatgtttattttgtacctagagtacatttaaaagggtggagactaagctaataaagtttttttggccacta

SEQ ID NO: 108904 - DNA, 1747 bp, Homo sapiens
  Payload ID: 1394
  Gene Symbol: ACTR6
  Gene Name: ARP6 actin-related protein 6 homolog (yeast)
  ENST ID: ENST00000548180
  CDS Start-End: 36-302
aaaacaactacggctgcggtgtggttggtggtgagatgacgaccttagtgctggataatggagcttacaacgccaaaatcggttacagccatgaaaatgtgtcggttattcctaattgtcagttccggtcaaaaacagcacgtcttaaaacttttactgccaaccagatagatgaaataaaagacccttctggactcttttacatcctcccttttcaaaagggctacttggtgaattgggatgttcagagacaagtttgggattacctttttggaaaagaaatgtatcaggtaacaaattagagttgattttttagatactaatattattatcactgaaccatactttaacttcacttcaattcaagaatcaatgaatgaaattctatttgaagaataccagtttcaagcagtattaagagtaaatgctggggctctcagtgcacataggtatttccgagataatccttccgaattatgctgtatcattgttgatagtggatattcctttacacatatagttccttattgtagaagtaaaaagaaaaaagaagcaattattcggataaatgtgggaggaaaactcttaaccaatcatctaaaggagatcatatcttacaggcagctacatgttatggatgaaacacatgtgattaatcaagtgaaagaagatgtatgctatgtgtctcaggatttttatagagacatggatattgcaaagttgaaaggagaagaaaatacagtaatgatagactatgtcttgcctgacttcagtacaattaaaaagggcttttgtaagccaagggaagagatggtgttgagtggaaaatacaaatctggggaacaaattcttcgtttggccaatgagagatttgctgttccggaaatactctttaatccttctgatataggcattcaagaaatgggaattccagaagctattgtctattcaattcaaaatctacctgaagaaatgcagccgcatttttttaagaacattgtcttgacaggaggaaattcccttttcccaggatttagggatcgggtttactcagaagttcgatgtcttactccaacagattatgatgtttctgttgtgctgcctgaaaaccctattacttatgcctgggaaggtggaaaattgatatcagagaatgatgattttgaagatatggtggtaacaagagaagattacgaagaaaatggacatagcgtctgtgaagagaaatttgatatttaagcaacatttttgaatgaaagttgtgaccataaggtttaatttcaaagttccttttaaaagaggttaaggaactgtgttaccttttgtcctaagaaaaaggcttgaatttatgtaaatactttgatcgattgctaattttcaaaggcttcttaggtaggttactacagtaaactgtaactcagtccacattttcatttaggagctagactaccataacaatgcttatgctgtttccaagggtaggttatttttcattaaaagaagaatgaatgcattttaagtttaattcttcatagctgaaagcacaaatttaacggcttcactggacagttttccttagaaggtagttttgtgtgactgtgactaaactattttattttaaaatgtcattcttatttatacattctaaagttggaaagactgatcttatatgtgtataatgtttattttgtacctagagtacatttaaaagggtggagactaagctaataaagtttttttggccact

SEQ ID NO: 108905 - DNA, 3629 bp, Homo sapiens
  Payload ID: 1395
  Gene Symbol: ACTR8
  Gene Name: ARP8 actin-related protein 8 homolog (yeast)
  Uniprot ID: Q9H981
  ENST ID: ENST00000335754
  CDS Start-End: 102-1976
gactgtgggcagccggccgtgcgcctgcgcggtggcccttccatcccggcagtcgtggctgcagcgctgaggcgagaggttggtgggtgtctccggccataatgacccaggctgagaagggtgatacggagaacggaaaggagaagggcggcgagaaggagaaggagcagcgcggcgtgaagcggcccatcgtgcccgcgctggtgccggagtcgctgcaagagcaaatccagagcaacttcatcattgtcatacatccaggttcaacaactttaaggattggtcgagccacagacactcttcctgccagcattcctcacgtcattgcccgaagacacaaacaacaagggcagcccctatacaaggacagttggctcctaagggagggactaaataaaccagaaagtaatgaacaaagacaaaatggccttaaaatggtggatcaagcaatatggtctaaaaagatgtccaatggtacaagacgcattcctgtgtcccctgaacaggcacgctcctacaataagcagatgcgacctgcaattttagatcactgttcgggaaataagtggacaaacacatctcatcaccctgagtatttagtaggagaagaggccttgtatgttaatccactggactgttacaatattcactggcctatcagaagaggtcagttaaatattcacccaggccctgggggctctcttacagctgttctggcagatattgaagtaatatggtctcatgcgatacaaaaatacttggaaatcccactgaaagatttaaagtattatagatgtatcttgttaattcctgatatctataataagcagcatgtgaaagaactagtgaatatgatactaatgaagatgggtttttcagggattgtggtccatcaggagtctgtgtgtgccacctatggaagtggcttaagcagcacgtgtattgtagacgttggggaccagaagacaagtgtatgctgtgtggaggatggggtgtctcatcggaatactcggctttgtctggcatacggaggatctgatgtgtcaagatgtttttactggctaatgcagcgagctgggttcccttacagagaatgccagttaacaaataaaatggattgtcttcttctgcaacaccttaaagaaactttttgtcatttagatcaggacatctctgggcttcaggaccatgagtttcagattcgacatcctgattctcctgccctgctttaccagtttcgattaggagatgaaaaactgcaggctccaatggctttgttttaccccgcaacttttggaatcgttggacagaaaatgacgactttgcagcacagatctcagggcgatcctgaggatcctcacgatgaacattacctgctggccacacagagcaaacaagaacagtctgcaaaagctactgctgaccgaaagtctgcatccaaacctattggatttgaaggggatcttcgtggccagtcctctgatcttccagaaagactccattcccaggaggtagatttggggtctgcacagggagatggcctgatggccggcaacgattccgaggaggccctcactgcactgatgtccaggaagactgccatctcgctgtttgaaggaaaagccctgggcctggataaagccatcctccatagcatagactgctgttcatctgacgacaccaaaaagaagatgtacagctccatcctagtggtgggaggtggtttgatgtttcataaagctcaagaatttctgcagcacagaattctcaacaaaatgccaccatccttcaggcgaattattgaaaatgtggatgtgatcacaaggcctaaggacatggacccccggctgattgcatggaaaggaggggcagtgttggcttgtttggatacaacacaggaactgtggatttatcagcgagagtggcagcgctttggtgtccgcatgttacgagagcgggctgcgtttgtgtggtgaatggggaggaaatgtcactgccgaagaccaaaaacaagcttcttggtataaaagactcttacagaatatgtgtattgtaatttattgatctggatgcttaagtgtcatggacagtaaatgaatttgaactttatgttgaggacatgacattggtttgaaaatataaactgcttttgagcagtttagtcagggcatttgagaataaataggaactttctcttcagttgtaaactctcttgccctctctcagggtctcataaactccccagtgatgtaaacgttgctattgaaggttctcatgtggtgaagcccttcatttaagttggcttgaatctcatcagcaggcagcctcatgcaaccatgagggatagtatgtgacgagggagaactgtccactcatgccattttctctcttgtctagtatttcattaggatctaaagttgtctgagttaaatgcacttatgtgactcatgtgtcctcttagaatcccaaatagggggaaaaagttttggtggtttttgttttttttttcattttctgttggattacagaaaaagaatgggacccattcaggtctcgatttccaaaggtaaagatggaaggctgggcagactggcttttgttacctgacatgccgtagggtgagcttagaggaagaaagaaaacaatttttatttggccaaaacagaacaaatgctgaaaaggaaatcttgtttttttcctaaagccaaatagaaatgatttgggtataatttaagagtccttgtgttgtacagatatggtgactgatgtagttattaatactaccaacttagtcatcaagcctcaattttcctttacctgaaggattaagtgaaagcttttggagttcatgatgttcagtatgatcagttaaccttaacctctgagcatcctgaagcaaaatctaaataatgcagctattaccactggtggtccaggctctggtgaagccctctgagcccaggaggaagagaaagcattgtccagaggtaggaacacagtctgggagcccagagctctgggaggagtgggaaaatgctgcttcctgctgcttgcttctaggcacctgcttccgccatctcacttaccatggctagagatgggggtgagactggggaaggacaaaagcagggaacagataagtgatggaaatcagaagggaatatagaaagaactctggatgtggagaaatgccggtacctgagcattttgtatcaatgggagtaccctctgtaactgctcagtaggttacaaatgaagagtccaccagtattagaaacaatttaaacttgccagtaccaactgggatgtgtgccttcaatttgaaaattgtatgttttattttttaaatttgttaacagcattaatttatagagtattgatgtcatttatgtttctgaggtgtttcaacacaattttggatcagctgcctgtttgcaaaaacataatatatttctgttaaacagttcttcacctaacagcatattgctcttataactggtagagctgtttcaaaggaagttggtttctggtccaagttttgacctaaaccatgtccatcttctattaccagcacttacaagcactgtgaaaactgatcatgacaaataagtaaaatttgctacattaaa

SEQ ID NO: 108906 - DNA, 1202 bp, Homo sapiens
  Payload ID: 1395
  Gene Symbol: ACTR8
  Gene Name: ARP8 actin-related protein 8 homolog (yeast)
  ENST ID: ENST00000486794
  CDS Start-End: 1-1136
cagctgttctggcagatattgaagtaatatggtctcatgcgatacaaaaatacttggaaatcccactgaaagatttaaagtattatagatgtatcttgttaattcctgatatctataataagcagcatgtgaaagaactagtgaatatgatactaatgaagatgggtttttcagggattgtggtccatcaggagtctgtgtgtgccacctatggaagtggcttaagcagcacgtgtattgtagacgttggggaccagaagacaagtgtatgctgtgtggaggatggggtgtctcatcggaatactcgcatcttttcctggaatcaggacatctctgggcttcaggaccatgagtttcagattcgacatcctgattctcctgccctgctttaccagtttcgattaggagatgaaaaactgcaggctccaatggctttgttttaccccgcaacttttggaatcgttggacagaaaatgacgactttgcagcacagatctcagggcgatcctgaggatcctcacgatgaacattacctgctggccacacagagcaaacaagaacagtctgcaaaagctactgctgaccgaaagtctgcatccaaacctattggatttgaaggggatcttcgtggccagtcctctgatcttccagaaagactccattcccaggaggtagatttggggtctgcacagggagatggcctgatggccggcaacgattccgaggaggccctcactgcactgatgtccaggaagactgccatctcgctgtttgaaggaaaagccctgggcctggataaagccatcctccatagcatagactgctgttcatctgacgacaccaaaaagaagatgtacagctccatcctagtggtgggaggtggtttgatgtttcataaagctcaagaatttctgcagcacagaattctcaacaaaatgccaccatccttcaggcgaattattgaaaatgtggatgtgatcacaaggcctaaggacatggacccccggctgattgcatggaaaggaggggcagtgttggcttgtttggatacaacacaggaactgtggatttatcagcgagagtggcagcgctttggtgtccgcatgttacgagagcgggctgcgtttgtgtggtgaatggggaggaaatgtcactgccgaagaccaaaaacaagcttcttggtataaaagactcttacagaa

SEQ ID NO: 108907 - DNA, 708 bp, Homo sapiens
  Payload ID: 1395
  Gene Symbol: ACTR8
  Gene Name: ARP8 actin-related protein 8 homolog (yeast)
  ENST ID: ENST00000498740
  CDS Start-End: 403-708
agtgcggaagcggtcgttcttttccgggtggtggcgcgccgggacgccgagggctgggaggtgcggagcgccaggagccaggcggagcccccgcagggacaccgctccgatctcccgcacgccccaccgtctggttgtgtgcgctcctgcccgggctctggcctcagcttccccgaccataaaacgaccacgcaaatccagagcaacttcatcattgtcatacatccaggttcaacaactttaaggattggtcgagccacagacactcttcctgccagcattcctcacgtcattgcccgaagacacaaacaacaagggcagcccctatacaaggacagttggctcctaagggagggactaaataaaccagaaagtaatgaacaaagacaaaatggccttaaaatggtggatcaagcaatatggtctaaaaagatgtccaatggtacaagacgcattcctgtgtcccctgaacaggcacgctcctacaataagcagatgcgacctgcaattttagatcactgttcgggaaataagtggacaaacacatctcatcaccctgagtatttagtaggagaagaggccttgtatgttaatccactggactgttacaatattcactggcctatcagaagaggtcagttaaatattcacccaggccctgggggctctcttacagctgttctggcagatattgaagtaatatggtct

SEQ ID NO: 108908 - DNA, 2091 bp, Homo sapiens
  Payload ID: 1395
  Gene Symbol: ACTR8
  Gene Name: ARP8 actin-related protein 8 homolog (yeast)
  Uniprot ID: Q9H981
  ENST ID: ENST00000482349
  CDS Start-End: 333-1874
gcgcgccgggacgccgagggctgggaggtgcggagcgccaggagccaggcggagcccccgcagggacaccgctccgatctcccgcacgccccaccgtctggttgtgtgcgctcctgcccgggctctggcctcagcttccccgaccataaaacgaccacggttcaacaactttaaggattggtcgagccacagacactcttcctgccagcattcctcacgtcattgcccgaagacacaaacaacaagggcagcccctatacaaggacagttggctcctaagggagggactaaataaaccagaaagtaatgaacaaagacaaaatggccttaaaatggtggatcaagcaatatggtctaaaaagatgtccaatggtacaagacgcattcctgtgtcccctgaacaggcacgctcctacaataagcagatgcgacctgcaattttagatcactgttcgggaaataagtggacaaacacatctcatcaccctgagtatttagtaggagaagaggccttgtatgttaatccactggactgttacaatattcactggcctatcagaagaggtcagttaaatattcacccaggccctgggggctctcttacagctgttctggcagatattgaagtaatatggtctcatgcgatacaaaaatacttggaaatcccactgaaagatttaaagtattatagatgtatcttgttaattcctgatatctataataagcagcatgtgaaagaactagtgaatatgatactaatgaagatgggtttttcagggattgtggtccatcaggagtctgtgtgtgccacctatggaagtggcttaagcagcacgtgtattgtagacgttggggaccagaagacaagtgtatgctgtgtggaggatggggtgtctcatcggaatactcggctttgtctggcatacggaggatctgatgtgtcaagatgtttttactggctaatgcagcgagctgggttcccttacagagaatgccagttaacaaataaaatggattgtcttcttctgcaacaccttaaagaaactttttgtcatttagatcaggacatctctgggcttcaggaccatgagtttcagattcgacatcctgattctcctgccctgctttaccagtttcgattaggagatgaaaaactgcaggctccaatggctttgttttaccccgcaacttttggaatcgttggacagaaaatgacgactttgcagcacagatctcagggcgatcctgaggatcctcacgatgaacattacctgctggccacacagagcaaacaagaacagtctgcaaaagctactgctgaccgaaagtctgcatccaaacctattggatttgaaggggatcttcgtggccagtcctctgatcttccagaaagactccattcccaggaggtagatttggggtctgcacagggagatggcctgatggccggcaacgattccgaggaggccctcactgcactgatgtccaggaagactgccatctcgctgtttgaaggaaaagccctgggcctggataaagccatcctccatagcatagactgctgttcatctgacgacaccaaaaagaagatgtacagctccatcctagtggtgggaggtggtttgatgtttcataaagctcaagaatttctgcagcacagaattctcaacaaaatgccaccatccttcaggcgaattattgaaaatgtggatgtgatcacaaggcctaaggacatggacccccggctgattgcatggaaaggaggggcagtgttggcttgtttggatacaacacaggaactgtggatttatcagcgagagtggcagcgctttggtgtccgcatgttacgagagcgggctgcgtttgtgtggtgaatggggaggaaatgtcactgccgaagaccaaaaacaagcttcttggtataaaagactcttacagaatatgtgtattgtaatttattgatctggatgcttaagtgtcatggacagtaaatgaatttgaactttatgttgaggacatgacattggtttgaaaatataaactgcttttgagcagtttagtcagggcatttgagaataaataggaactttc

SEQ ID NO: 108909 - DNA, 2466 bp, Homo sapiens
  Payload ID: 1396
  Gene Symbol: ARPC4-TTLL3
  Gene Name: ARPC4-TTLL3 readthrough
  ENST ID: ENST00000397256
  CDS Start-End: 9-1886
cgcccgcgatgactgccactctccgcccctacctgagtgccgtgcgggccacattgcaggctgccctctgcctggagaacttctcctcccaggttgtggaacgacacaacaagccggaagtggaagtcaggagtagcaaagagctcctgttacaacctgtgaccatcagcaggaatgagaaggaaaaggttctgattgagggctccatcaactctgtccgggtcagcattgctgtgaaacaggctgatgagatcgagaagattttgtgccacaagttcatgcgcttcatgatgatgcgagcagagaacttctttatccttcgaaggaagcctgtggagcagaagaagatctttacaatccaaggctgctacccggtgatccggtgtctcttgcgccggaggggctgggtggagaagaagatggtccatcgctcaggccccaccctgctgccaccccagaaggatctggatagctcagcgatgggtgacagtgacaccactgaggatgaggatgaagatgaggacgaggagttccagccatcacagctgttcgacttcgatgatttactgaaatttgatgacctagatggaacacatgctctgatggtgggtctatgtctcaatctccggaatttgccgtggtttgatgaggttgatgccaactccttcttcccacgctgctactgcctgggggctgaggatgacaaaaaagccttcataggagacaagcagcccaagaaacaggagaaaaacccagtgttggtgtccccagagtttgtggatgaagctctgtgtgcgtgcgaggagtaccttagcaacttggcccacatggacatcgacaaggacctggaggccccgctgtacctcacccccgagggctggtccctcttcctccagcgctactaccaagtggtccacgaaggggcagaactcaggcacctcgacactcaggtccagcgctgtgaggacatcctgcagcagctgcaggccgtggtaccccagatagacatggaaggggatcgcaacatctggatcgtgaagccaggagccaagtcccgcggacgaggcatcatgtgcatggaccacctggaggagatgctgaagctggtgaacggcaaccccgtggtgatgaaggacggcaagtgggtggtgcagaagtatattgagcggcccctcctcatctttggcaccaagtttgacctcagacagtggttcctggtaactgactggaacccacttaccgtgtggttctaccgcgacagctatatccgcttttccacgcagcccttctccctgaagaacctggacaactcagtgcacctgtgcaacaactccatccagaagcacctggagaactcatgccatcggcatccactgcttccgccagacaacatgtggtctagccagaggttccaggcccacctgcaggagatgggtgccccaaatgcttggtccaccatcatcgtgcctggcatgaaggatgctgtgatccacgcacttcagacctcccaggacaccgtgcagtgtcggaaggccagctttgagctctatggcgctgacttcgtgttcggggaggacttccagccctggctgattgagatcaacgccagccccacgatggcaccctccacagcagtcactgcccggctctgtgctggcgtgcaagctgacaccctgcgcgtggtcattgaccggatgctggaccgcaactgtgacacaggagcctttgagctcatctataagcagcccgtcaccacttccccagcctccacaccaaggcccagctgccttctccccatgtactccgacaccagggccaggtcctcagacgacagcacagcaagctggtgggcactaaggccctgtcgaccacaggcaaggccttgaggactctacccacggctaaggtcttcatttccctcccaccgaaccttgatttcaaggtggcacccagcatcctgaagccaagaaaggtgggcctcgacctgtgactcacacccagtggacagtgctgagcacggggtcagggctggagggcacaggcagagggcagctcccaggctggctggcaccccaagggaagagctggtctccctcagaagccccttcctccacagacttctgatcatctccctcttctcccctcctttcacaccgaggctcctgctctcctgtgcctccgaggcccccagctggaagtgccttgttgcctctgccctttgaagtcggaacaattcctagcacctgtcggaaggtcaaggccaaaggcaaattcaaggccagactgtgacaaacccagggctgaggcctgccccatgaagaggctgagccccctgaaacccctgccccttgttggtacattccagaggcgcaggggcctgggggatatgaagctagggaagcccctgcttcgattccccactgcccttgtcctggatccaacaccaaataaaaagaaacaagtgaa

SEQ ID NO: 108910 - DNA, 499 bp, Homo sapiens
  Payload ID: 1396
  Gene Symbol: ARPC4-TTLL3
  Gene Name: ARPC4-TTLL3 readthrough
  ENST ID: ENST00000453882
  CDS Start-End: 1-499
gactgccactctccgcccctacctgagtgccgtgcgggccacattgcaggctgccctctgcctggagaacttctcctcccaggttgtggaacgacacaacaagccggaagtggaagtcaggagtagcaaagagctcctgttacaacctgtgaccatcagcaggaatgagaaggaaaaggttctgattgagggctccatcaactctgtccgggtcagcattgctgtgaaacaggggtatgatatcagctttctgatcaccaacttccacacagagcagatgtacaaacacaagttggtggactttgtgatccacttcatggaggagattgacaaggagatcagtgagatgaagctgtcagtcaatgcccgtgcccgcattgtggctgaagagttccttaagaatcagaagaagatctttacaatccaaggctgctacccggtgatccggtgtctcttgcgccggaggggctgggtggagaagaagatggtccatcgctca

SEQ ID NO: 108911 - DNA, 551 bp, Homo sapiens
  Payload ID: 1396
  Gene Symbol: ARPC4-TTLL3
  Gene Name: ARPC4-TTLL3 readthrough
  ENST ID: ENST00000418163
  CDS Start-End: 41-184
acttccgtacttccgctttccggcccagccagcgcccgcgatgactgccactctccgcccctacctgagtgccgtgcgggccacattgcaggctgccctctgcctggagaacttctcctcccaggttgtggaacgacacaacaagccggaagtggaagtcaggggtatgatatcagctttctgatcaccaacttccacacagagcagatgtacaaacacaagttggtggactttgtgatccacttcatggaggagattgacaaggagatcagtgagatgaagctgtcagtcaatgcccgtgcccgcattgtggctgaagagttccttaagaatgtttcccggtcctctggcgaggatcctccaaggcgtctcacatgaaccggctcagaaacgccaaaatctacgtggagagagctgtcaagcagaagaagatctttacaatccaaggctgctacccggtgatccggtgtctcttgcgccggaggggctgggtggagaagaagatggtccatcgctcaggccccaccctgctgccaccccagaaggatctg

SEQ ID NO: 108912 - DNA, 903 bp, Homo sapiens
  Payload ID: 1396
  Gene Symbol: ARPC4-TTLL3
  Gene Name: ARPC4-TTLL3 readthrough
  ENST ID: ENST00000424442
  CDS Start-End: 41-586
acttccgtacttccgctttccggcccagccagcgcccgcgatgactgccactctccgcccctacctgagtgccgtgcgggccacattgcaggctgccctctgcctggagaacttctcctcccaggttgtggaacgacacaacaagccggaagtggaagtcaggagtagcaaagagctcctgttacaacctgtgaccatcagcaggaatgagaaggaaaaggttctgattgagggctccatcaactctgtccgggtcagcattgctgtgaaacaggctgatgagatcgagaagattttgtgccacaagttcatgcgcttcatgatgatgcgagcagagaacttctttatccttcgaaggaagcctgtggaggggtatgatatcagctttctgatcaccaacttccacacagagcagatgtacaaacacaagttggtggactttgtgatccacttcatggaggagattgacaaggagatcagtgagatgaagctgtcagtcaatgcccgtgcccgcattgtggctgaagagttccttaagaatgtttcccggtcctctggcgaggatcctccaaggcgtctcacatgaaccggctcagaaacgccaaaatctacgtggagagagctgtcaagcagaagaagatctttacaatccaaggctgctacccggtgatccggtgtctcttgcgccggaggggctgggtggagaagaagatggtccatcgctcaggccccaccctgctgccaccccagaaggatctggatagctcagcgatgggtgacagtgacaccactgaggatgaggatgaagatgaggacgaggagttccagccatcacagctgttcgacttcgatgatttactgaaatttgatgacctagatggaacacatgctctgatggtgagg

SEQ ID NO: 108913 - DNA, 1292 bp, Homo sapiens
  Payload ID: 1397
  Gene Symbol: ARR3
  Gene Name: arrestin 3, retinal (X-arrestin)
  Uniprot ID: P36575
  ENST ID: ENST00000307959
  CDS Start-End: 52-1218
gaacttcatctctctccccagaaaaggctcaacatcaactatatagccaacatgtccaaggtgtttaagaagaccagctccaatgggaagctctccatctacctggggaaacgggacttcgtggaccatgtggacacggtggaacccattgacggtgttgtcctggttgatcctgagtacttaaaatgtcgaaagttgtttgtcatgttgacatgtgcctttcgctatggccgtgatgacttggaagtgattggtctgacgttccgaaaagatctgtatgtgcagaccctgcaagtggtcccagctgaatccagcagccctcaggggcccctcacagtcctacaggagcgactactgcacaagctaggggacaatgcctacccctttaccctgcagatggtgaccaacctgccctgttctgtgacactgcagccaggtcctgaagatgcaggaaagccctgtgggattgactttgaagtgaagagtttctgtgctgaaaacccagaggagacagtctccaagagagactatgtgcggctggttgtccggaaagtacaatttgcaccaccggaggcaggccctggcccctcagcccagaccatccgccgcttccttctgtcagctcagcccctacaactccaggcctggatggacagggaggttcactaccacggagaacccatctctgtcaatgtttctatcaacaactgcaccaacaaggtcatcaaaaaaatcaagatttcagttgaccagatcacagatgttgtcctgtattcactagacaagtacaccaagactgtgttcattcaggaattcacggagactgtagctgctaattccagcttctcccagagctttgcagtaaccccaatcctggctgccagctgccagaaacggggcctggcactggatggcaaacttaagcatgaagataccaacctggcctctagcacaattattagaccgggaatggacaaagagctgctggggatcctggtgtcctacaaagtcagagtcaacctgatggtgtcctgtggtggcatcctaggagacctgacagccagcgatgttggtgtggagctacccttggtcctgatccatccgaagccatctcatgaggccgctagctctgaggacatagtcatcgaggagtttacgcggaaaggcgaggaggagagccagaaggctgtggaggctgagggagatgaggggagctgagcacctcgctctggtgcccgtctgtgtgggagcccccactgtaacactctaataaatcagtttgttcagatgtg

SEQ ID NO: 108914 - DNA, 1298 bp, Homo sapiens
  Payload ID: 1397
  Gene Symbol: ARR3
  Gene Name: arrestin 3, retinal (X-arrestin)
  Uniprot ID: P36575
  ENST ID: ENST00000374495
  CDS Start-End: 99-1178
aagaggctggggaggcaggcatagcaaccagagctggagactgatgtgaacttcatctctctccccagaaaaggctcaacatcaactatatagccaacatgtccaaggtgtttaagaagaccagctccaatgggaagctctccatctacctggggaaacgggacttcgtggaccatgtggacacggtggaacccattgacggtgttgtcctggttgatcctgagtacttaaaatgtcgaaagttgtttgtcatgttgacatgtgcctttcgctatggccgtgatgacttggaagtgattggtctgacgttccgaaaagatctgtatgtgcagaccctgcaagtggtcccagctgaatccagcagccctcaggggcccctcacagtcctacaggagcgactactgcacaagctaggggacaatgcctacccctttaccctgcagatggtgaccaacctgccctgttctgtgacactgcagccaggtcctgaagatgcaggaaagccctgtgggattgactttgaagtgaagagtttctgtgctgaaaacccagaggagacagtctccaagagagactatgtgcggctggttgtccggaaagtacaatttgcaccaccggaggcaggccctggcccctcagcccagaccatccgccgcttccttctgtcagctcagcccctacaactccaggcctggatggacagggaggttcactaccacggagaacccatctctgtcaatgtttctatcaacaactgcaccaacaaggtcatcaaaaaaatcaagatttcagttgaccagatcacagatgttgtcctgtattcactagacaagtacaccaagactgtgttcattcaggaattcacggagactgtagctgctaattccagcttctcccagagctttgcagtaaccccaatcctggctgccagctgccagaaacggggcctggcactggatggcaaacttaagcatgaagataccaacctggcctctagcacaattattagaccgggaatggacaaagagctgctggggatcctggtgtcctacaaagtcagagtcaacctgatggtgtcctgtggtggcatcctaggagacctgacagccagcgatgttggtgtggagctacccttggtcctgatccatccgaagccatctcatgaggccgctaggtaatggaatacaagattgggaagccccattcccctcttcccatttccaccctccatgttatgacgatagaaatgtgaaaatgcttccttggggtgctttcaatacatgtgcagtggaaacata

SEQ ID NO: 108915 - DNA, 549 bp, Homo sapiens
  Payload ID: 1397
  Gene Symbol: ARR3
  Gene Name: arrestin 3, retinal (X-arrestin)
  ENST ID: ENST00000480877
  CDS Start-End: 259-549
tgatgtgaacttcatctctctccccagaaaaggctcaacatcaactatatagccaacatgtccaaggtgtttaagaagaccagctccaatgggaaggtgagagaacctggcccagctgggcaaatgagagggcaaaagggatagctctccatctacctggggaaacgggacttcgtggaccatgtggacacggtggaacccattgacggtgttgtcctggttgatcctgagtacttaaaatgtcgaaagttgtttgtcatgttgacatgtgcctttcgctatggccgtgatgacttggaagtgattggtctgacgttccgaaaagatctgtatgtgcagaccctgcaagtggtcccagctgaatccagcagccctcaggggcccctcacagtcctacaggagcgactactgcacaagctaggggacaatgcctacccctttaccctgcagatggtgaccaacctgccctgttctgtgacactgcagccaggtcctgaagatgcaggaaagccctgtgggattgactttgaagtgaagagtttctgtgct

SEQ ID NO: 108916 - DNA, 1309 bp, Homo sapiens
  Payload ID: 1397
  Gene Symbol: ARR3
  Gene Name: arrestin 3, retinal (X-arrestin)
  ENST ID: ENST00000620997
  CDS Start-End: 69-1235
gagctggagactgatgtgaacttcatctctctccccagaaaaggctcaacatcaactatatagccaacatgtccaaggtgtttaagaagaccagctccaatgggaagctctccatctacctggggaaacgggacttcgtggaccatgtggacacggtggaacccattgacggtgttgtcctggttgatcctgagtacttaaaatgtcgaaagttgtttgtcatgttgacatgtgcctttcgctatggccgtgatgacttggaagtgattggtctgacgttccgaaaagatctgtatgtgcagaccctgcaagtggtcccagctgaatccagcagccctcaggggcccctcacagtcctacaggagcgactactgcacaagctaggggacaatgcctacccctttaccctgcagatggtgaccaacctgccctgttctgtgacactgcagccaggtcctgaagatgcaggaaagccctgtgggattgactttgaagtgaagagtttctgtgctgaaaacccagaggagacagtctccaagagagactatgtgcggctggttgtccggaaagtacaatttgcaccaccggaggcaggccctggcccctcagcccagaccatccgccgcttccttctgtcagctcagcccctacaactccaggcctggatggacagggaggttcactaccacggagaacccatctctgtcaatgtttctatcaacaactgcaccaacaaggtcatcaaaaaaatcaagatttcagttgaccagatcacagatgttgtcctgtattcactagacaagtacaccaagactgtgttcattcaggaattcacggagactgtagctgctaattccagcttctcccagagctttgcagtaaccccaatcctggctgccagctgccagaaacggggcctggcactggatggcaaacttaagcatgaagataccaacctggcctctagcacaattattagaccgggaatggacaaagagctgctggggatcctggtgtcctacaaagtcagagtcaacctgatggtgtcctgtggtggcatcctaggagacctgacagccagcgatgttggtgtggagctacccttggtcctgatccatccgaagccatctcatgcttctgcaagctctgaggacatagtcatcgaggagtttacgcggaaaggcgaggaggagagccagaaggctgtggaggctgagggagatgaggggagctgagcacctcgctctggtgcccgtctgtgtgggagcccccactgtaacactctaataaatcagtttgttcagatgtg

SEQ ID NO: 108917 - DNA, 1586 bp, Homo sapiens
  Payload ID: 1398
  Gene Symbol: ARRDC1
  Gene Name: arrestin domain containing 1
  Uniprot ID: Q8N5I2
  ENST ID: ENST00000371421
  CDS Start-End: 65-1366
ggagccgggactcgcgggcggcgggcgggggcgtcgctgcgcggctggccggtgaggccgcggcatggggcgagtgcagctcttcgagatcagcctgagccacggccgcgtcgtctacagccccggggagccgttggctgggaccgtgcgcgtgcgcctgggggcaccgctgccgttccgagccatccgggtgacctgcataggttcctgcggggtctccaacaaggctaatgacacagcgtgggtagtggaggagggttacttcaacagttccctgtcgctggcagacaaggggagcctgcccgctggagagcacagcttccccttccagttcctgcttcctgccactgcacccacgtcctttgagggtcctttcgggaagatcgtgcaccaggtgagggccgccatccacacgccacggttttccaaggatcacaagtgcagcctcgtgttctatatcttgagccccttgaacctgaacagcatcccagacattgagcaacccaacgtggcctctgccaccaagaagttctcctacaagctggtgaagacgggcagcgtggtcctcacagccagcactgatctccgcggctatgtggtggggcaggcactgcagctgcatgccgacgttgagaaccagtcaggcaaggacaccagccctgtggtggccagtctgctgcagaaagtgtcctataaggccaagcgctggatccacgacgtacggaccattgcggaggtggagggtgcgggcgtcaaggcctggcggcgggcgcagtggcacgagcagatcctggtgcctgccttgccccagtcggccctgccgggctgcagcctcatccacatcgactactacttacaggtctctctgaaggcgccggaagctactgtgaccctcccggtcttcattggcaatattgctgtgaaccatgccccagtgagcccccggccaggcctggggctgcctcctggggccccacccctggtggtgccttccgcaccaccccaggaggaggctgaggctgaggctgcggctggcggcccccacttcttggaccccgtcttcctctccaccaagagccattcgcagcggcagcccctgctggccaccttgagttctgtgcctggtgcgccggagccctgccctcaggatggcagccctgcctcacacccgctgcaccctcccttgtgcatttcaacaggtgccactgtcccctactttgcagagggctccggggggccagtgcccactaccagcaccttgattcttcctccagagtacagttcttggggctacccctatgaggccccaccgtcttatgagcagagctgcggcggcgtggaacccagcctgacccctgagagctgaccccgtgctgccttctccaggcaggcctggcctctgccctgggactggggcgcccagggcctcgtgccttctctcttggcctagcctggcccactcaggacctgcccagcctctgccagctcctctggcatccgccctcttctccctggggctggggtgggggtggcagggagctgggacctggagagacaactcctgtaaataaaacactttatttgta

SEQ ID NO: 108918 - DNA, 555 bp, Homo sapiens
  Payload ID: 1398
  Gene Symbol: ARRDC1
  Gene Name: arrestin domain containing 1
  ENST ID: ENST00000431925
  CDS Start-End: 25-555
gcggctggccggtgaggccgcggcatggggcgagtgcagctcttcgagatcagcctgagccacggccgcgtcgtctacagccccggggagccgttggctgggaccgtgcgcgtgcgcctgggggcaccgctgccgttccgagccatccgggtgacctgcataggttcctgcggggtctccaacaaggctaatgacacagcgtgggtagtggaggagggttacttcaacagttccctgtcgctggcagacaaggggagcctgcccgctggagagcacagcttccccttccagttcctgcttcctgccactgcacccacgtcctttgagggtcctttcgggaagatcgtgcaccaggtgagggccgccatccacacgccacggttttccaaggatcacaagtgcagcctcgtgttctatatcttgagccccttgaacctgaacagcatcccagacattgagggatccagcctgcgcacacctgctaagcccctccctggccctccccccaagcaacccaacgtggcctctgccaccaagaagttctcctacaagctg

SEQ ID NO: 108919 - DNA, 829 bp, Homo sapiens
  Payload ID: 1398
  Gene Symbol: ARRDC1
  Gene Name: arrestin domain containing 1
  ENST ID: ENST00000419386
  CDS Start-End: 16-829
cggtgaggccgcggcatggggcgagtgcagctcttcgagatcagcctgagccacggccgcgtcgtctacagccccggggagccgttggctgggaccgtgcgcgtgcgcctgggggcaccgctgccgttccgagccatccgggtgacctgcataggttcctgcggggtctccaacaaggctaatgacacagcgtgggtagtggaggagggttacttcaacagttccctgtcgctggcagacaaggggagcctgcccgctggagagcacagcttccccttccagttcctgcttcctgccactgcacccacgtcctttgagggtcctttcgggaagatcgtgcaccaggtgagggccgccatccacacgccacggttttccaaggatcacaagtgcagcctcgtgttctatatcttgagccccttgaacctgaacagcatcccagacattgaggcactgcagctgcatgccgacgttgagaaccagtcaggcaaggacaccagccctgtggtggccagtctgctgcagaaagtgtcctataaggccaagcgctggatccacgacgtacggaccattgcggaggtggagggtgcgggcgtcaaggcctggcggcgggcgcagtggcacgagcagatcctggtgcctgccttgccccagtcggccctgccgggctgcagcctcatccacatcgactactacttacaggtctctctgaaggcgccggaagctactgtgaccctcccggtcttcattggcaatattgctgtgaaccatgccccagtgagcccccggccaggcctggggctgcctcctggggccccacccctggtgg

SEQ ID NO: 108920 - DNA, 882 bp, Homo sapiens
  Payload ID: 1398
  Gene Symbol: ARRDC1
  Gene Name: arrestin domain containing 1
  ENST ID: ENST00000461627
  CDS Start-End: 23-394
ggctggccggtgaggccgcggcatggggcgagtgcagctcttcgagatcagcctgagccacggccgcgtcgtctacagccccggggagccgttggctgggaccgtgcgcgtgcgcctgggggcaccgctgccgttccgagccatccgggtgacctgcataggttcctgcggggtctccaacaaggctaatgacacagcgtgggtagtggaggagggttacttcaacagttccctgtcgctggcagacaagggtaagtttgggagccagttcccgagtggtgacccctgggggcagcccttggagtggggcctgtctgtcctgtcctccccctttcctagatctgcctcttggatctggcactggcccatcttgtcccagggttgtgggccctgatggctttctcataggcgctgggtggctgaaggggccacctcccccttgtgctggatttgggtgggctctgacccctggcacagctgtttcacccttgccccattcccaaaccactctcctgttcaagccaagctcttatcctcagtccttcacccaagccacagccctgtgctgctgtggcgctggtgactgagacagggagacccagtgtgagctggtcagctgcagtgcccactcttatcctggccctgtggccacctcaggccacctcagggggggactgccccccacctccctcctgtctctgcagggagcctgcccgctggagagcacagcttccccttccagttcctgcttcctgccactgcacccacgtcctttgagggtcctttcgggaagatcgtgcaccaggtgagggccgccatccacacgccacggttttccaaggatcacaagtgcagcctcgtgttctatatcttgagcccctt

SEQ ID NO: 108921 - DNA, 2503 bp, Homo sapiens
  Payload ID: 1399
  Gene Symbol: ARRDC2
  Gene Name: arrestin domain containing 2
  Uniprot ID: Q8TBH0
  ENST ID: ENST00000222250
  CDS Start-End: 144-1367
gggattttctgctccggttggtgagcgcgcctgcgcgttgacggcgattttgcgttctgaggctgcagcgtcggcatcttgagctgccggttcgcgagttcgaggccaggttccgcctgtcgtgggttcgcaccccggacgcgatgctattcgacaaggtgaaagcgttctcggtgcagttggacggcgcgaccgcgggcgtcgagcccgtgtttagcggcggccaggccgtggcgggccgggtgctgctggagctgtcaagcgccgcgcgtgtgggtgccctgaggctgcgcgcgcggggccgcgcccacgtgcactggaccgagtcgcgcagcgcgggctcgagcacggcttacacgcagagctacagtgaacgcgtggaggtcgtgagccaccgcgccacgctcctggcgccagataccggggagaccacgacgctgcctcctgggcgccatgagttcctgttcagcttccagctgcccccgaccctggtgacatccttcgagggcaaacacggtagtgtccgctactgtatcaaggccaccctgcaccggccctgggtcccagcacgccgggcaaggaaggtgttcactgtcatcgagcctgtggacatcaacacgccagccctgctggcacctcaagcgggggctcgggaaaaggttgcccgatcctggtactgtaaccgtggcctagtctccctttcggccaagatcgaccgcaagggctacaccccaggagaggtcatccctgtctttgccgagatcgacaacggctccacacgtcctgtgctgcctcgggcagccgtggtgcagacacagacgttcatggcccgaggcgcccgaaagcagaaacgggcagtggtggccagcctcgcgggcgagccggtgggccccgggcagcgggcgctgtggcagggccgggcactgcggatccccccagtgggtccttccatcctgcactgccgcgttctacacgtggactacgcactcaaggtctgtgtggatatcccaggaacgtccaagctgctgctggagctgccactggtgatcggcaccattcccttgcacccttttggcagccgttcctccagcgtgggcagccacgccagcttcctgctggactggaggctgggggccttgccggagcggcctgaggctcctcctgagtactcggaggtggtagccgacactgaggaggcagccttggggcagagccccttcccgcttccgcaggaccccgacatgagccttgaaggcccgttcttcgcctacatccaagagttccgctaccgcccgccacccctgtactctgaggaggatccaaacccactcttgggggacatgaggccgcgctgcatgacttgctgaacggcacagggacccctcgaggaacaaggttgcacaccagctttcagccaccatgactgtggggagtggctggaccaagggctgacctccccgactgcatcaaagttggggaaccaagtctcagagtgaggcgggggcctttcggatatcacatgggacagaggaagagcccggctggaatctgacttacctggaccgctgtccttgtgaggcattgaatgcccagtgcagtatccgagagactgtttaataacctgtcttcccagccaattggtggtgctggaatcccctaggagccttcagtctgggagaaacagagccagacatagacagttccagcatcacagaaccagaagaagagacctgcaactgtgagagtccagacaggaagcagagaaggcgtccttgcggaaagggcattttagctgaggctttggagtacgaataggagctcagcaggcagacgaatgaggaataaaggtcagagaaggtcagagctgagtgacgtttggaatccaccccgtttattgtagaactgggggttcagagggcaggtgcctcagagttgaggccacacagtgaggtctggtgggtgaaaggacccaggaacgaggcgttcaggaaagcaggttgtcagagctatgtggagtctgtgggtggcaggggcagccgctccagcctttgaagactttgaaagccagagattcctggcgcaggcttggacttcctgggagctcctccaagtacccaggggcatcagagctgcctgggtgttacatggcccagggaacccaggttcagggtaggacaggcaagaccagatacccaatgtgcaaagtgaaaacactgggctccctgttaaacgatgaagaattcaagacagtgacagcattacgtcacccctggggacagaggtcagcctaaggtgacacacggggactactgtgcttccggaggctccctgtgtcctggaggagaaaagcattagagggggcagctggacaagctcccaactgcagagtcccagccctggctggggcagggccccggcctgggactcagcatttctgatatgccttaagaattcattctgttttgtacaattattttttaaaagtaaacgtgtggagaaagaa

SEQ ID NO: 108922 - DNA, 2528 bp, Homo sapiens
  Payload ID: 1399
  Gene Symbol: ARRDC2
  Gene Name: arrestin domain containing 2
  Uniprot ID: Q8TBH0
  ENST ID: ENST00000379656
  CDS Start-End: 184-1392
ccaggaagttcgccgacgacgcgcccgccctgggccaccggcgccggcccaagttcgccgggggggcccggaggaagcttgggggacgcgacgggggaacgcggaaaccccggggatctgcaggcgcgcccgggccgtgtgccttctctccgcgtgtccaaaccgtgtccccagccgcgcgccatgcgctctgggggcgtgcgcagcttcgcgctggagctggcgcggggcccgggcggcgcctaccgcggcggggagcggctgtgcggccgggtgctgctggaggcggcggcgccgctgcgggtgcgagcgctcgaggtgaaggcgcgcggcggggcggccacccactggttggagggtcgcagcgtgggcgtcaacgccgtatccagcgactacgcggccgcggagacctacctgcggcgtcggcagctgctgctccgagataccggggagaccacgacgctgcctcctgggcgccatgagttcctgttcagcttccagctgcccccgaccctggtgacatccttcgagggcaaacacggtagtgtccgctactgtatcaaggccaccctgcaccggccctgggtcccagcacgccgggcaaggaaggtgttcactgtcatcgagcctgtggacatcaacacgccagccctgctggcacctcaagcgggggctcgggaaaaggttgcccgatcctggtactgtaaccgtggcctagtctccctttcggccaagatcgaccgcaagggctacaccccaggagaggtcatccctgtctttgccgagatcgacaacggctccacacgtcctgtgctgcctcgggcagccgtggtgcagacacagacgttcatggcccgaggcgcccgaaagcagaaacgggcagtggtggccagcctcgcgggcgagccggtgggccccgggcagcgggcgctgtggcagggccgggcactgcggatccccccagtgggtccttccatcctgcactgccgcgttctacacgtggactacgcactcaaggtctgtgtggatatcccaggaacgtccaagctgctgctggagctgccactggtgatcggcaccattcccttgcacccttttggcagccgttcctccagcgtgggcagccacgccagcttcctgctggactggaggctgggggccttgccggagcggcctgaggctcctcctgagtactcggaggtggtagccgacactgaggaggcagccttggggcagagccccttcccgcttccgcaggaccccgacatgagccttgaaggcccgttcttcgcctacatccaagagttccgctaccgcccgccacccctgtactctgaggaggatccaaacccactcttgggggacatgaggccgcgctgcatgacttgctgaacggcacagggacccctcgaggaacaaggttgcacaccagctttcagccaccatgactgtggggagtggctggaccaagggctgacctccccgactgcatcaaagttggggaaccaagtctcagagtgaggcgggggcctttcggatatcacatgggacagaggaagagcccggctggaatctgacttacctggaccgctgtccttgtgaggcattgaatgcccagtgcagtatccgagagactgtttaataacctgtcttcccagccaattggtggtgctggaatcccctaggagccttcagtctgggagaaacagagccagacatagacagttccagcatcacagaaccagaagaagagacctgcaactgtgagagtccagacaggaagcagagaaggcgtccttgcggaaagggcattttagctgaggctttggagtacgaataggagctcagcaggcagacgaatgaggaataaaggtcagagaaggtcagagctgagtgacgtttggaatccaccccgtttattgtagaactgggggttcagagggcaggtgcctcagagttgaggccacacagtgaggtctggtgggtgaaaggacccaggaacgaggcgttcaggaaagcaggttgtcagagctatgtggagtctgtgggtggcaggggcagccgctccagcctttgaagactttgaaagccagagattcctggcgcaggcttggacttcctgggagctcctccaagtacccaggggcatcagagctgcctgggtgttacatggcccagggaacccaggttcagggtaggacaggcaagaccagatacccaatgtgcaaagtgaaaacactgggctccctgttaaacgatgaagaattcaagacagtgacagcattacgtcacccctggggacagaggtcagcctaaggtgacacacggggactactgtgcttccggaggctccctgtgtcctggaggagaaaagcattagagggggcagctggacaagctcccaactgcagagtcccagccctggctggggcagggccccggcctgggactcagcatttctgatatgccttaagaattcattctgttttgtacaattattttttaaaagtaaacgtgtggagaaagaa

SEQ ID NO: 108923 - DNA, 615 bp, Homo sapiens
  Payload ID: 1399
  Gene Symbol: ARRDC2
  Gene Name: arrestin domain containing 2
  ENST ID: ENST00000595712
  CDS Start-End: 598-615
gaggcaactcccgctggagaaactccatgcgacttttctttggggaaactgaagcccagagagaggtcacgccgtcccgtggccacaccgcagctgtggacctgggggtgcccgagcgtcccctgcattcagctctgtggcgggacgggggctgaggatgactggagcaggcacaagggctgcggggaagataccggggagaccacgacgctgcctcctgggcgccatgagttcctgttcagcttccagctgcccccgaccctggtgacatccttcgagggcaaacacggtagtgtccgctactgtatcaaggccaccctgcaccggccctgggtcccagcacgccgggcaaggaaggtgttcactgtcatcgagcctgtggacatcaacacgccagccctgctggcacctcaagcgggggctcgggaaaaggttgcccgatcctggtactgtaaccgtggcctagtctccctttcggccaagatcgaccgcaagggctacaccccaggagaggtcatccctgtctttgccgagatcgacaacggctccacacgtcctgtgctgcctcgggcagccgtggtgcagacacagacgttcatggcccgaggcgcccga

SEQ ID NO: 108924 - DNA, 1109 bp, Homo sapiens
  Payload ID: 1399
  Gene Symbol: ARRDC2
  Gene Name: arrestin domain containing 2
  ENST ID: ENST00000593560
  CDS Start-End: 144-1109
gggattttctgctccggttggtgagcgcgcctgcgcgttgacggcgattttgcgttctgaggctgcagcgtcggcatcttgagctgccggttcgcgagttcgaggccaggttccgcctgtcgtgggttcgcaccccggacgcgatgctattcgacaaggtgaaagcgttctcggtgcagttggacggcgcgaccgcgggcgtcgagcccgtgtttagcggcggccaggccgtggcgggccgggtgctgctggagctgtcaagcgccgcgcgtgtgggtgccctgaggctgcgcgcgcggggccgcgcccacgtgcactggaccgagtcgcgcagcgcgggctcgagcacggcttacacgcagagctacagtgaacgcgtggaggtcgtgagccaccgcgccacgctcctggcgccaggtacggatggaggacccctgctccaacaccagttgtgtgcctcccaccacctggacggcggtacctccgtcagccctgggaccccagcgcaaccgctcagtcgcctcctttttctcctacctgcagataccggggagaccacgacgctgcctcctgggcgccatgagttcctgttcagcttccagctgcccccgaccctggtgacatccttcgagggcaaacacggtagtgtccgctactgtatcaaggccaccctgcaccggccctgggtcccagcacgccgggcaaggaaggtgttcactgtcatcgagcctgtggacatcaacacgccagccctgctggcacctcaagcgggggctcgggaaaaggttgcccgatcctggtactgtaaccgtggcctagtctccctttcggccaagatcgaccgcaagggctacaccccaggagaggtcatccctgtctttgccgagatcgacaacggctccacacgtcctgtgctgcctcgggcagccgtggtgcagacacagacgttcatggcccgaggcgcccgaaagcagaaacgggcagtggtggccagcctcgcgggcgagccggtgggccccgggcagcgggcgctgtggcagggccgggcactgcggatccccccagtgggtccttccatcctgcactgccgcgttctacacgtggactac

SEQ ID NO: 108925 - DNA, 4188 bp, Homo sapiens
  Payload ID: 1400
  Gene Symbol: ARRDC3
  Gene Name: arrestin domain containing 3
  Uniprot ID: Q96B67
  ENST ID: ENST00000265138
  CDS Start-End: 268-1512
acaaagctgctcttaaagtgagctggcagcttttagccgcccgtctttgtaaggagaccactgagacgagcgggagcgcggagcagcagcctctgctgccctgactttttaagaaatctcaatgaactatttgtagagaatcactgatccggcctgcaagcattttgcacggcaaaaatatcgatcagtgttaagtgaagatcacattttatatgcgatcttgacttttttgtcttacattatatttttatagattttgttataaacatggtgctgggaaaggtgaagagtttgacaataagctttgactgtcttaatgacagcaatgtccctgtgtattctagtggggataccgtctcaggaagggtaaatttagaagttactggggaaatcagagtaaaatctcttaaaattcatgcaagaggacatgcgaaagtacgctggactgaatctagaaacgccggctccaatactgcctatacacagaattacactgaagaagtagagtatttcaaccataaagacatcttaattgggcacgaaagagatgatgataattccgaagaaggcttccacactattcattcaggaaggcatgaatatgcattcagcttcgagcttccacagacaccactcgctacctcattcgaaggccgacatggcagtgtgcgctattgggtgaaagccgaattgcacaggccttggctactaccagtaaaattaaagaaggaatttacagtctttgagcatatagatatcaacactccttcattactgtcaccccaagcaggcacaaaagaaaagacactctgttgctggttctgtacctcaggcccaatatccttaagtgccaaaattgaaaggaagggctataccccaggtgaatcaattcagatatttgctgagattgagaactgctcttcccgaatggtggtgccaaaggcagccatttaccaaacacaggccttctatgccaaagggaaaatgaaggaagtaaaacagcttgtggctaacttgcgtggggaatccttatcatctggaaagacagagacgtggaatggcaagttgctgaaaattccaccagtttctccctctatcctcgactgtagtataatccgcgtggaatattcactaatggtatatgtggatattcctggagctatggatttatttcttaatttgccacttgtcatcggtaccattcctctacatccatttggtagcagaacctcaagtgtaagcagtcagtgtagcatgaatatgaactggctcagtttatcacttcctgaaagacctgaagcaccacccagctatgcagaagtggtaacagaggaacaaaggcggaacaatcttgcaccagtgagtgcttgtgatgactttgagagagcccttcaaggaccactgtttgcatatatccaggagtttcgattcttgcctccacctctttattcagagattgatccaaatcctgatcagtcagcagatgatagaccatcctgcccctctcgttgaaggaacacttggttgaatcaagttgatgtgggttccgaactgtatctcttccggctgaggacagagaagtatcttggagacacgtttcagaggaagtggaattacttttgcccagaaaaatggcgaatacatgaaacaaccagtgatcatgctttagaagcctacagcaacattctgagactgctccaacatgcttgaagatctaagcttttctcttttaaaactggcacatactcagagcagtcttcttagcctatggtcgtacgtgtcaagacatcacgttgtaaagagggatgatttccttcttttgatttgaaaatttgcacatgctcaatgcttacattgtgcggttcgacgtcactacagcttctttttttttttttttttttttctatttttgccagactcttgatactcttaaaacttgtttgtggtcagcacaacaaggaacaaaacaaagctttgaaaaaactttaacatgaaaaaacgcactgacatttttttttatttaatatagcctggactttacctgcgtatgcacatgctcagaattgtctactaggctgactatgtatcacctcttcagcttggatccaattgtggatttatttacaaacatcaaatgccttcaagccaatcctttttgctgtatgttttgcagcctactgtagtagatacgcaacagataatgtgggaaaaaaagagataagaggaggaagctaataagagactgtcaagattgtataccttcttggtttcttttaagaatttgttgcctttctactattacagcaaagcagcattttgttactgactgcctaaaatcacttaatctcaggtgaacgcatcacttgccaaactgttggaatgctatttgtgttttgttgcactgtttttttcgtttgtttgtttgtttatttggttggctttttggagagggaaatttggaaacgggacatacacaaaagttacacacccacattccctttttatcatgacatacaagaagaaactagcagagctaagaatggagtgaagaaaggcagtatggcaggcaccagcaaagagttgagggctgttgctcttaaaaattattttttttattattattttgaaagtatggaagttttccattcactggggaaaggagggaaaagtgcatttatttttatacagagttacttaattacctccaaaacacatatgttggaaatcgcttttgctggtgcaaagtatattaatgagcaggaatacatacattgaggttatgaatagagagctcaatttgtacctttgctgtcttgctcaagcttggtatggcatgaaaactcgactttattccaaaagtaacttcaaaatttaaaatactagaacgtttgctgcgataaatcttttggatttttgtgtttttctaatgagaatactgtttttcattacctaaagaacaatttgctaaacatgagaaatcactcactttgattatgtatagattacataggaagaacaatcacatcagtaagttatagtttatattaaaggtaattttctgttggctcataacaaatataccagcattcatgatagcatttcagcattttccaaggtaccaagtgtacttattttgttgttgttgttgttgttgtattttagaaggaattcagctctgatgtttttaaagaaaaccagcatctctgatgttgcaacatacgtgtaaaatgggtgttacatctatcctgccatttaaccccacagttaataaagtggctgaaaataatagtagctctggcttggtgcttgacctggttaaatactgtcttaaagctcatacaaaacaaataggcttttccataagtggcctttaagaaaacatggaagacaattcatgtttgacaaatgctgacagggtgaagaaagcccagtgtaaaaatgaatcgcgttttaagtgattcggttaaagagtttgggctcccgtagcaaactaatactagataataaggaaatgggggtgaaatatttttttattgttgaatcattttgtgaatgtccccctcaaaaaaagctaatggaatatttggcataaagggcatttggtggttttatttttgtttgagggggattgtcagaaaatcccttttctctcttacgtctaactgactagggaacaattgttgatatgcatagcattggaatacttgtcattatatactcttacaaataacacatgaagcaagaatgaccaatattctgataattggcactggatcacaaaatgtgataaaactttaaatgtataaaactttatcaaataaagttttattttcccctttaaaatgtatttctttagaggcattacttttttaaaaatattggtcaattcctgacataagatgtgaggttcacagttgtattccagtattcaagatagattcctgatttttcaattaggaaaagtaaaatccaaaatgttagcaaaacaaagtgcaatattaaatgtttgctttatagattatattctatggctgtttgtaatttctctttttttccttttttatttggtgctgaatatgtccttgtaggctctgttttaagaaaacaatatgtgggaaatgatttaatttttcctattgctcttccttgtggaaaataaagtgttttgtttttttctgttttgtataa

SEQ ID NO: 108926 - DNA, 4072 bp, Homo sapiens
  Payload ID: 1401
  Gene Symbol: ARRDC4
  Gene Name: arrestin domain containing 4
  Uniprot ID: Q8NCT1
  ENST ID: ENST00000268042
  CDS Start-End: 165-1421
aaagcgacaggcctctcggcgagccggtgccccatcgggtaccgcacggctgccgcggcggccttaccctgccgcgagcgcctgtgacagcggcgccgctgtgctcgcgaccccggctccgggcctctgccgacctcaggggcaggaaagagtcgcccggcgggatgggcggggaggctgggtgcgcggcggccgtgggtgccgagggccgcgtgaagagcctgggtctggtgttcgaggacgagcgcaagggctgctattccagcggcgagacagtggccgggcacgtgctgctggaggcgtccgagccggtggccctgcgcgcgctgcgcctggaggcccaggggcgcgccaccgccgcctggggcccgagcacctgcccccgcgcctcggccagcaccgcggccctggctgtcttctcggaggtggagtacctgaacgtgcgcctcagcctgcgggagcccccggccggtgaaggcatcattttattacagcctggaaaacatgaatttccatttcgctttcaacttccatctgaacctttggtcacctcgtttactgggaaatatggaagcattcagtactgtgtgcgggcagtgttggaacgacccaaggtacctgatcagagtgtaaagcgggaactccaggttgttagtcatgtcgatgtcaacacaccagcattattaacccctgtattgaaaactcaagagaaaatggttggctgttggtttttcacttctggtccagtctcgctgagtgccaaaattgaaagaaagggatactgtaatggagaagctattccaatctatgcagaaatagaaaattgttcctctcgtctgattgttccaaaggctgctattttccaaacgcagacatatttggctagtggaaaaacaaagaccattcgacacatggtcgccaatgtgcgaggaaaccacatcgcttctgggagcacagacacatggaatgggaaaacgctaaaaatcccacctgttactccatccatcctggattgctgcattatcagagtggactattccttagctgtatacattcacattcctggtgctaaaaaattgatgctcgaactgccattagtgatcggtacaattccatataatggttttggcagcagaaactccagcattgccagccagttcagtatggatatgagctggttgacactgaccctgccagagcagcctgaagcaccaccaaattatgcagatgtggtatcagaggaagaattctctagacacattcctccttaccctcaaccccctaactgtgagggagaagtgtgctgtcctgtgtttgcctgtatacaagaattccggtttcaacccccacctctttattcagaggttgacccacatcctagcgacgtagaagagagccagcctgtttccttcattctctgaacgtatttcagaaatcactgtgttcatcatcaaattagaatgttggttcttttccttctgcctttttgggaaagagacaggaaagattcacttgaaaacataaatgaacgtcaagactgaaggcaatagaaattaaagaatgtgagaaagttctggtgggccggcaggattgccgcacaagtttatatgatggtcgtatatatatccctgttaaaaactgggatgaagatgtgcaaagtcacagaatgtaatggaagtcctgatggttacagagtaagtgaaagggtgcctgcgctgacgtgagagaaaggaatctgtaaacagtggaaacactgtgggagtttcccatggtgaagagtggaacgaaggcgatatgaactgaaggggtgaagacttgattttggagagggcaacaaaacaagggtgtgtgtgcataggagaatggcccactccaaatacgaagtgagatcctgagtctttgggtgcttcatgatttcctaccatattcaggcctaaagacattgaaaaagcatcttttcttgagatcatggtcatatgaggtcctaatgaagtactacagttttcattctttcaagggtagactaaaatatagtttataaatcggcagtacggtattatgaaaccaagaaagggtttcttgaaaagcttgtcggttcaaagaggaaagatgaatttcaatgtgaaaacacgttttgttgagggctgtactttttaccccctttaagtgctttaacaggatatacgtttgattttcctcatatcttatttacctaggagcatgtaagagaaagaagggagagaaaaggttgcatctgcaggatgccttgataactacacagtcccaaataaaaggcctttttctaacctacctctaatggggttatcagatatgtttttaaatctctcgccctgagtactcttcttgggagttgctgctgtttacagccacagtctcatctatcactaaatatgaaactgggccaaggggaaaattcagtaagttagcgttaaatggaagtaaatatatgtatacctaagagaatgtcaaaataaacaccaaaccaaaagaaggtaggagtgccatttttagaaaagacacaactttaattcctgtcaagagacctaggtctactgatggcagtcactgcattgtacattattccagttcttcagtaattctgtttaaactgtgattttctttattgtgttggtgcaatattttattatcatttaacctcaggatattcagaccaacaggattgtgttgctgctgaaagtctgagcagtgttttaccgtccccagcccccctcccacatggtcacatgttcacttgcttttccttccatctgttggttttgtgagctgagagcatctctggacacatggaagggagccagggattcctgtgatacagattttgaaccagcagagtactttggttttcttcatgtcctaagggtttgatccagaaaccctggtgcttcccctgcagaatactgtacttcatttaacagaatgattgatttttctttcaatcagcatgttcaccaaaaatagaaaagttcttctaaggttaaattttgtatttaaaagttagttggccatttgatcagggaattttctacacacattaggcaaatgtatgcttttcatcctctgggcttacctctctcctctgcaatcctggaagcatcgtgcatagttctttcattgtaagccgctatttaaattcccacaatgcaaaactgttagaccagtaattgtgctactgaaattgtcacaaaacgttattccttgatttggtttttaaattttgctttcgtgtgtgtgtctttaaacaggtaatgtgtatttaagtgttgtctaaacagttgatttttactttagaaaagatcatcttcaactgtttattgacttctgagttatatagttcatgccctgccaaggcattgttcgactccatgatactaaaacataatgaaagaaacaaactccagtatggagaagagaaagtttaattatttggttccatctagaaaagcaacaacttaaaggaatccttcactaggattgtcttatcacctttattagataaatcatgaagtgtccctgtgaaattgaagtgaaactatctctgtaggacttaagagaatagctaaaaggtgtgacttgccttattgaaatgatactggcatatctgactgtaagcagtaggttgaagatatcattttatgaatgtggagaattctacattgaaacagaaaatacctgggaatgaagattaaaaatgtagctgctgttatttgcttggttattcccctcttgctcttctttagtttgaaaaaacaaaaacgtggccttggaattttcattttgatgcagaaattttgaaattgaaaatgtgcatgttttggtgcacaaaatccttctgtgggcaaaactttgtttttgttttgcacagtaagaaacaataggcaagcgttatgtttttggtaagttaactatgaaagctttcttatttttattattaaaaatgtaacaatttaacccacaggaaaaaaaattactttgtatgcttgtttgaaccctatgggttcgttttattaataaaattattacactaatgcta

SEQ ID NO: 108927 - DNA, 1638 bp, Homo sapiens
  Payload ID: 1402
  Gene Symbol: ARRDC5
  Gene Name: arrestin domain containing 5
  Uniprot ID: A6NEK1
  ENST ID: ENST00000381781
  CDS Start-End: 1-1029
atgggggacagagaggaatgtctctctaccccccaaccccccatgtctgtggtgaagtcgatcgaattagtgctgcccgaggatagaatctacctggctggctccagcataaaagggcaggtgatcttaaccctgaacagcaccctggtggaccccatagtgaaggtggagctcgtgggaaggggttacgtcgaatggagtgaagaagccggggcatcctgtgattatagcagaaatgttatttgcaacaacaaggcagactacgtgcataagacaaagacattcccagtggaggataattggttaagtgcaggcagccacacctttgacttccatttcaacttacctcccaggcttccttctaccttcaccagcaaatttggccatgtcttctatttcgtacaagcttcctgcatgggcagggaacacattttagccaagaagaggatgtacttattggttcaaggaacttccaccttccacaaagaaaccccattccagaaccccttgttcgtggaggctgaggagaaagtctcctacaactgctgccgccagggcactgtctgtttgcaaatccagatggaaaggaacaccttcacgccaggagagaaggtcgtcttcacaacagagatcaacaaccagaccagcaaatgcatcaagacggtcgtattcgccctgtatgcccacatacagtacgagggcttcacgcccagtgcagagcggcggtctcggctggacagcagcgagcttctgaggcaggaggccaacacccccgtgacccgcttcaacaccaccaaggttgtcagcaccttcaacctgccgttgctgctgtccgtgagcagcagcacgcaggacggtgagatcatgcacactcgctacgagctggtcaccaccgtgcacctgccctggtccctgaccagcctcaaggccaaagttcccatcatcatcaccagcgcctcagtggactctgccatctgccagctgtcagaggacggagtgttacccgtgaacccagatcaccagaattaagtgcccgaacttttaaatattaaaagctttattagtctctaccaggaggaagccctctctcttgcacaggtgactctcagaggagtcgaggagtgggcaacaggttgtctgcaacctccccaagctctagcggtttaggtatctgtgtctcccctccctagaactatcactgaatgcctggaatggacaaaggaaaccgggaaggtctcccaggacccaaacccggcataacctgccttttccaccctgagtctgccccagcctactggggtctcacagtgccaagaccaggggtcctacttggggagaattctcccctctgctaatgtctggttgtattggctgtcacaactgcaggggatcgggggagaagagtcttattggcgtggagagggtggaggccagggacgctgttcagcaccctgcagtgtccaggacggcccccacaatcaggaattgtttatcctgaatgtcaacagtaccaagggggctgagcatggtggctcattcctgtaatcccaggactttaggaggccatggctggaggatcacttgagaccaggagtttgagacaagcctgggcaacactgtgagacccccatctctaca

SEQ ID NO: 108928 - DNA, 1895 bp, Homo sapiens
  Payload ID: 1403
  Gene Symbol: ARRB1
  Gene Name: arrestin, beta 1
  Uniprot ID: P49407
  ENST ID: ENST00000360025
  CDS Start-End: 99-1331
gggagccgggagcgggctggcccgcgctcctcctgctggctggggattttccagcctgggcgctgacgccgcggacctccctgcgaccgtcgcggaccatgggcgacaaagggacccgagtgttcaagaaggccagtccaaatggaaagctcaccgtctacctgggaaagcgggactttgtggaccacatcgacctcgtggaccctgtggatggtgtggtcctggtggatcctgagtatctcaaagagcggagagtctatgtgacgctgacctgcgccttccgctatggccgggaggacctggatgtcctgggcctgacctttcgcaaggacctgtttgtggccaacgtacagtcgttcccaccggcccccgaggacaagaagcccctgacgcggctgcaggaacgcctcatcaagaagctgggcgagcacgcttaccctttcacctttgagatccctccaaaccttccatgttctgtgacactgcagccggggcccgaagacacggggaaggcttgcggtgtggactatgaagtcaaagccttctgcgcggagaatttggaggagaagatccacaagcggaattctgtgcgtctggtcatccggaaggttcagtatgccccagagaggcctggcccccagcccacagccgagaccaccaggcagttcctcatgtcggacaagcccttgcacctagaagcctctctggataaggagatctattaccatggagaacccatcagcgtcaacgtccacgtcaccaacaacaccaacaagacggtgaagaagatcaagatctcagtgcgccagtatgcagacatctgccttttcaacacagctcagtacaagtgccctgttgccatggaagaggctgatgacactgtggcacccagctcgacgttctgcaaggtctacacactgacccccttcctagccaataaccgagagaagcggggcctcgccttggacgggaagctcaagcacgaagacacgaacttggcctctagcaccctgttgagggaaggtgccaaccgtgagatcctggggatcattgtttcctacaaagtgaaagtgaagctggtggtgtctcggggcggcgacgtggccgtggaactgcccttcaccctaatgcaccccaagcccaaagaggaacccccgcatcgggaagttccagagaacgagacgccagtagataccaatctcatagaacttgacacaaatgatgacgacattgtatttgaggactttgctcgccagagactgaaaggcatgaaggatgacaaggaggaagaggaggatggtaccggctctccacagctcaacaacagatagacgggccggccctgcctccacgtggctccggctccactctcgtgcactcggatgcttactcgtcttcttcctgttctggtttcttttcccctttgttcttccagtttctaccagggggccccgtgggcttccagatcacggtgatgaacctctggcctcaggattggccccacatcaccacgccaacaggaccacagcgcactggctccaccccatctctgccatctccactcccctccttttcatgctgtctcccagaaaagctgccagggctctggccttggaattggacttgagatggggagcagacaggggaggatggggaatgtgggacacggtgtggtgggcatgagggcttggaggggtggggatgagggctcaagacacgagagaagatgtccacggtcccaggtggttaacaaagttctggcagctaaaagatgaccgcgttgaaggccacctccttctggctgggaggggcagaactgtggacagattctcaatgcctttttgaagttctgacccaccaaagaccttctgccttcaccctcctccccacctgat

SEQ ID NO: 108929 - DNA, 3336 bp, Homo sapiens
  Payload ID: 1403
  Gene Symbol: ARRB1
  Gene Name: arrestin, beta 1
  Uniprot ID: P49407
  ENST ID: ENST00000420843
  CDS Start-End: 99-1355
gggagccgggagcgggctggcccgcgctcctcctgctggctggggattttccagcctgggcgctgacgccgcggacctccctgcgaccgtcgcggaccatgggcgacaaagggacccgagtgttcaagaaggccagtccaaatggaaagctcaccgtctacctgggaaagcgggactttgtggaccacatcgacctcgtggaccctgtggatggtgtggtcctggtggatcctgagtatctcaaagagcggagagtctatgtgacgctgacctgcgccttccgctatggccgggaggacctggatgtcctgggcctgacctttcgcaaggacctgtttgtggccaacgtacagtcgttcccaccggcccccgaggacaagaagcccctgacgcggctgcaggaacgcctcatcaagaagctgggcgagcacgcttaccctttcacctttgagatccctccaaaccttccatgttctgtgacactgcagccggggcccgaagacacggggaaggcttgcggtgtggactatgaagtcaaagccttctgcgcggagaatttggaggagaagatccacaagcggaattctgtgcgtctggtcatccggaaggttcagtatgccccagagaggcctggcccccagcccacagccgagaccaccaggcagttcctcatgtcggacaagcccttgcacctagaagcctctctggataaggagatctattaccatggagaacccatcagcgtcaacgtccacgtcaccaacaacaccaacaagacggtgaagaagatcaagatctcagtgcgccagtatgcagacatctgccttttcaacacagctcagtacaagtgccctgttgccatggaagaggctgatgacactgtggcacccagctcgacgttctgcaaggtctacacactgacccccttcctagccaataaccgagagaagcggggcctcgccttggacgggaagctcaagcacgaagacacgaacttggcctctagcaccctgttgagggaaggtgccaaccgtgagatcctggggatcattgtttcctacaaagtgaaagtgaagctggtggtgtctcggggcggcctgttgggagatcttgcatccagcgacgtggccgtggaactgcccttcaccctaatgcaccccaagcccaaagaggaacccccgcatcgggaagttccagagaacgagacgccagtagataccaatctcatagaacttgacacaaatgatgacgacattgtatttgaggactttgctcgccagagactgaaaggcatgaaggatgacaaggaggaagaggaggatggtaccggctctccacagctcaacaacagatagacgggccggccctgcctccacgtggctccggctccactctcgtgcactcggatgcttactcgtcttcttcctgttctggtttcttttcccctttgttcttccagtttctaccagggggccccgtgggcttccagatcacggtgatgaacctctggcctcaggattggccccacatcaccacgccaacaggaccacagcgcactggctccaccccatctctgccatctccactcccctccttttcatgctgtctcccagaaaagctgccagggctctggccttggaattggacttgagatggggagcagacaggggaggatggggaatgtgggacacggtgtggtgggcatgagggcttggaggggtggggatgagggctcaagacacgagagaagatgtccacggtcccaggtggttaacaaagttctggcagctaaaagatgaccgcgttgaaggccacctccttctggctgggaggggcagaactgtggacagattctcaatgcctttttgaagttctgacccaccaaagaccttctgccttcaccctcctccccacctgatgtccctctgtgtctgatagtgatgttggtgaaagttcgtagaccccaggagtagagaaaagcaactggactgactttcttaccagcagttacctagactgaggcaagctgtgtggactcacccaagtatatttcagtactgtcaggctgtgacatcttagctaccttgtatttcaagtgcatggccctgtctagagatatgcacagagagaaaagcagagggagggagggagggggtcttcagcaagcaccagcccccagcagagtgagctgaagctcctgaggagggttcccgaaggggggcgctcagagatgggggcagggggcggggagaggagagtctgccttatgtcccttccttgtggacttcacatggtcatgcaggaagtgaggatgggtgtccagcgggggccgaggccactagtatcctcctgcttccccctgccattctccagggctggactgaccctatggactgggagagagtgcctgaggccaccatgccacagtcaaagggggtcctatctcagaaggtggcagcatccactgagatatcctcacccgaagggaaggaggctgctgggtagcaaataagccccttcttttcttggtgagttgatgacctccaatagctcccagtgtcatgggtacccagtacgcattagctggtgttgggttgattgagacctggggcagttcctggggcaagaagccagatgggagatgagatagaaagtgttaggagttatcctctttgcctggcctttgagaataacttactgtgtgactttgggcaagttccttccccactctgggcctcagtttctcacttgggaaagcaaggagtttgaccagatgatcacaatgggccttcctagctctggccaccaagaatttgtgaacattagagctcctggtctggtgggtagagccagagctgctgactggtctctctgcctccagaggggatttattggacctcagaggtggcagggccctatggagcaccaactgccctcaaccccaccctgtgcccaagactgggaagggattgatgtcaggctgtggccataggtagcatgagttgcccaaggagggacagagcatatctttgctgaggcttggctgaggggcttatgatagggcttgcagtacctcacagccccctgtgggcacagacaccctgaggtttacccaggcaaatatattgattagcaggacaagggctctctcctcagtttctgctcccttccatctctctcccatacttgtctgaaaagggagacaaaaaatcttatacaagtggcatctcaatcctttccagtccagcacctcctggggcaggcagtgtgacttatttcctgtggtgaaatcacctgtttcacaagcctggcagcgcgacttctgagtctcatgac

SEQ ID NO: 108930 - DNA, 563 bp, Homo sapiens
  Payload ID: 1403
  Gene Symbol: ARRB1
  Gene Name: arrestin, beta 1
  ENST ID: ENST00000527385
  CDS Start-End: 1-218
gtgtctgccttccgctgccctgtaggtgctctggggaaacaacaccgacaccggggcctgtaccttctgcagagtgttcaagaaggccagtccaaatggaaagctcaccgtctacctgggaaagcgggactttgtggaccacatcgacctcgtggaccctgtggatggtgtggtcctggtggatcctgagtatctcaaagagcggagagtctatgtgacgctgacctgcgccttccgctatggccgggaggacctggatgtcctgggcctgacctttcgcaaggacctgtttgtggccaacgtacagtcgttcccaccggcccccgaggacaagaagcccctgacgcggctgcaggaacgcctcatcaagaagctgggcgagcacgcttaccctttcacctttgagatccctccaaaccttccatgttctgtgacactgcagccggggcccgaagacacggggaaggcttgcggtgtggactatgaagtcaaagccttctgcgcggagaatttggaggagaagatccacaagcggaattctgtgcgtctggtcatccggaagg

SEQ ID NO: 108931 - DNA, 925 bp, Homo sapiens
  Payload ID: 1403
  Gene Symbol: ARRB1
  Gene Name: arrestin, beta 1
  ENST ID: ENST00000532525
  CDS Start-End: 153-925
gggagagctgagcctgcggggctggccctggcctggctgctgctgcctgcagcccccagctcaggctccctccacctcacagtccactgctttggcgctgcttctgggctggcctcttcactccactgaatctttgggctctcatctgtaaaatgggagtgttcaagaaggccagtccaaatggaaagctcaccgtctacctgggaaagcgggactttgtggaccacatcgacctcgtggaccctgtggatggtgtggtcctggtggatcctgagtatctcaaagagcggagagtctatgtgacgctgacctgcgccttccgctatggccgggaggacctggatgtcctgggcctgacctttcgcaaggacctgtttgtggccaacgtacagtcgttcccaccggcccccgaggacaagaagcccctgacgcggctgcaggaacgcctcatcaagaagctgggcgagcacgcttaccctttcacctttgagatccctccaaaccttccatgttctgtgacactgcagccggggcccgaagacacggggaaggcttgcggtgtggactatgaagtcaaagccttctgcgcggagaatttggaggagaagatccacaagcggaattctgtgcgtctggtcatccggaaggttcagtatgccccagagaggcctggcccccagcccacagccgagaccaccaggcagttcctcatgtcggacaagcccttgcacctagaagcctctctggataaggagatctattaccatggagaacccatcagcgtcaacgtccacgtcaccaacaacaccaacaagacggtgaagaagatcaagatctcagtgcgccagtatgcagacatctgccttttcaacacagctcagtacaagtgccctgttgccatggaagaggctgatgacactgtggc

SEQ ID NO: 108932 - DNA, 593 bp, Homo sapiens
  Payload ID: 1403
  Gene Symbol: ARRB1
  Gene Name: arrestin, beta 1
  ENST ID: ENST00000524400
  CDS Start-End: 1-209
gtggaggaaggagaagggagaggccagcagcagccactgcaagagatgggagaggagaggccatggaaggagacttgcagcgggagaggctgagctcaccgtctacctgggaaagcgggactttgtggaccacatcgacctcgtggaccctgtggatggtgtggtcctggtggatcctgagtatctcaaagagcggagagtctatgtgacgctgacctgcgccttccgctatggccgggaggacctggatgtcctgggcctgacctttcgcaaggacctgtttgtggccaacgtacagtcgttcccaccggcccccgaggacaagaagcccctgacgcggctgcaggaacgcctcatcaagaagctgggcgagcacgcttaccctttcacctttgagatccctccaaaccttccatgttctgtgacactgcagccggggcccgaagacacggggaaggcttgcggtgtggactatgaagtcaaagccttctgcgcggagaatttggaggagaagatccacaagcggaattctgtgcgtctggtcatccggaaggttcagtatgccccagagaggcctggcccccagcccacag

SEQ ID NO: 108933 - DNA, 559 bp, Homo sapiens
  Payload ID: 1403
  Gene Symbol: ARRB1
  Gene Name: arrestin, beta 1
  ENST ID: ENST00000533609
  CDS Start-End: 1-180
agccactgcaagagatgggagaggagaggccatggaaggagacttgcagcgggagaggctgagagtgttcaagaaggccagtccaaatggaaagctcaccgtctacctgggaaagcgggactttgtggaccacatcgacctcgtggaccctgtggatggtgtggtcctggtggatcctgagtatctcaaagagcggagagtctatgtgacgctgacctgcgccttccgctatggccgggaggacctggatgtcctgggcctgacctttcgcaaggacctgtttgtggccaacgtacagtcgttcccaccggcccccgaggacaagaagcccctgacgcggctgcaggaacgcctcatcaagaagctgggcgagcacgcttaccctttcacctttgagatccctccaaaccttccatgttctgtgacactgcagccggggcccgaagacacggggaaggcttgcggtgtggactatgaagtcaaagccttctgcgcggagaatttggaggagaagatccacaagcggaattctgtgcgtctggtcatccggaaggttcag

SEQ ID NO: 108934 - DNA, 701 bp, Homo sapiens
  Payload ID: 1403
  Gene Symbol: ARRB1
  Gene Name: arrestin, beta 1
  ENST ID: ENST00000532447
  CDS Start-End: 1-586
gaggcctggcccccagcccacagccgagaccaccaggcagttcctcatgtcggacaagcccttgcacctagaagcctctctggataaggagatctattaccatggagaacccatcagcgtcaacgtccacgtcaccaacaacaccaacaagacggtgaagaagatcaagatctcagtgcgccagtatgcagacatctgccttttcaacacagctcagtacaagtgccctgttgccatggaagaggctgatgacactgtggcacccagctcgacgttctgcaaggtctacacactgacccccttcctagccaataaccgagagaagcggggcctcgccttggacgggaagctcaagcacgaagacacgaacttggcctctagcaccctgttgagggaaggtgccaaccgtgagatcctggggatcattgtttcctacaaagtgaaagtgaagctggtggtgtctcggggcggcgacgtggccgtggaactgcccttcaccctaatgcaccccaagcccaaagaggaacccccgcatcgggaagtgatgacgacattgtatttgaggactttgctcgccagagactgaaaggcatgaaggatgacaaggaggaagaggaggatggtaccggctctccacagctcaacaacagatagacgggccggccctgcctccacgtggctccggctccactctcgtgcac

SEQ ID NO: 108935 - DNA, 1895 bp, Homo sapiens
  Payload ID: 1404
  Gene Symbol: ARRB2
  Gene Name: arrestin, beta 2
  Uniprot ID: P32121
  ENST ID: ENST00000269260
  CDS Start-End: 234-1463
aatggccccgcgtgtctgctaggagagggcgggcagcgccgcggcgcgcgcgatccggctgacgcatctggccccggttccccaagaccagagcggggccgggagggagggggaagaggcgagagcgcggagggcgcgcgtgcgcattggcgcggggaggagcagggatcttggcagcgggcgaggaggctgcgagcgagccgcgaaccgagcgggcggcgggcgcgcgcaccatgggggagaaacccgggaccagggtcttcaagaagtcgagccctaactgcaagctcaccgtgtacttgggcaagcgggacttcgtagatcacctggacaaagtggaccctgtagatggcgtggtgcttgtggaccctgactacctgaaggaccgcaaagtgtttgtgaccctcacctgcgccttccgctatggccgtgaagacctggatgtgctgggcttgtccttccgcaaagacctgttcatcgccacctaccaggccttccccccggtgcccaacccaccccggccccccacccgcctgcaggaccggctgctgaggaagctgggccagcatgcccaccccttcttcttcaccataccccagaatcttccatgctccgtcacactgcagccaggcccagaggatacaggaaaggcctgcggcgtagactttgagattcgagccttctgtgctaaatcactagaagagaaaagccacaaaaggaactctgtgcggctggtgatccgaaaggtgcagttcgccccggagaaacccggcccccagccttcagccgaaaccacacgccacttcctcatgtctgaccggtccctgcacctcgaggcttccctggacaaggagctgtactaccatggggagcccctcaatgtaaatgtccacgtcaccaacaactccaccaagaccgtcaagaagatcaaagtctctgtgagacagtacgccgacatctgcctcttcagcaccgcccagtacaagtgtcctgtggctcaactcgaacaagatgaccaggtatctcccagctccacattctgtaaggtgtacaccataaccccactgctcagcgacaaccgggagaagcggggtctcgccctggatgggaaactcaagcacgaggacaccaacctggcttccagcaccatcgtgaaggagggtgccaacaaggaggtgctgggaatcctggtgtcctacagggtcaaggtgaagctggtggtgtctcgaggcggggatgtctctgtggagctgccttttgttcttatgcaccccaagccccacgaccacatccccctccccagaccccagtcagccgctccggagacagatgtccctgtggacaccaacctcattgaatttgataccaactatgccacagatgatgacattgtgtttgaggactttgcccggcttcggctgaaggggatgaaggatgacgactatgatgatcaactctgctaggaagcggggtgggaagaagggaggggatggggttgggagaggtgagggcaggattaagatccccactgtcaatgggggattgtcccagcccctcttcccttcccctcacctggaagcttcttcaaccaatcccttcacactctctcccccatccccccaagatacacactggaccctctcttgctgaatgtgggcattaattttttgactgcagctctgcttctccagccccgccgtgggtggcaagctgtgttcatacctaaattttctggaaggggacagtgaaaagaggagtgacaggagggaaagggggagacaaaactcctactctcaacctcacaccaacacctcccattatcactctctctgcccccattccttcaagaggagaccctttggggacaaggccgtttctttgtttctgagcataaa

SEQ ID NO: 108936 - DNA, 1769 bp, Homo sapiens
  Payload ID: 1404
  Gene Symbol: ARRB2
  Gene Name: arrestin, beta 2
  Uniprot ID: P32121
  ENST ID: ENST00000346341
  CDS Start-End: 89-1309
attggcgcggggaggagcagggatcttggcagcgggcgaggaggctgcgagcgagccgcgaaccgagcgggcggcgggcgcgcgcaccatgggggagaaacccgggaccagggtcttcaagaagtcgagccctaactgcaagctcaccgtgtacttgggcaagcgggacttcgtagatcacctggacaaagtggaccctgtagtgtttgtgaccctcacctgcgccttccgctatggccgtgaagacctggatgtgctgggcttgtccttccgcaaagacctgttcatcgccacctaccaggccttccccccggtgcccaacccaccccggccccccacccgcctgcaggaccggctgctgaggaagctgggccagcatgcccaccccttcttcttcaccataccccagaatcttccatgctccgtcacactgcagccaggcccagaggatacaggaaaggcctgcggcgtagactttgagattcgagccttctgtgctaaatcactagaagagaaaagccacaaaaggaactctgtgcggctggtgatccgaaaggtgcagttcgccccggagaaacccggcccccagccttcagccgaaaccacacgccacttcctcatgtctgaccggtccctgcacctcgaggcttccctggacaaggagctgtactaccatggggagcccctcaatgtaaatgtccacgtcaccaacaactccaccaagaccgtcaagaagatcaaagtctctgtgagacagtacgccgacatctgcctcttcagcaccgcccagtacaagtgtcctgtggctcaactcgaacaagatgaccaggtatctcccagctccacattctgtaaggtgtacaccataaccccactgctcagcgacaaccgggagaagcggggtctcgccctggatgggaaactcaagcacgaggacaccaacctggcttccagcaccatcgtgaaggagggtgccaacaaggaggtgctgggaatcctggtgtcctacagggtcaaggtgaagctggtggtgtctcgaggcggggatgtctctgtggagctgccttttgttcttatgcaccccaagccccacgaccacatccccctccccagaccccagtcagcacccacccccacaccccctcttcccgtccccccagccgctccggagacagatgtccctgtggacaccaacctcattgaatttgataccaactatgccacagatgatgacattgtgtttgaggactttgcccggcttcggctgaaggggatgaaggatgacgactatgatgatcaactctgctaggaagcggggtgggaagaagggaggggatggggttgggagaggtgagggcaggattaagatccccactgtcaatgggggattgtcccagcccctcttcccttcccctcacctggaagcttcttcaaccaatcccttcacactctctcccccatccccccaagatacacactggaccctctcttgctgaatgtgggcattaattttttgactgcagctctgcttctccagccccgccgtgggtggcaagctgtgttcatacctaaattttctggaaggggacagtgaaaagaggagtgacaggagggaaagggggagacaaaactcctactctcaacctcacaccaacacctcccattatcactctctctgcccccattccttcaagaggagaccctttggggacaaggccgtttctttgtttctgagcataaagaagaaaataaatcttttactaagcatg

SEQ ID NO: 108937 - DNA, 1236 bp, Homo sapiens
  Payload ID: 1404
  Gene Symbol: ARRB2
  Gene Name: arrestin, beta 2
  Uniprot ID: P32121
  ENST ID: ENST00000381488
  CDS Start-End: 30-1214
gaaccgagcgggcggcgggcgcgcgcaccatgggggagaaacccgggaccagggtcttcaagaagtcgagccctaactgcaagctcaccgtgtacttgggcaagcgggacttcgtagatcacctggacaaagtggaccctgtagtgtttgtgaccctcacctgcgccttccgctatggccgtgaagacctggatgtgctgggcttgtccttccgcaaagacctgttcatcgccacctaccaggccttccccccggtgcccaacccaccccggccccccacccgcctgcaggaccggctgctgaggaagctgggccagcatgcccaccccttcttcttcaccataccccagaatcttccatgctccgtcacactgcagccaggcccagaggatacaggaaaggcctgcggcgtagactttgagattcgagccttctgtgctaaatcactagaagagaaaagccacaaaaggaactctgtgcggctggtgatccgaaaggtgcagttcgccccggagaaacccggcccccagccttcagccgaaaccacacgccacttcctcatgtctgaccggtccctgcacctcgaggcttccctggacaaggagctgtactaccatggggagcccctcaatgtaaatgtccacgtcaccaacaactccaccaagaccgtcaagaagatcaaagtctctgtgagacagtacgccgacatctgcctcttcagcaccgcccagtacaagtgtcctgtggctcaactcgaacaagatgaccaggtatctcccagctccacattctgtaaggtgtacaccataaccccactgctcagcgacaaccgggagaagcggggtctcgccctggatgggaaactcaagcacgaggacaccaacctggcttccagcaccatcgtgaaggagggtgccaacaaggaggtgctgggaatcctggtgtcctacagggtcaaggtgaagctggtggtgtctcgaggcggggatgtctctgtggagctgccttttgttcttatgcaccccaagccccacgaccacatccccctccccagaccccagtcagccgctccggagacagatgtccctgtggacaccaacctcattgaatttgataccaactatgccacagatgatgacattgtgtttgaggactttgcccggcttcggctgaaggggatgaaggatgacgactatgatgatcaactctgctaggaagcggggtgggaagaaggga

SEQ ID NO: 108938 - DNA, 1779 bp, Homo sapiens
  Payload ID: 1404
  Gene Symbol: ARRB2
  Gene Name: arrestin, beta 2
  Uniprot ID: P32121
  ENST ID: ENST00000412477
  CDS Start-End: 30-1322
gaaccgagcgggcggcgggcgcgcgcaccatgggggagaaacccgggaccagggtcttcaagaagtcgagccctaactgcaagctcaccgtgtacttgggcaagcgggacttcgtagatcacctggacaaagtggaccctgtagatggcgtggtgcttgtggaccctgactacctgaaggaccgcaaagtgtttgtgaccctcacctgcgccttccgctatggccgtgaagacctggatgtgctgggcttgtccttccgcaaagacctgttcatcgccacctaccaggccttccccccggtgcccaacccaccccggccccccacccgcctgcaggaccggctgctgaggaagctgggccagcatgcccaccccttcttcttcaccgtgaggatgcccctgccctctgagggccagggggctggggctgggactgtgtctggggtggggataccccagaatcttccatgctccgtcacactgcagccaggcccagaggatacaggaaaggcctgcggcgtagactttgagattcgagccttctgtgctaaatcactagaagagaaaagccacaaaaggaactctgtgcggctggtgatccgaaaggtgcagttcgccccggagaaacccggcccccagccttcagccgaaaccacacgccacttcctcatgtctgaccggtccctgcacctcgaggcttccctggacaaggagctgtactaccatggggagcccctcaatgtaaatgtccacgtcaccaacaactccaccaagaccgtcaagaagatcaaagtctctgtgagacagtacgccgacatctgcctcttcagcaccgcccagtacaagtgtcctgtggctcaactcgaacaagatgaccaggtatctcccagctccacattctgtaaggtgtacaccataaccccactgctcagcgacaaccgggagaagcggggtctcgccctggatgggaaactcaagcacgaggacaccaacctggcttccagcaccatcgtgaaggagggtgccaacaaggaggtgctgggaatcctggtgtcctacagggtcaaggtgaagctggtggtgtctcgaggcggggatgtctctgtggagctgccttttgttcttatgcaccccaagccccacgaccacatccccctccccagaccccagtcagccgctccggagacagatgtccctgtggacaccaacctcattgaatttgataccaactatgccacagatgatgacattgtgtttgaggactttgcccggcttcggctgaaggggatgaaggatgacgactatgatgatcaactctgctaggaagcggggtgggaagaagggaggggatggggttgggagaggtgagggcaggattaagatccccactgtcaatgggggattgtcccagcccctcttcccttcccctcacctggaagcttcttcaaccaatcccttcacactctctcccccatccccccaagatacacactggaccctctcttgctgaatgtgggcattaattttttgactgcagctctgcttctccagccccgccgtgggtggcaagctgtgttcatacctaaattttctggaaggggacagtgaaaagaggagtgacaggagggaaagggggagacaaaactcctactctcaacctcacaccaacacctcccattatcactctctctgcccccattccttcaagaggagaccctttggggacaaggccgtttctttgtttctgagcataaagaagaaaataaatcttttactaagc

SEQ ID NO: 108939 - DNA, 709 bp, Homo sapiens
  Payload ID: 1404
  Gene Symbol: ARRB2
  Gene Name: arrestin, beta 2
  ENST ID: ENST00000574502
  CDS Start-End: 127-321
agggggaagaggcgagagcgcggagggcgcgcgtgcgcattggcgcggggaggagcagggatcttggcagcgggcgaggaggctgcgagcgagccgcgaaccgagcgggcggcgggcgcgcgcaccatgggggagaaacccgggaccagggtcttcaagaagtcgagccctaactgcaagctcaccgtgtacttgggcaagcgggacttcgtagatcacctggacaaagtggaccctgtagataccccagaatcttccatgctccgtcacactgcagccaggcccagaggatacaggaaaggcctgcggcgtagactttgagattcgagccttctgtgctaaatcactagaagagaaaagccacaaaaggaactctgtgcggctggtgatccgaaaggtgcagttcgccccggagaaacccggcccccagccttcagccgaaaccacacgccacttcctcatgtctgaccggtccctgcacctcgaggcttccctggacaaggagtgagacagtacgccgacatctgcctcttcagcaccgcccagtacaagtgtcctgtggctcaactcgaacaagatgaccaggtatctcccagctccacattctgtaaggtgtacaccataaccccactgctcagcgacaaccgggagaagcggggtctcgccctggatgggaaactcaagcacgaggacaccaacctggcttcca

SEQ ID NO: 108940 - DNA, 432 bp, Homo sapiens
  Payload ID: 1404
  Gene Symbol: ARRB2
  Gene Name: arrestin, beta 2
  ENST ID: ENST00000572497
  CDS Start-End: 32-256
gcgaaccgagcgggcggcgggcgcgcgcaccatgggggagaaacccgggaccagggtcttcaagaagtcgagccctaactgcaagccccttgccgcagaggctgctcagcctgagccagccacagggctgggtggggcaggcttgggtccccaagcaagaccacagaggaggaggccaaaagcaagccatgtgcctgtagccctcctaggagccaacccaagctcaccgtgtacttgggcaagcgggacttcgtagatcacctggacaaagtggaccctgtagatggcgtggtgcttgtggaccctgactacctgaaggaccgcaaagtgtttgtgaccctcacctgcgccttccgctatggccgtgaagacctggatgtgctgggcttgtccttccgcaaagacctgttcatcgccacctaccaggccttc

SEQ ID NO: 108941 - DNA, 1659 bp, Homo sapiens
  Payload ID: 1404
  Gene Symbol: ARRB2
  Gene Name: arrestin, beta 2
  ENST ID: ENST00000571206
  CDS Start-End: 907-1560
acacacacaaacacacctcgctggttgggctgagtcctccctgaggacacacacagacacacatgcacatacatgttcacacacacacctgactggttggctgaggacacacacacacacacacacacacacacacaaacacacacacaccgggctggtgggcagaggtgtgcagagataaaggagcagctcaaaagcctaaaggtccactagtctgagaaacgccaccaccctcactttccaacactattgggaggaaacctggaacaactccttcctgatagcccagcctggagatccccgggcagggcagccagttttgagggctccgatgccctgtcaccatcctccccaatctcccctgtgaccccttgacatcctcagctcaccgtgtacttgggcaagcgggacttcgtagatcacctggacaaagtggaccctgtagatggcgtggtgcttgtggaccctgactacctgaaggaccgcaaagtgtttgtgaccctcacctgcgccttccgctatggccgtgaagacctggatgtgctgggcttgtccttccgcaaagacctgttcatcgccacctaccaggccttccccccggtgcccaacccaccccggccccccacccgcctgcaggaccggctgctgaggaagctgggccagcatgcccaccccttcttcttcaccataccccagaatcttccatgctccgtcacactgcagccaggcccagaggatacaggaaaggcctgcggcgtagactttgagattcgagccttctgtgctaaatcactagaagagaaaagccacaaaaggaactctgtgcggctggtgatccgaaaggtgcagttcgccccggagaaacccggcccccagccttcagccgaaaccacacgccacttcctcatgtctgaccggtccctgcacctcgaggcttccctggacaaggagctgtactaccatggggagcccctcaatgtaaatgtccacgtcaccaacaactccaccaagaccgtcaagaagatcaaagtctctgtgagacagtacgccgacatctgcctcttcagcaccgcccagtacaagtgtcctgtggctcaactcgaacaagatgaccaggtatctcccagctccacattctgtaaggtgtacaccataaccccactgctcagcgacaaccgggagaagcggggtctcgccctggatgggaaactcaagcacgaggacaccaacctggcttccagcaccatcgtgaaggagggtgccaacaaggaggtgctgggaatcctggtgtcctacagggtcaaggtgaagctggtggtgtctcgaggcggggatgtctctgtggagctgccttttgttcttatgcaccccaagccccacgaccacatccccctccccagaccccagtcagccgctccggagacagatgtccctgtggacaccaacctcattgaatttgataccaactatgccacagatgatgacattgtgtttgaggactttgcccggcttcggctgaaggggatgaaggatgacgactatgatgatcaactctgctaggaagcggggtgggaagaagggaggggatggggttgggagaggtgagggcaggattaagatccccactgtcaatgggggattgtcccagcccctcttccc

SEQ ID NO: 108942 - DNA, 991 bp, Homo sapiens
  Payload ID: 1404
  Gene Symbol: ARRB2
  Gene Name: arrestin, beta 2
  ENST ID: ENST00000576235
  CDS Start-End: 1-591
gggggagaaacccgggaccagctcaccgtgtacttgggcaagcgggacttcgtagatcacctggacaaagtggaccctgtagatggcgtggtgcttgtggaccctgactacctgaaggaccgcaaagtgtttgtgaccctcacctgcgccttccgctatggccgtgaagacctggatgtgctgggcttgtccttccgcaaagacctgttcatcgccacctaccaggccttccccccggtgcccaacccaccccggccccccacccgcctgcaggaccggctgctgaggaagctgggccagcatgcccaccccttcttcttcaccataccccagaatcttccatgctccgtcacactgcagccaggcccagaggatacaggaaaggcctgcggcgtagactttgagattcgagccttctgtgctaaatcactagaagagaaaagccacaaaaggaactctgtgcggctggtgatccgaaaggtgcagttcgccccggagaaacccggcccccagccttcagccgaaaccacacgccacttcctcatgtctgaccggtccctgcacctcgaggcttccctggacaaggagtgagacagtacgccgacatctgcctcttcagcaccgcccagtacaagtgtcctgtggctcaactcgaacaagatgaccaggtatctcccagctccacattctgtaaggtgtacaccataaccccactgctcagcgacaaccgggagaagcggggtctcgccctggatgggaaactcaagcacgaggacaccaacctggcttccagcaccatcgtgaaggagggtgccaacaaggaggtgctgggaatcctggtgtcctacagggtcaaggtgaagctggtggtgtctcgaggcgggtgagtgtcatgggggagcctgggtgggggtcacactggctctctctagtcccatgtcgtcgtcctcttcacgatgcctctccccttccccagggatgtctctgtgga

SEQ ID NO: 108943 - DNA, 1660 bp, Homo sapiens
  Payload ID: 1404
  Gene Symbol: ARRB2
  Gene Name: arrestin, beta 2
  ENST ID: ENST00000572457
  CDS Start-End: 564-1217
gggaggagcagggatcttggcagcgggcgaggaggctgcgagcgagccgcgaaccgagcgggcggcgggcgcgcgcaccatgggggagaaacccgggaccagatggcgtggtgcttgtggaccctgactacctgaaggaccgcaaagtgtttgtgaccctcacctgcgccttccgctatggccgtgaagacctggatgtgctgggcttgtccttccgcaaagacctgttcatcgccacctaccaggccttccccccggtgcccaacccaccccggccccccacccgcctgcaggaccggctgctgaggaagctgggccagcatgcccaccccttcttcttcaccataccccagaatcttccatgctccgtcacactgcagccaggcccagaggatacaggaaaggcctgcggcgtagactttgagattcgagccttctgtgctaaatcactagaagagaaaagccacaaaaggaactctgtgcggctggtgatccgaaaggtgcagttcgccccggagaaacccggcccccagccttcagccgaaaccacacgccacttcctcatgtctgaccggtccctgcacctcgaggcttccctggacaaggagctgtactaccatggggagcccctcaatgtaaatgtccacgtcaccaacaactccaccaagaccgtcaagaagatcaaagtctctgtgagacagtacgccgacatctgcctcttcagcaccgcccagtacaagtgtcctgtggctcaactcgaacaagatgaccaggtatctcccagctccacattctgtaaggtgtacaccataaccccactgctcagcgacaaccgggagaagcggggtctcgccctggatgggaaactcaagcacgaggacaccaacctggcttccagcaccatcgtgaaggagggtgccaacaaggaggtgctgggaatcctggtgtcctacagggtcaaggtgaagctggtggtgtctcgaggcggggatgtctctgtggagctgccttttgttcttatgcaccccaagccccacgaccacatccccctccccagaccccagtcagccgctccggagacagatgtccctgtggacaccaacctcattgaatttgataccaactatgccacagatgatgacattgtgtttgaggactttgcccggcttcggctgaaggggatgaaggatgacgactatgatgatcaactctgctaggaagcggggtgggaagaagggaggggatggggttgggagaggtgagggcaggattaagatccccactgtcaatgggggattgtcccagcccctcttcccttcccctcacctggaagcttcttcaaccaatcccttcacactctctcccccatccccccaagatacacactggaccctctcttgctgaatgtgggcattaattttttgactgcagctctgcttctccagccccgccgtgggtggcaagctgtgttcatacctaaattttctggaaggggacagtgaaaagaggagtgacaggagggaaagggggagacaaaactcctactctcaacctcacaccaacacctcccattatcactctctctgcccccattccttcaagaggagaccctttggggacaaggccgtttctttgtttctgagcataaagaagaaaataa

SEQ ID NO: 108944 - DNA, 864 bp, Homo sapiens
  Payload ID: 1404
  Gene Symbol: ARRB2
  Gene Name: arrestin, beta 2
  ENST ID: ENST00000571428
  CDS Start-End: 526-864
cgagcgggcggcgggcgcgcgcaccatgggggagaaacccgggaccagctcaccgtgtacttgggcaagcgggacttcgtagatcacctggacaaagtggaccctgtagtgtttgtgaccctcacctgcgccttccgctatggccgtgaagacctggatgtgctgggcttgtccttccgcaaagacctgttcatcgccacctaccaggccttccccccggtgcccaacccaccccggccccccacccgcctgcaggaccggctgctgaggaagctgggccagcatgcccaccccttcttcttcaccataccccagaatcttccatgctccgtcacactgcagccaggcccagaggatacaggaaaggcctgcggcgtagactttgagattcgagccttctgtgctaaatcactagaagagaaaagccacaaaaggaactctgtgcggctggtgatccgaaaggtgcagttcgccccggagaaacccggcccccagccttcagccgaaaccacacgccacttcctcatgtctgaccggtccctgcacctcgaggcttccctggacaaggagctgtactaccatggggagcccctcaatgtaaatgtccacgtcaccaacaactccaccaagaccgtcaagaagatcaaagtctctgtgagacagtacgccgacatctgcctcttcagcaccgcccagtacaagtgtcctgtggctcaactcgaacaagatgaccaggtatctcccagctccacattctgtaaggtgtacaccataaccccactgctcagcgacaaccgggagaagcggggtctcgccctggatgggaaactcaagcacgaggacaccaacctggcttccagcacc

SEQ ID NO: 108945 - DNA, 1348 bp, Homo sapiens
  Payload ID: 1404
  Gene Symbol: ARRB2
  Gene Name: arrestin, beta 2
  ENST ID: ENST00000574954
  CDS Start-End: 638-1291
gcgcattggcgcggggaggagcagggatcttggcagcgggcgaggaggctgcgagcgagccgcgaaccgagcgggcggcgggcgcgcgcaccatgggggagaaacccgggaccagctcaccgtgtacttgggcaagcgggacttcgtagatcacctggacaaagtggaccctgtagatggcgtggtgcttgtggaccctgactacctgaaggaccgcaaagtgtttgtgaccctcacctgcgccttccgctatggccgtgaagacctggatgtgctgggcttgtccttccgcaaagacctgttcatcgccacctaccaggccttccccccggtgcccaacccaccccggccccccacccgcctgcaggaccggctgctgaggaagctgggccagcatgcccaccccttcttcttcaccataccccagaatcttccatgctccgtcacactgcagccaggcccagaggatacaggaaaggcctgcggcgtagactttgagattcgagccttctgtgctaaatcactagaagagaaaagccacaaaaggaactctgtgcggctggtgatccgaaaggtgcagttcgccccggagaaacccggcccccagccttcagccgaaaccacacgccacttcctcatgtctgaccggtccctgcacctcgaggcttccctggacaaggagctgtactaccatggggagcccctcaatgtaaatgtccacgtcaccaacaactccaccaagaccgtcaagaagatcaaagtctctgtgagacagtacgccgacatctgcctcttcagcaccgcccagtacaagtgtcctgtggctcaactcgaacaagatgaccaggtatctcccagctccacattctgtaaggtgtacaccataaccccactgctcagcgacaaccgggagaagcggggtctcgccctggatgggaaactcaagcacgaggacaccaacctggcttccagcaccatcgtgaaggagggtgccaacaaggaggtgctgggaatcctggtgtcctacagggtcaaggtgaagctggtggtgtctcgaggcggggatgtctctgtggagctgccttttgttcttatgcaccccaagccccacgaccacatccccctccccagaccccagtcagccgctccggagacagatgtccctgtggacaccaacctcattgaatttgataccaactatgccacagatgatgacattgtgtttgaggactttgcccggcttcggctgaaggggatgaaggatgacgactatgatgatcaactctgctaggaagcggggtgggaagaagggaggggatggggttgggagaggtgagggcaggattaa

SEQ ID NO: 108946 - DNA, 1579 bp, Homo sapiens
  Payload ID: 1404
  Gene Symbol: ARRB2
  Gene Name: arrestin, beta 2
  ENST ID: ENST00000575877
  CDS Start-End: 24-1016
agcgggcggcgggcgcgcgcaccatgggggagaaacccgggaccagggtcttcaagaagtcgagccctaactgcaagctcaccgtgtacttgggcaagcgggacttcgtagatcacctggacaaagtggaccctgtagatggcgtggtgcttgtggaccctgactacctgaaggaccgcaaagtgtttgtgaccctcacctgcgccttccgctatggccgtgaagacctggatgtgctgggcttgtccttccgcaaagacctgttcatcgccacctaccaggccttccccccggtgcccaacccaccccggccccccacccgcctgcaggaccggctgctgaggaagctgggccagcatgcccaccccttcttcttcaccataccccagaatcttccatgctccgtcacactgcagccaggcccagaggatacaggaaaggcctgcggcgtagactttgagattcgagccttctgtgctaaatcactagaagagaaaagccacaaaaggaactctgtgcggctggtgatccgaaaggtgcagttcgccccggagaaacccggcccccagccttcagccgaaaccacacgccacttcctcatgtctgaccggtccctgcacctcgaggcttccctggacaaggagctgtactaccatggggagcccctcaatgtaaatgtccacgtcaccaacaactccaccaagaccgtcaagaagatcaaagtctctgtgagacagtacgccgacatctgcctcttcagcaccgcccagtacaagtgtcctgtggctcaactcgaacaagatgaccagcgtgaaggagggtgccaacaaggaggtgctgggaatcctggtgtcctacagggtcaaggtgaagctggtggtgtctcgaggcggggatgtctctgtggagctgccttttgttcttatgcaccccaagccccacgaccacatccccctccccagaccccagtcagccgctccggagacagatgtccctgtggacaccaacctcattgaatttgataccaactatgccacagatgatgacattgtgtttgaggactttgcccggcttcggctgaaggggatgaaggatgacgactatgatgatcaactctgctaggaagcggggtgggaagaagggaggggatggggttgggagaggtgagggcaggattaagatccccactgtcaatgggggattgtcccagcccctcttcccttcccctcacctggaagcttcttcaaccaatcccttcacactctctcccccatccccccaagatacacactggaccctctcttgctgaatgtgggcattaattttttgactgcagctctgcttctccagccccgccgtgggtggcaagctgtgttcatacctaaattttctggaaggggacagtgaaaagaggagtgacaggagggaaagggggagacaaaactcctactctcaacctcacaccaacacctcccattatcactctctctgcccccattccttcaagaggagaccctttggggacaaggccgtttctttgtttctgagcataaagaagaaaataaatcttttactaagc

SEQ ID NO: 108947 - DNA, 1280 bp, Homo sapiens
  Payload ID: 1405
  Gene Symbol: ASNA1
  Gene Name: arsA arsenite transporter, ATP-binding, homolog 1 (bacterial)
  Uniprot ID: O43681
  ENST ID: ENST00000357332
  CDS Start-End: 15-1061
gagccagttccaaaatggcggcaggggtggccgggtggggggttgaggcagaggagttcgaagatgctcctgatgtggagccgctggagcctacacttagcaacatcatcgagcagcgcagcctgaagtggatcttcgtcgggggcaagggtggtgtgggcaagaccacctgcagctgcagcctggcagtccagctctccaaggggcgtgagagtgttctgatcatctccacagacccagcacacaacatctcagatgcttttgaccagaagttctcaaaggtgcctaccaaggtcaaaggctatgacaacctctttgctatggagattgaccccagcctgggcgtggcggagctgcctgacgagttcttcgaggaggacaacatgctgagcatgggcaagaagatgatgcaggaggccatgagcgcatttcccggcatcgatgaggccatgagctatgccgaggtcatgaggctggtgaagggcatgaacttctcggtggtggtatttgacacggcacccacgggccacaccctgaggctgctcaacttccccaccatcgtggagcggggcctgggccggcttatgcagatcaagaaccagatcagccctttcatctcacagatgtgcaacatgctgggcctgggggacatgaacgcagaccagctggcctccaagctggaggagacgctgcccgtcatccgctcagtcagcgaacagttcaaggaccctgagcagacaactttcatctgcgtatgcattgctgagttcctgtccctgtatgagacagagaggctgatccaggagctggccaagtgcaagattgacacacacaatataattgtcaaccagctcgtcttccccgaccccgagaagccctgcaagatgtgtgaggcccgtcacaagatccaggccaagtatctggaccagatggaggacctgtatgaagacttccacatcgtgaagctgccgctgttaccccatgaggtgcggggggcagacaaggtcaacaccttctcggccctcctcctggagccctacaagccccccagtgcccagtagcacagctgccagccccaaccgctgccatttcacactcaccctccaccctccccaccccctcggggcagagtttgcacaaagtcccccccataatacagggggagccacttgggcaggaggcagggaggggtccattccccctggtggggctggtggggagctgtagttgccccctacctctcccacctcttgctcttcaataaaatgatcttaaactgc

SEQ ID NO: 108948 - DNA, 1368 bp, Homo sapiens
  Payload ID: 1405
  Gene Symbol: ASNA1
  Gene Name: arsA arsenite transporter, ATP-binding, homolog 1 (bacterial)
  Uniprot ID: O43681
  ENST ID: ENST00000591090
  CDS Start-End: 103-1149
gtttggctggttgctaaggtgaggttggcgctaccggaacataagagtgattggtgttcttcgtatggtgcgctccgctggatcacgtgagccagttccaaaatggcggcaggggtggccgggtggggggttgaggcagaggagttcgaagatgctcctgatgtggagccgctggagcctacacttagcaacatcatcgagcagcgcagcctgaagtggatcttcgtcgggggcaagggtggtgtgggcaagaccacctgcagctgcagcctggcagtccagctctccaaggggcgtgagagtgttctgatcatctccacagacccagcacacaacatctcagatgcttttgaccagaagttctcaaaggtgcctaccaaggtcaaaggctatgacaacctctttgctatggagattgaccccagcctgggcgtggcggagctgcctgacgagttcttcgaggaggacaacatgctgagcatgggcaagaagatgatgcaggaggccatgagcgcatttcccggcatcgatgaggccatgagctatgccgaggtcatgaggctggtgaagggcatgaacttctcggtggtggtatttgacacggcacccacgggccacaccctgaggctgctcaacttccccaccatcgtggagcggggcctgggccggcttatgcagatcaagaaccagatcagccctttcatctcacagatgtgcaacatgctgggcctgggggacatgaacgcagaccagctggcctccaagctggaggagacgctgcccgtcatccgctcagtcagcgaacagttcaaggaccctgagcagacaactttcatctgcgtatgcattgctgagttcctgtccctgtatgagacagagaggctgatccaggagctggccaagtgcaagattgacacacacaatataattgtcaaccagctcgtcttccccgaccccgagaagccctgcaagatgtgtgaggcccgtcacaagatccaggccaagtatctggaccagatggaggacctgtatgaagacttccacatcgtgaagctgccgctgttaccccatgaggtgcggggggcagacaaggtcaacaccttctcggccctcctcctggagccctacaagccccccagtgcccagtagcacagctgccagccccaaccgctgccatttcacactcaccctccaccctccccaccccctcggggcagagtttgcacaaagtcccccccataatacagggggagccacttgggcaggaggcagggaggggtccattccccctggtggggctggtggggagctgtagttgccccctacctctcccacctcttgctcttcaataaaatgatcttaaactgc

SEQ ID NO: 108949 - DNA, 848 bp, Homo sapiens
  Payload ID: 1405
  Gene Symbol: ASNA1
  Gene Name: arsA arsenite transporter, ATP-binding, homolog 1 (bacterial)
  ENST ID: ENST00000586561
  CDS Start-End: 249-848
gggagtagcctagaccgtaccgatgtgttcattaggtagggggaacccttggaaaattatagaccagaggttgacaaagtgaaccctggaagcaaagaatagtgaaaatataatttatatttctcctaaaaggcaagtaatgaggaaattaactcatgctcctagcttcgctaggaatgtgatagagaatttcccctgtaggttcttcgtatggtgcgctccgctggatcacgtgagccagttccaaaatggcggcaggggtggccgggtggggggttgaggcagaggagttcgaagatgctcctgatgtggagccgctggagcctacacttagcaacatcatcgagcagcgcagcctgaagtggatcttcgtcgggggcaagggtggtgtgggcaagaccacctgcagctgcagcctggcagtccagctctccaaggggcgtgagagtgttctgatcatctccacagacccagcacacaacatctcagatgcttttgaccagaagttctcaaaggtgcctaccaaggtcaaaggctatgacaacctctttgctatggagattgaccccagcctgggcgtggcggagctgcctgacgagttcttcgaggaggacaacatgctgagcatgggcaagaagatgatgcaggaggccatgagcgcatttcccggcatcgatgaggccatgagctatgccgaggtcatgaggctggtgaagggcatgaacttctcggtggtggtatttgacacggcacccacgggccacaccctgaggctgctcaacttccccaccatcgtggagcggggcctgggccggcttatgcagatcaagaaccagatcagccctttc

SEQ ID NO: 108950 - DNA, 1214 bp, Homo sapiens
  Payload ID: 1405
  Gene Symbol: ASNA1
  Gene Name: arsA arsenite transporter, ATP-binding, homolog 1 (bacterial)
  ENST ID: ENST00000611688
  CDS Start-End: 1-996
atgctcgatgtggagccgctggagcctacacttagcaacatcatcgagcagcgcagcctgaagtggatcttcgtcgggggcaagggtggtgtgggcaagaccacctgcagctgcagcctggcagtccagctctccaaggggcgtgagagtgttctgatcatctccacagacccagcacacaacatctcagatgcttttgaccagaagttctcaaaggtgcctaccaaggtcaaaggctatgacaacctctttgctatggagattgaccccagcctgggcgtggcggagctgcctgacgagttcttcgaggaggacaacatgctgagcatgggcaagaagatgatgcaggaggccatgagcgcatttcccggcatcgatgaggccatgagctatgccgaggtcatgaggctggtgaagggcatgaacttctcggtggtggtatttgacacggcacccacgggccacaccctgaggctgctcaacttccccaccatcgtggagcggggcctgggccggcttatgcagatcaagaaccagatcagccctttcatctcacagatgtgcaacatgctgggcctgggggacatgaacgcagaccagctggcctccaagctggaggagacgctgcccgtcatccgctcagtcagcgaacagttcaaggaccctgagcagacaactttcatctgcgtatgcattgctgagttcctgtccctgtatgagacagagaggctgatccaggagctggccaagtgcaagattgacacacacaatataattgtcaaccagctcgtcttccccgaccccgagaagccctgcaagatgtgtgaggcccgtcacaagatccaggccaagtatctggaccagatggaggacctgtatgaagacttccacatcgtgaagctgccgctgttaccccatgaggtgcggggggcagacaaggtcaacaccttctcggccctcctcctggagccctacaagccccccagtgcccagtagcacagctgccagccccaaccgctgccatttcacactcaccctccaccctccccaccccctcggggcagagtttgcacaaagtcccccccataatacagggggagccacttgggcaggaggcagggaggggtccattccccctggtggggctggtggggagctgtagttgccccctacctctcccacctcttgctcttcaataaaatgatcttaaactg

SEQ ID NO: 108951 - DNA, 2404 bp, Homo sapiens
  Payload ID: 1406
  Gene Symbol: AS3MT
  Gene Name: arsenite methyltransferase
  Uniprot ID: Q9HBK9
  ENST ID: ENST00000369880
  CDS Start-End: 78-1205
gagacagtgagtgcgcgccctgagtcgcaggccgaggagacagtgagtgcgcgccctgagtcgcaggccgaggagacatggctgcacttcgtgacgctgagatacagaaggacgtgcagacctactacgggcaggtgctgaagagatcggcagacctccagaccaacggctgtgtcaccacagccaggccggtccccaagcacatccgggaagccttgcaaaatgtacacgaagaagtagccctaagatattatggctgtggtctggtgatccctgagcatctagaaaactgctggattttggatctgggtagtggaagtggcagagattgctatgtacttagccagctggttggtgaaaaaggacacgtgactggaatagacatgaccaaaggccaggtggaagtggctgaaaagtatcttgactatcacatggaaaaatatggcttccaggcatctaatgtgacttttattcatggctacattgagaagttgggagaggctggaatcaagaatgagagccatgatattgttgtatcaaactgtgttattaaccttgtgcctgataaacaacaagtgcttcaggaggcatatcgggtgctgaagcatggtggggagttatatttcagtgacgtctatacgagccttgaactgccagaagaaatcaggacacacaaagttttatggggtgagtgtctgggtggtgctttatactggaaggaacttgctgtccttgctcaaaaaattgggttctgccctccacgtttggtcactgccaatctcattacaattcaaaacaaggaactggaaagagttatcggtgactgtcgttttgtttctgcaacatttcgcctcttcaaacactctaagacaggaccaaccaagagatgccaagttatttacaatggaggaattacaggacatgaaaaagaactaatgtttgatgccaattttacatttaaggaaggtgaaattgttgaagtggatgaagaaacagcagctatcttgaagaattcaagatttgctcaagattttctgatcagaccaattggagagaagttgccaacatctggaggctgttctgctttggagttaaaggatataatcacagatccatttaagcttgcagaagagtctgacagtatgaagtccagatgtgtccctgatgctgctggaggctgctgtggcacaaagaaaagctgctaaatctatagccaaccaggggaccacagtagtgggcaagagtgatctgcatgttttttaacctgcttttccccatagcacagaccataagaaacaacaaatggggccgggcacagtggctcatgcctataatcccagcactttgggaggccgaggcaggcagatcacctgaggtcaggagtttgataccagcctggccaacatggtgaaatcctgtctctaccaaaaatacaaaaaaaattagctgggcatggtggtgcacacctatagtctcagctactcgggaggctgaggcaggagaattgcttgaacccaggaagtagaggctgcagtgagtaagcatcacgccactgtactccagcctgggcaacagagcaagactctgtctcaaaagcaaaaaaaaaaaaaaaaaaagaaagaaagaaaaagaaaacaacaaatggcagagagccaccatattccaaatcactgaaaaaaataaatgaattatttttatttatttatttatttttttgagatggagtctcggtctgttgcccaggctgaagtgcagtggccccatctcaactcactgcaagctccacctcctgggttcacgccattctcctgcctcagactcccaagtagctgggactacaggcacctaccaccatgcccagctaattttttgtatttttagtagagacggggtttcaccatgttagccaggatggtcttgatctcctgacctcgtgatccgcccgcctcggcctcccaaagtgctgggattacaagcatgagccactgcgcccggccataaatgaattatttttaagaggcattgattaaagattcacagcaaatcactagttaagcagattttttttctatttcctacttcaaagttctggtgccacatagtggtcagaaatggaacagagaagctgtcttaagccttgttcaagaagcaggaaaggcatcagaagaagtaacagttggcagagggtctcaggaaaaacatcttccttctgatcttttgcatagcaccttttggaattttcatcatgtttgcttattaaacaaagctcctactgccatcatactaatcatgcaaaaagattgccaaatcatgtttggtaggaggacttttgaggtagcttttgaacaaatgtttttttcttttttctttttttttgcaataaagaaaacaaattaatcataaa

SEQ ID NO: 108952 - DNA, 1723 bp, Homo sapiens
  Payload ID: 1406
  Gene Symbol: AS3MT
  Gene Name: arsenite methyltransferase
  ENST ID: ENST00000615257
  CDS Start-End: 78-1094
gagacagtgagtgcgcgccctgagtcgcaggccgaggagacagtgagtgcgcgccctgagtcgcaggccgaggagacatggctgcacttcgtgacgctgagatacagaaggacgtgcagacctactacgggcaggtgctgaagagatcggcagacctccagaccaacggctgtgtcaccacagccaggccggtccccaagcacatccgggaagccttgcaaaatgtacacgaagaagtagccctaagatattatggctgtggtctggtgatccctgagcatctagaaaactgctggattttggatctgggtagtggaagtggcagagattgctatgtacttagccagctggttggtgaaaaaggacacgtgactggaatagacatgaccaaaggccaggtggaagtggctgaaaagtatcttgactatcacatggaaaaatatggcttccaggcatctaatgtgacttttattcatggctacattgagaagttgggagaggctggaatcaagaatgagagccatgatattgttgtatcaaactgtgttattaaccttgtgcctgataaacaacaagtgcttcaggaggcatatcgggtgctgaagcatggtggggagttatatttcagtgacgtctatacgagccttgaactgccagaagaaatcaggacacacaaagttttatggggtgagtgtctgggtggtgctttatactggaaggaacttgctgtccttgctcaaaaaattgggttctgccctccacgtttggtcactgccaatctcattacaattcaaaacaaggaactggaaagagttatcggtgactgtcgttttgtttctgcaacatttcgcctcttcaaacactctaagacaggaccaaccaagagatgccaagttatttacaatggaggaattacaggacatgaaaaagaactaatgtttgatgccaattttacatttaaggaaggtgaaattgttgaagtggatgaagaaacagcagctatcttgaagaattcaagatttgctcaagattttctgatcagaccaattggagagaagttgccaacatctggagctgttctgctttggagttaaaggatataatcacagatccatttaagcttgcagaagagtctgacagtatgaagtccagatgtgtccctgatgctgctggaggctgctgtggcacaaagaaaagctgctaaatctatagccaaccaggggaccacagtagtgggcaagagtgatctgcatgttttttaacctgcttttccccatagcacagaccataagaaacaacaaatgagccactgcgcccggccataaatgaattatttttaagaggcattgattaaagattcacagcaaatcactagttaagcagattttttttctatttcctacttcaaagttctggtgccacatagtggtcagaaatggaacagagaagctgtcttaagccttgttcaagaagcaggaaaggcatcagaagaagtaacagttggcagagggtctcaggaaaaacatcttccttctgatcttttgcatagcaccttttggaattttcatcatgtttgcttattaaacaaagctcctactgccatcatactaatcatgcaaaaagattgccaaatcatgtttggtaggaggacttttgaggtagcttttgaacaaatgtttttttcttttttctttttttttgcaataaagaaaacaaattaatc

SEQ ID NO: 108953 - DNA, 1003 bp, Homo sapiens
  Payload ID: 1407
  Gene Symbol: ARTN
  Gene Name: artemin
  Uniprot ID: Q5T4W7
  ENST ID: ENST00000372354
  CDS Start-End: 299-961
ctctgagcttctctgagccttgtttgctcatctggaaaaaggggattaaaccatttacctcatggagttgtgaaagaatagctgcaaagcacctaacacatagtaaggttcccagtgcagctacttctgctgggttgagtctagctgtgtaggccccttgttcctcacctggagaaactggggtggcaggccggtcccccacaaaagataactcatctcttaatttgcaagctgcctcaacaggagggtgggggaacagctcaacaatggctgatgggcgctcctggtgttgatagagatggaacttggacttggaggcctctccacgctgtcccactgcccctggcctaggcagcagcctgccctgtggcccaccctggccgctctggctctgctgagcagcgtcgcagaggcctccctgggctccgcgccccgcagccctgccccccgcgaaggccccccgcctgtcctggcgtcccccgccggccacctgccggggggacgcacggcccgctggtgcagtggaagagcccggcggccgccgccgcagccttctcggcccgcgcccccgccgcctgcacccccatctgctcttccccgcgggggccgcgcggcgcgggctgggggcccgggcagccgcgctcgggcagcgggggcgcggggctgccgcctgcgctcgcagctggtgccggtgcgcgcgctcggcctgggccaccgctccgacgagctggtgcgtttccgcttctgcagcggctcctgccgccgcgcgcgctctccacacgacctcagcctggccagcctactgggcgccggggccctgcgaccgcccccgggctcccggcccgtcagccagccctgctgccgacccacgcgctacgaagcggtctccttcatggacgtcaacagcacctggagaaccgtggaccgcctctccgccaccgcctgcggctgcctgggctgagggctcgctccagggctttgcagactggacccttaccggtgg

SEQ ID NO: 108954 - DNA, 1921 bp, Homo sapiens
  Payload ID: 1407
  Gene Symbol: ARTN
  Gene Name: artemin
  Uniprot ID: Q5T4W7
  ENST ID: ENST00000372359
  CDS Start-End: 783-1445
actggccgctgagagaagaatcgggtggagcagagagcagctgctgcagggcagacagccggacccccaaatctgcacgtaccagcagtcagccgccccacgcagggaccggcttacccctcgctccccgccctcactcactttctcccgccctcggcccggcctcccagctctctacttcgcgagtctacaaactcaactcccggtttccgtgcctctccaccgctcgagttctctactctccatatccgaggggcccctcccagcatctacccccctcccaacctcgggggacctagccaagctaggggggactggatccgacgggtggagcagccaggtgagccccgaaaggtggggcggggcaggggcgctcccagccccaccccgggatctggtgacgctggggctggaatttgacaccggacggctgcggcggcgggcaggaggctgctgagggatggagttgggcccggcccccagacaaggcccgggggctccgccagcagcaggtccctcgggccccagccctcgctgccacccgggcctggagccccacacccgagggtgcagactggctgccaaggccacacttttggctaaaagaggcactgccaggtgtacagtcctgggcatgcgctgtttgagcttcgggggagagcccagcactggtccccggaaaggtgcctagaagaacaaggtgcaggaccccgtgctgcctcaacaggagggtgggggaacagctcaacaatggctgatgggcgctcctggtgttgatagagatggaacttggacttggaggcctctccacgctgtcccactgcccctggcctaggcagcagcctgccctgtggcccaccctggccgctctggctctgctgagcagcgtcgcagaggcctccctgggctccgcgccccgcagccctgccccccgcgaaggccccccgcctgtcctggcgtcccccgccggccacctgccggggggacgcacggcccgctggtgcagtggaagagcccggcggccgccgccgcagccttctcggcccgcgcccccgccgcctgcacccccatctgctcttccccgcgggggccgcgcggcgcgggctgggggcccgggcagccgcgctcgggcagcgggggcgcggggctgccgcctgcgctcgcagctggtgccggtgcgcgcgctcggcctgggccaccgctccgacgagctggtgcgtttccgcttctgcagcggctcctgccgccgcgcgcgctctccacacgacctcagcctggccagcctactgggcgccggggccctgcgaccgcccccgggctcccggcccgtcagccagccctgctgccgacccacgcgctacgaagcggtctccttcatggacgtcaacagcacctggagaaccgtggaccgcctctccgccaccgcctgcggctgcctgggctgagggctcgctccagggctttgcagactggacccttaccggtggctcttcctgcctgggaccctcccgcagagtcccactagccagcggcctcagccagggacgaaggcctcaaagctgagaggcccctgccggtgggtgatggatatcatccccgaacaggtgaagggacaactgactagcagccccagagccctcaccctgcggatcccagcctaaaagacaccagagacctcagctatggagcccttcggacccacttctcacagactctggcactggccaggcctcgaacctgggacccctcctctgatgaacactacagtggctgaggcatcagcccccgcccaggccctgtagggacagcatttgaaggacacatattgcagttgcttggttgaaagtgcctgtgctggaactggcctgtactcactcatgggagctggcccctatttattatttctaagttatttatttac

SEQ ID NO: 108955 - DNA, 1943 bp, Homo sapiens
  Payload ID: 1407
  Gene Symbol: ARTN
  Gene Name: artemin
  Uniprot ID: Q5T4W7
  ENST ID: ENST00000414809
  CDS Start-End: 783-1469
actggccgctgagagaagaatcgggtggagcagagagcagctgctgcagggcagacagccggacccccaaatctgcacgtaccagcagtcagccgccccacgcagggaccggcttacccctcgctccccgccctcactcactttctcccgccctcggcccggcctcccagctctctacttcgcgagtctacaaactcaactcccggtttccgtgcctctccaccgctcgagttctctactctccatatccgaggggcccctcccagcatctacccccctcccaacctcgggggacctagccaagctaggggggactggatccgacgggtggagcagccaggtgagccccgaaaggtggggcggggcaggggcgctcccagccccaccccgggatctggtgacgctggggctggaatttgacaccggacggctgcggcggcgggcaggaggctgctgagggatggagttgggcccggcccccagacaaggcccgggggctccgccagcagcaggtccctcgggccccagccctcgctgccacccgggcctggagccccacacccgagggtgcagactggctgccaaggccacacttttggctaaaagaggcactgccaggtgtacagtcctgggcatgcgctgtttgagcttcgggggagagcccagcactggtccccggaaaggtgcctagaagaacaaggtgcaggaccccgtgctgcctcaacaggagggtgggggaacagctcaacaatggctgatgggcgctcctggtgttgatagagatggaacttggacttggaggcctctccacgctgtcccactgcccctggcctaggcagcaggctccacttggtctctccgcgcagcctgccctgtggcccaccctggccgctctggctctgctgagcagcgtcgcagaggcctccctgggctccgcgccccgcagccctgccccccgcgaaggccccccgcctgtcctggcgtcccccgccggccacctgccggggggacgcacggcccgctggtgcagtggaagagcccggcggccgccgccgcagccttctcggcccgcgcccccgccgcctgcacccccatctgctcttccccgcgggggccgcgcggcgcgggctgggggcccgggcagccgcgctcgggcagcgggggcgcggggctgccgcctgcgctcgcagctggtgccggtgcgcgcgctcggcctgggccaccgctccgacgagctggtgcgtttccgcttctgcagcggctcctgccgccgcgcgcgctctccacacgacctcagcctggccagcctactgggcgccggggccctgcgaccgcccccgggctcccggcccgtcagccagccctgctgccgacccacgcgctacgaagcggtctccttcatggacgtcaacagcacctggagaaccgtggaccgcctctccgccaccgcctgcggctgcctgggctgagggctcgctccagggctttgcagactggacccttaccggtggctcttcctgcctgggaccctcccgcagagtcccactagccagcggcctcagccagggacgaaggcctcaaagctgagaggcccctgccggtgggtgatggatatcatccccgaacaggtgaagggacaactgactagcagccccagagccctcaccctgcggatcccagcctaaaagacaccagagacctcagctatggagcccttcggacccacttctcacagactctggcactggccaggcctcgaacctgggacccctcctctgatgaacactacagtggctgaggcatcagcccccgcccaggccctgtagggacagcatttgaaggacacatattgcagttgcttggttgaaagtgcctgtgctggaactggcctgtactcactcatgggagctggcccctatttattatttctaagttatttattt

SEQ ID NO: 108956 - DNA, 889 bp, Homo sapiens
  Payload ID: 1407
  Gene Symbol: ARTN
  Gene Name: artemin
  Uniprot ID: Q5T4W7
  ENST ID: ENST00000438616
  CDS Start-End: 176-889
aggtgtgggagggaaaatggtcagggagggaccaggtgaatgggaggaggagcgggacttctctgaatggtcggtgcactcaggtgattcctcccctgggctcccagaggcagcaaacccattatactggaacctaggcccttcctgagtttcccctccacacagctaggagcccatgcccggcctgatctcagcccgaggacagcccctccttgaggtccttcctccccaagcccacctgggtgccctctttctccctgaggctccacttggtctctccgcgcagcctgccctgtggcccaccctggccgctctggctctgctgagcagcgtcgcagaggcctccctgggctccgcgccccgcagccctgccccccgcgaaggccccccgcctgtcctggcgtcccccgccggccacctgccggggggacgcacggcccgctggtgcagtggaagagcccggcggccgccgccgcagccttctcggcccgcgcccccgccgcctgcacccccatctgctcttccccgcgggggccgcgcggcgcgggctgggggcccgggcagccgcgctcgggcagcgggggcgcggggctgccgcctgcgctcgcagctggtgccggtgcgcgcgctcggcctgggccaccgctccgacgagctggtgcgtttccgcttctgcagcggctcctgccgccgcgcgcgctctccacacgacctcagcctggccagcctactgggcgccggggccctgcgaccgcccccgggctcccggcccgtcagccagccctgctgccgacccacgcgctacgaagcggtctccttcatggacgtcaacagcacctggagaaccgtggaccgcctctccgccaccgcctgcggctgcctgggctga

SEQ ID NO: 108957 - DNA, 471 bp, Homo sapiens
  Payload ID: 1407
  Gene Symbol: ARTN
  Gene Name: artemin
  ENST ID: ENST00000479128
  CDS Start-End: 134-364
ttcgggggagagcccagcactggtccccggaaaggtgcctagaagaacaaggtgcaggaccccgtgctgcctcaacaggagggtgggggaacagctcaacaatggctgatgggcgctcctggtgttgatagagatggaacttggacttggaggcctctccacgctgtcccactgcccctggcctaggcagcaggctccacttggtctctccgcgcagcctgccctgtggcccaccctggccgctctggctctgctgagcagcgtcgcagaggcctccctgggctccgcgccccgcagccctgccccccgcgaaggccccccgcctgtcctggcgtcccccgccggccacctgccgggtaggtgagagggcgagggggcggggcggggctggcccgggacaccgcgcgtgactgggtctcattccagggggacgcacggcccgctggtgcagtggaagagcccggcggccgc

SEQ ID NO: 108958 - DNA, 477 bp, Homo sapiens
  Payload ID: 1407
  Gene Symbol: ARTN
  Gene Name: artemin
  ENST ID: ENST00000477048
  CDS Start-End: 279-477
tggggcggggcaggggcgctcccagccccaccccgggatctggtgacgctggggctggaatttgacaccggacggctgcggcggcgggcaggaggctgctgagggatggagttgggcccggcccccagacaaggcccgggggctccgccagcagcaggtccctcgggccccagccctcgctgccacccgggcctggagccccacacccgagctgcctcaacaggagggtgggggaacagctcaacaatggctgatgggcgctcctggtgttgatagagatggaacttggacttggaggcctctccacgctgtcccactgcccctggcctaggcagcagcctgccctgtggcccaccctggccgctctggctctgctgagcagcgtcgcagaggcctccctgggctccgcgccccgcagccctgccccccgcgaaggccccccgcctgtcctggcgtcccccgccggccacctgccgg

SEQ ID NO: 108959 - DNA, 485 bp, Homo sapiens
  Payload ID: 1407
  Gene Symbol: ARTN
  Gene Name: artemin
  ENST ID: ENST00000474592
  CDS Start-End: 218-485
gagggctcctaaggctgccctgcctgcctttccctccatcacggacaacagtcactggcctggctcggaggccttgattccacttagccaagaggcacacaccaggacctggaggacaaccccgggaaggcctgggggtctgttccacagctgcctcaacaggagggtgggggaacagctcaacaatggctgatgggcgctcctggtgttgatagagatggaacttggacttggaggcctctccacgctgtcccactgcccctggcctaggcagcaggctccacttggtctctccgcgcagcctgccctgtggcccaccctggccgctctggctctgctgagcagcgtcgcagaggcctccctgggctccgcgccccgcagccctgccccccgcgaaggccccccgcctgtcctggcgtcccccgccggccacctgccggggggacgcacggcccgctggtgcagtggaagagcccggcggccgc

SEQ ID NO: 108960 - DNA, 402 bp, Homo sapiens
  Payload ID: 1407
  Gene Symbol: ARTN
  Gene Name: artemin
  ENST ID: ENST00000472435
  CDS Start-End: 66-296
gggggagagcccagcactggtccccggaaaggtgcctagaagaacaaggtgcaggaccccgtgagatggaacttggacttggaggcctctccacgctgtcccactgcccctggcctaggcagcaggctccacttggtctctccgcgcagcctgccctgtggcccaccctggccgctctggctctgctgagcagcgtcgcagaggcctccctgggctccgcgccccgcagccctgccccccgcgaaggccccccgcctgtcctggcgtcccccgccggccacctgccgggtaggtgagagggcgagggggcggggcggggctggcccgggacaccgcgcgtgactgggtctcattccagggggacgcacggcccgctggtgcagtggaagagcccggcggccg

SEQ ID NO: 108961 - DNA, 517 bp, Homo sapiens
  Payload ID: 1407
  Gene Symbol: ARTN
  Gene Name: artemin
  ENST ID: ENST00000471394
  CDS Start-End: 319-517
gacgctggggctggaatttgacaccggacggctgcggcggcgggcaggaggctgctgagggatggagttgggcccggcccccagacaaggcccgggggctccgccagcagcaggtccctcgggccccagccctcgctgccacccgggcctggagccccacacccgagggtgcagactggctgccaaggccacacttttggctaaaagaggcactgccaggtgtacagtcctgggcatgcgctgtttgagcttcgggggagagcccagcactggtccccggaaaggtgcctagaagaacaaggtgcaggaccccgtgagatggaacttggacttggaggcctctccacgctgtcccactgcccctggcctaggcagcagcctgccctgtggcccaccctggccgctctggctctgctgagcagcgtcgcagaggcctccctgggctccgcgccccgcagccctgccccccgcgaaggccccccgcctgtcctggcgtcccccgccggccacctgccgg

SEQ ID NO: 108962 - DNA, 524 bp, Homo sapiens
  Payload ID: 1407
  Gene Symbol: ARTN
  Gene Name: artemin
  ENST ID: ENST00000491846
  CDS Start-End: 257-524
agccctcgctgccacccgggcctggagccccacacccgagggtgcagactggctgccaaggccacacttttggctaaaagaggcactgccaggtgtacagtcctgggcatgcgctgtttgagcttcgggggagagcccagcactggtccccggaaaggtgcctagaagaacaaggtgcaggaccccgtgctgcctcaacaggagggtgggggaacagctcaacaatggctgatgggcgctcctggtgttgatagagatggaacttggacttggaggcctctccacgctgtcccactgcccctggcctaggcagcaggctccacttggtctctccgcgcagcctgccctgtggcccaccctggccgctctggctctgctgagcagcgtcgcagaggcctccctgggctccgcgccccgcagccctgccccccgcgaaggccccccgcctgtcctggcgtcccccgccggccacctgccggggggacgcacggcccgctggtgcagtggaagagcccggcggccgc

SEQ ID NO: 108963 - DNA, 1303 bp, Homo sapiens
  Payload ID: 1407
  Gene Symbol: ARTN
  Gene Name: artemin
  Uniprot ID: Q5T4W7
  ENST ID: ENST00000498139
  CDS Start-End: 142-828
gggggctccgccagcagcaggtccctcgggccccagccctcgctgccacccgggcctggagccccacacccgagctgcctcaacaggagggtgggggaacagctcaacaatggctgatgggcgctcctggtgttgatagagatggaacttggacttggaggcctctccacgctgtcccactgcccctggcctaggcagcaggctccacttggtctctccgcgcagcctgccctgtggcccaccctggccgctctggctctgctgagcagcgtcgcagaggcctccctgggctccgcgccccgcagccctgccccccgcgaaggccccccgcctgtcctggcgtcccccgccggccacctgccggggggacgcacggcccgctggtgcagtggaagagcccggcggccgccgccgcagccttctcggcccgcgcccccgccgcctgcacccccatctgctcttccccgcgggggccgcgcggcgcgggctgggggcccgggcagccgcgctcgggcagcgggggcgcggggctgccgcctgcgctcgcagctggtgccggtgcgcgcgctcggcctgggccaccgctccgacgagctggtgcgtttccgcttctgcagcggctcctgccgccgcgcgcgctctccacacgacctcagcctggccagcctactgggcgccggggccctgcgaccgcccccgggctcccggcccgtcagccagccctgctgccgacccacgcgctacgaagcggtctccttcatggacgtcaacagcacctggagaaccgtggaccgcctctccgccaccgcctgcggctgcctgggctgagggctcgctccagggctttgcagactggacccttaccggtggctcttcctgcctgggaccctcccgcagagtcccactagccagcggcctcagccagggacgaaggcctcaaagctgagaggcccctgccggtgggtgatggatatcatccccgaacaggtgaagggacaactgactagcagccccagagccctcaccctgcggatcccagcctaaaagacaccagagacctcagctatggagcccttcggacccacttctcacagactctggcactggccaggcctcgaacctgggacccctcctctgatgaacactacagtggctgaggcatcagcccccgcccaggccctgtagggacagcatttgaaggacacatattgcagttgcttggttgaaagtgcctgtgctggaactggcctgtactcactcatgggagctggcccctatttattatttctaagttatttattta

SEQ ID NO: 108964 - DNA, 1335 bp, Homo sapiens
  Payload ID: 1408
  Gene Symbol: ARV1
  Gene Name: ARV1 homolog, fatty acid homeostasis modulator
  Uniprot ID: Q9H2C2
  ENST ID: ENST00000310256
  CDS Start-End: 58-873
gcgtctgacgtcttaccctccacagaatcggaagttctggactgcagttgagtggaaatgggcaacggcgggcggagcggcctgcagcaggggaaggggaacgtggatggggtggcagcgactcctactgctgcctcggcctcctgccagtacaggtgcatcgaatgcaaccaggaggccaaagagttgtaccgagactataaccacggtgtgctgaagataaccatctgtaaatcctgccagaaacctgtagacaaatatatcgagtatgatcctgttatcatcttgattaatgctatattgtgcaaagctcaggcctacagacatattcttttcaatactcaaataaatatccatggaaaactctgcatattttgtttgctttgtgaagcatacctgaggtggtggcagcttcaagattccaaccagaatactgcccctgatgacttgatcagatatgctaaggaatgggatttctatagaatgtttgcgattgctgctttagaacaaactgcctattttattggcatttttaccttcctgtgggtagaacggcccatgacggcaaaaaaaaagcccaacttcattttgctgctgaaagcattattattatctagctacggaaaactcttgctgattccagctgtcatttgggaacatgactacacatctgtgtgcctcaaactcattaaagtatttgttcttacatcaaattttcaggcaattagagtgaccctaaacatcaaccgtaagctctccttcttggccgtgttgagtggcttactgctggaaagcatcatggtctacttcttccagagtatggaatgggatgttggaagtgattatgccatctttaaatctcaggacttctgaagagttttattcttcttcactatctgtggcatgaccagctgtatctgaaagagaaaagacatgaaatataaaccaacctcctcatttctgttgagtaaaatgaagcaaagattggaaacactttctgaaaaagaaagcaatgataatagcggtggatacccacccccacaaatgcacccaagagacaagccatttacatacagatattcacagtcacacatagaaacacccacatggacacaaggaatgttgctgcagagactgaatgacatgcaacaggtgaaggtttatacgttatacacaaggccaggtaagcgctcataattcacacataataaaacatctaggtttcattcctttgacatgtttatatctttttaatttaaatgttgttactggcttaaaatattttgtgttcttacaatagaaacgcttttaataaagtctttcagaataaaccaa

SEQ ID NO: 108965 - DNA, 1170 bp, Homo sapiens
  Payload ID: 1408
  Gene Symbol: ARV1
  Gene Name: ARV1 homolog, fatty acid homeostasis modulator
  ENST ID: ENST00000366658
  CDS Start-End: 13-708
agttgagtggaaatgggcaacggcgggcggagcggcctgcagcaggggaaggggaacgtggatggggtggcagcgactcctactgctgcctcggcctcctgccagtacaggtgcatcgaatgcaaccaggaggccaaagagttgtaccgagactataaccacggtgtgctgaagataaccatctgtatccatggaaaactctgcatattttgtttgctttgtgaagcatacctgaggtggtggcagcttcaagattccaaccagaatactgcccctgatgacttgatcagatatgctaaggaatgggatttctatagaatgtttgcgattgctgctttagaacaaactgcctattttattggcatttttaccttcctgtgggtagaacggcccatgacggcaaaaaaaaagcccaacttcattttgctgctgaaagcattattattatctagctacggaaaactcttgctgattccagctgtcatttgggaacatgactacacatctgtgtgcctcaaactcattaaagtatttgttcttacatcaaattttcaggcaattagagtgaccctaaacatcaaccgtaagctctccttcttggccgtgttgagtggcttactgctggaaagcatcatggtctacttcttccagagtatggaatgggatgttggaagtgattatgccatctttaaatctcaggacttctgaagagttttattcttcttcactatctgtggcatgaccagctgtatctgaaagagaaaagacatgaaatataaaccaacctcctcatttctgttgagtaaaatgaagcaaagattggaaacactttctgaaaaagaaagcaatgataatagcggtggatacccacccccacaaatgcacccaagagacaagccatttacatacagatattcacagtcacacatagaaacacccacatggacacaaggaatgttgctgcagagactgaatgacatgcaacaggtgaaggtttatacgttatacacaaggccaggtaagcgctcataattcacacataataaaacatctaggtttcattcctttgacatgtttatatctttttaatttaaatgttgttactggcttaaaatattttgtgttcttacaatagaaacgcttttaataaagtctttcagaataaaccaa

SEQ ID NO: 108966 - DNA, 879 bp, Homo sapiens
  Payload ID: 1408
  Gene Symbol: ARV1
  Gene Name: ARV1 homolog, fatty acid homeostasis modulator
  ENST ID: ENST00000435927
  CDS Start-End: 1-875
ggaacgtggatggggtggcagcgactcctactgctgcctcggcctcctgccagtacaggtgcatcgaatgcaaccaggaggccaaagagttgtaccgagactataaccacggtgtgctgaagataaccatctgtaaatcctgccagaaacctgtagacaaatatatcgagtatgatcctgttatcatcttgattaatgctatattgtgcaaagctcaggcctacagacatattcttttcaatactcaaataaatatccatggaaaactctgcatattttgtttgctttgtgaagcatacctgaggtggtggcagcttcaagattccaaccagaatactgcccctgatgacttgatcagatatgctaaggaatgggatttctatagaatgtttgcgattgctgctttaggctggagtgcagtggcacagtcacagctcactgcagccctgaactcctgggctcaagcaatcctcctgcctcggcccccccaggtagctggaaccacagaacaaactgcctattttattggcatttttaccttcctgtgggtagaacggcccatgacggcaaaaaaaaagcccaacttcattttgctgctgaaagcattattattatctagctacggaaaactcttgctgattccagctgtcatttgggaacatgactacacatctgtgtgcctcaaactcattaaagtatttgttcttacatcaaattttcaggcaattagagtgaccctaaacatcaaccgtaagctctccttcttggccgtgttgagtggcttactgctggaaagcatcatggtctacttcttccagagtatggaatgggatgttggaagtgattatgccatctttaaatctcaggacttctgaagag

SEQ ID NO: 108967 - DNA, 991 bp, Homo sapiens
  Payload ID: 1408
  Gene Symbol: ARV1
  Gene Name: ARV1 homolog, fatty acid homeostasis modulator
  ENST ID: ENST00000450711
  CDS Start-End: 1-806
gcgggcggagcggcctgcagcaggggaaggggaacgtggatggggtggcagcgactcctactgctgcctcggcctcctgccagtacaggtgcatcgaatgcaaccaggaggccaaagagttgtaccgagactataaccacggtgtgctgaagataaccatctgtaaatcctgccagaaacctgtagacaaatatatcgagtatgatcctgttatcatcttgattaatgctatattgtgcaaagctcaggcctacagacatattcttttcaatactcaaataaatatccatggaaaactctgcatattttgtttgctttgtgaagcatacctgaggtggtggcagcttcaagattccaaccagaatactgcccctgatgacttgatcagatatgctaaggaatgggatttctatagaatgtttgcgattgctgctttagaacaaactgcctattttattggcatttttaccttcctgtgggtagaacggcccatgacggcaaaaaaaaagcccaacttcattttgctgctgaaagcattattattatctagctacggaaaactcttgctgattccagctgtcatttgggaacatgactacacatctgtgtgcctcaaactcattaaagtatttgttcttacatcaaattttcaggcaattagagtgaccctaaacatcaaccgtaagctctccttcttggccgtgttgagtggcttactgctggaaagcatcatggtctacttcttccagagtatggaatgggatgttggaagtgattatgccatctttaaatctcaggacttctgaagaggtcctgcagtgcccttgtctccacctaaccagatacggtcagctttgcctctccatggaataagtgaagactttccaaaaactccagtttgcagtgcttactttttccgttgacctccgagtgctcagcttaacacctacagcagtcacgtgcccaagaacttctgacattgccccagggt

SEQ ID NO: 108968 - DNA, 1009 bp, Homo sapiens
  Payload ID: 1408
  Gene Symbol: ARV1
  Gene Name: ARV1 homolog, fatty acid homeostasis modulator
  ENST ID: ENST00000459891
  CDS Start-End: 1-368
aacaaactgcctattttattggcatttttaccttcctgtgggtagaacggcccatgacggcaaaaaaaaagcccaacttcattttgctgctgaaagcattattattatctagctacggaaaactcttgctgattccagctgtcatttgggaacatgactacacatctgtgtgcctcaaactcattaaagtatttgttcttacatcaaattttcaggcaattagagtgaccctaaacatcaaccgtaagctctccttcttggccgtgttgagtggcttactgctggaaagcatcatggtctacttcttccagagtatggaatgggatgttggaagtgattatgccatctttaaatctcaggacttctgaagaggtcctgcagtgcccttgtctccacctaaccagatacggtcagctttgcctctccatggaataagtgaagactttccaaaaactccagtttgcagtgcttactttttccgttgacctccgagtgctcagcttaacacctacagcagtcacgtgcccaagaacttctgacattgccccaggttttattcttcttcactatctgtggcatgaccagctgtatctgaaagagaaaagacatgaaatataaaccaacctcctcatttctgttgagtaaaatgaagcaaagattggaaacactttctgaaaaagaaagcaatgataatagcggtggatacccacccccacaaatgcacccaagagacaagccatttacatacagatattcacagtcacacatagaaacacccacatggacacaaggaatgttgctgcagagactgaatgacatgcaacaggtgaaggtttatacgttatacacaaggccaggtaagcgctcataattcacacataataaaacatctaggtttcattcctttgacatgtttatatctttttaatttaaatgttgttactggcttaaaatattttgtgttcttacaatagaaacgcttttaataaagtctttcagaataaaccaa

SEQ ID NO: 108969 - DNA, 1037 bp, Homo sapiens
  Payload ID: 1408
  Gene Symbol: ARV1
  Gene Name: ARV1 homolog, fatty acid homeostasis modulator
  ENST ID: ENST00000480519
  CDS Start-End: 45-788
caacggcgggcggagcggcctgcagcaggggaaggggaacgtggatggggtggcagcgactcctactgctgcctcggcctcctgccagtacaggtgcatcgaatgcaaccaggaggccaaagagttgtaccgagactataaccacgaaatcctgccagaaacctgtagacaaatatatcgagtatgatcctgttatcatcttgattaatgctatattgtgcaaagctcaggcctacagacatattcttttcaatactcaaataaatatccatggaaaactctgcatattttgtttgctttgtgaagcatacctgaggtggtggcagcttcaagattccaaccagaatactgcccctgatgacttgatcagatatgctaaggaatgggatttctatagaatgtttgcgattgctgctttagaacaaactgcctattttattggcatttttaccttcctgtgggtagaacggcccatgacggcaaaaaaaaagcccaacttcattttgctgctgaaagcattattattatctagctacggaaaactcttgctgattccagctgtcatttgggaacatgactacacatctgtgtgcctcaaactcattaaagtatttgttcttacatcaaattttcaggcaattagagtgaccctaaacatcaaccgtaagctctccttcttggccgtgttgagtggcttactgctggaaagcatcatggtctacttcttccagagtatggaatgggatgttggaagtgattatgccatctttaaatctcaggacttctgaagaggtcctgcagtgcccttgtctccacctaaccagatacggtcagctttgcctctccatggaataagtgaagactttccaaaaactccagtttgcagtgcttactttttccgttgacctccgagtgctcagcttaacacctacagcagtcacgtgcccaagaacttctgacattgccccagggtcagatcttttgtttctacttttcataagtgcatctgcttgtctgacaatcaattataatttata

SEQ ID NO: 108970 - DNA, 6276 bp, Homo sapiens
  Payload ID: 1409
  Gene Symbol: AHR
  Gene Name: aryl hydrocarbon receptor
  Uniprot ID: P35869
  ENST ID: ENST00000242057
  CDS Start-End: 644-3190
attcagccggtgcgcgcggcggcgggaggcagtggctggggagtcccgtcgacgctctgttccgagagcgtgccccggaccgccagctcagaacaggggcagccgtgtagccgaacggaagctgggagcagccgggactggtggcccgcgcccgagctccgcaggcgggaagcaccctggatttaggaagtcccgggagcagcgcggcggcacctccctcacccaaggggccgcggcgacggtcacggggcgcggcgccaccgtgagcgacccaggccaggattctaaatagacggcccaggctcctcctccgcccgggccgcctcacctgcgggcattgccgcgccgcctccgccggtgtagacggcacctgcgccgccttgctcgcgggtctccgcccctcgcccaccctcactgcgccaggcccaggcagctcacctgtactggcgcgggctgcggaagcctgcgtgagccgaggcgttgaggcgcggcgcccacgccactgtcccgagaggacgcaggtggagcgggcgcggcttcgcggaacccggcgccggccgccgcagtggtcccagcctacaccgggttccggggacccggccgccagtgcccggggagtagccgccgccgtcggctgggcaccatgaacagcagcagcgccaacatcacctacgccagtcgcaagcggcggaagccggtgcagaaaacagtaaagccaatcccagctgaaggaatcaagtcaaatccttccaagcggcatagagaccgacttaatacagagttggaccgtttggctagcctgctgcctttcccacaagatgttattaataagttggacaaactttcagttcttaggctcagcgtcagttacctgagagccaagagcttctttgatgttgcattaaaatcctcccctactgaaagaaacggaggccaggataactgtagagcagcaaatttcagagaaggcctgaacttacaagaaggagaattcttattacaggctctgaatggctttgtattagttgtcactacagatgctttggtcttttatgcttcttctactatacaagattatctagggtttcagcagtctgatgtcatacatcagagtgtatatgaacttatccataccgaagaccgagctgaatttcagcgtcagctacactgggcattaaatccttctcagtgtacagagtctggacaaggaattgaagaagccactggtctcccccagacagtagtctgttataacccagaccagattcctccagaaaactctcctttaatggagaggtgcttcatatgtcgtctaaggtgtctgctggataattcatctggttttctggcaatgaatttccaagggaagttaaagtatcttcatggacagaaaaagaaagggaaagatggatcaatacttccacctcagttggctttgtttgcgatagctactccacttcagccaccatccatacttgaaatccggaccaaaaattttatctttagaaccaaacacaaactagacttcacacctattggttgtgatgccaaaggaagaattgttttaggatatactgaagcagagctgtgcacgagaggctcaggttatcagtttattcatgcagctgatatgctttattgtgccgagtcccatatccgaatgattaagactggagaaagtggcatgatagttttccggcttcttacaaaaaacaaccgatggacttgggtccagtctaatgcacgcctgctttataaaaatggaagaccagattatatcattgtaactcagagaccactaacagatgaggaaggaacagagcatttacgaaaacgaaatacgaagttgccttttatgtttaccactggagaagctgtgttgtatgaggcaaccaacccttttcctgccataatggatcccttaccactaaggactaaaaatggcactagtggaaaagactctgctaccacatccactctaagcaaggactctctcaatcctagttccctcctggctgccatgatgcaacaagatgagtctatttatctctatcctgcttcaagtacttcaagtactgcaccttttgaaaacaactttttcaacgaatctatgaatgaatgcagaaattggcaagataatactgcaccgatgggaaatgatactatcctgaaacatgagcaaattgaccagcctcaggatgtgaactcatttgctggaggtcacccagggctctttcaagatagtaaaaacagtgacttgtacagcataatgaaaaacctaggcattgattttgaagacatcagacacatgcagaatgaaaaatttttcagaaatgatttttctggtgaggttgacttcagagacattgacttaacggatgaaatcctgacgtatgtccaagattctttaagtaagtctcccttcataccttcagattatcaacagcaacagtccttggctctgaactcaagctgtatggtacaggaacacctacatctagaacagcaacagcaacatcaccaaaagcaagtagtagtggagccacagcaacagctgtgtcagaagatgaagcacatgcaagttaatggcatgtttgaaaattggaactctaaccaattcgtgcctttcaattgtccacagcaagacccacaacaatataatgtctttacagacttacatgggatcagtcaagagttcccctacaaatctgaaatggattctatgccttatacacagaactttatttcctgtaatcagcctgtattaccacaacattccaaatgtacagagctggactaccctatggggagttttgaaccatccccataccccactacttctagtttagaagattttgtcacttgtttacaacttcctgaaaaccaaaagcatggattaaatccacagtcagccataataactcctcagacatgttatgctggggccgtgtcgatgtatcagtgccagccagaacctcagcacacccacgtgggtcagatgcagtacaatccagtactgccaggccaacaggcatttttaaacaagtttcagaatggagttttaaatgaaacatatccagctgaattaaataacataaataacactcagactaccacacatcttcagccacttcatcatccgtcagaagccagaccttttcctgatttgacatccagtggattcctgtaattccaagcccaattttgaccctggtttttggattaaattagtttgtgaaggattatggaaaaataaaactgtcactgttggacgtcagcaagttcacatggaggcattgatgcatgctattcacaattattccaaaccaaattttaatttttgcttttagaaaagggagtttaaaaatggtatcaaaattacatatactacagtcaagatagaaagggtgctgccacggagtggtgaggtaccgtctacatttcacattattctgggcaccacaaaatatacaaaactttatcagggaaactaagattcttttaaattagaaaatattctctatttgaattatttctgtcacagtaaaaataaaatactttgagttttgagctactggattcttattagttccccaaatacaaagttagagaactaaactagtttttcctatcatgttaacctctgcttttatctcagatgttaaaataaatggtttggtgctttttataaaaagataatctcagtgctttcctccttcactgtttcatctaagtgcctcacatttttttctacctataacactctaggatgtatattttatataaagtattctttttcttttttaaattaatatctttctgcacacaaatattatttgtgtttcctaaatccaaccattttcattaattcaggcatattttaactccactgcttacctactttcttcaggtaaagggcaaataatgatcgaaaaaataattatttattacataatttagttgtttctagactataaatgttgctatgtgccttatgttgaaaaaatttaaaagtaaaatgtctttccaaattatttcttaattattataaaaatattaagacaatagcacttaaattcctcaacagtgttttcagaagaaataaatataccactctttacctttattgatatctccatgatgatagttgaatgttgcaatgtgaaaaatctgctgttaactgcaaccttgtttattaaattgcaagaagctttatttctagctttttaattaagcaaagcacccatttcaatgtgtataaattgtctttaaaaactgttttagacctataatccttgataatatattgtgttgactttataaatttcgcttcttagaacagtggaaactatgtgtttttctcatatttgaggagtgttaagattgcagatagcaaggtttggtgcaaagtattgtaatgagtgaattgaatggtgcattgtatagatataatgaacaaaattatttgtaagatatttgcagtttttcattttaaaaagtccataccttatatatgcacttaatttgttggggctttacatactttatcaatgtgtctttctaagaaatcaagtaatgaatccaactgcttaaagttggtattaataaaaagacaaccacatagttcgtttaccttcaaactttaggtttttttaatgatatactgatcttcattaccaataggcaaattaatcaccctaccaactttactgtcctaacatggtttaaaagaaaaaatgacaccatcttttattcttttttttttttttttttgagagagagtcttactctgccgcccaaactggagtgcagtggcacaatcttggctcactgcaacctctacctcctgggttcaagtgattctcttgcctcagcctcccgagttgctgggattacaggcatgtgccaccatgcccagctaatttttgtatttttagtagaaacgggtttcaccatgttggccagactggtctcaaactcctgacctcaggtgagcctcccaccttggcctcccaaagtgctgggattacaggcgtgagccactgcattcagctcttcttttctttagatatgagagctgaagagcttagacacattttgcatgtattatttgaaaatctgatggaatcccaaactgagatgtattaaaatacaatttttggccgggtgcagtggctcacgcctgtaatcccagcacttggggagggcgaggagggtggatcacgaggtcaagagatggagaccatcctgaccaacatggtgaaaccctgtctctactaaaaatacagaaattagctgggcatggtggcgtgagcctgtagtcctagctactcaggaggctgaggcaggagaatagcctgaacctgggaatcggaggttgcagagccaagatcgccccactgcactccagcctggcaatagaccgagactccgtctccaaaaaaaaaaaaaatacaatttttatttcttttactttttttagtaagttaatgtatataaaaatggcttcggacaaaatatctctgagttctgtgtattttcagtcaaaactttaaacctgtagaatcaatttaagtgttggaaaaaatttgtctgaaacatttcataatttgtttccagcatgaggtatctaaggatttagaccagaggtctagattaatactctatttttacatttaaaccttttattataagtcttacataaaccatttttgttactctcttccacatgttactggataaattgtttagtggaaaataggctttttaatcatgaatatgatgacaatcagttatacagttataaaattaaaagtttgaaaagcaatattgtatatttttatctatataaaataactaaaatgtatctaagaataataaaatcacgttaaaccaaatacacgtttgtctgtattgttaagtgccaaacaaaggatacttagtgcactgctacattgtgggatttatttctagatgatgtgcacatctaaggatatggatgtgtctaatttagtcttttcctgtaccaggtttttcttacaatacctgaagacttaccagtattctagtgtattatgaagctttcaacattactatgcacaaactagtgtttttcgatgttactaaattttaggtaaatgctttcatggcttttttcttcaaaatgttactgcttacatatatcatgcatagatttttgcttaaagtatgatttataatatcctcattatcaaagttgtatacaataatatataataaaataacaaatatgaataa

SEQ ID NO: 108971 - DNA, 4820 bp, Homo sapiens
  Payload ID: 1409
  Gene Symbol: AHR
  Gene Name: aryl hydrocarbon receptor
  Uniprot ID: P35869
  ENST ID: ENST00000463496
  CDS Start-End: 583-3129
ccgagagcgtgccccggaccgccagctcagaacaggggcagccgtgtagccgaacggaagctgggagcagccgggactggtggcccgcgcccgagctccgcaggcgggaagcaccctggatttaggaagtcccgggagcagcgcggcggcacctccctcacccaaggggccgcggcgacggtcacggggcgcggcgccaccgtgagcgacccaggccaggattctaaatagacggcccaggctcctcctccgcccgggccgcctcacctgcgggcattgccgcgccgcctccgccggtgtagacggcacctgcgccgccttgctcgcgggtctccgcccctcgcccaccctcactgcgccaggcccaggcagctcacctgtactggcgcgggctgcggaagcctgcgtgagccgaggcgttgaggcgcggcgcccacgccactgtcccgagaggacgcaggtggagcgggcgcggcttcgcggaacccggcgccggccgccgcagtggtcccagcctacaccgggttccggggacccggccgccagtgcccggggagtagccgccgccgtcggctgggcaccatgaacagcagcagcgccaacatcacctacgccagtcgcaagcggcggaagccggtgcagaaaacagtaaagccaatcccagctgaaggaatcaagtcaaatccttccaagcggcatagagaccgacttaatacagagttggaccgtttggctagcctgctgcctttcccacaagatgttattaataagttggacaaactttcagttcttaggctcagcgtcagttacctgagagccaagagcttctttgatgttgcattaaaatcctcccctactgaaagaaacggaggccaggataactgtagagcagcaaatttcagagaaggcctgaacttacaagaaggagaattcttattacaggctctgaatggctttgtattagttgtcactacagatgctttggtcttttatgcttcttctactatacaagattatctagggtttcagcagtctgatgtcatacatcagagtgtatatgaacttatccataccgaagaccgagctgaatttcagcgtcagctacactgggcattaaatccttctcagtgtacagagtctggacaaggaattgaagaagccactggtctcccccagacagtagtctgttataacccagaccagattcctccagaaaactctcctttaatggagaggtgcttcatatgtcgtctaaggtgtctgctggataattcatctggttttctggcaatgaatttccaagggaagttaaagtatcttcatggacagaaaaagaaagggaaagatggatcaatacttccacctcagttggctttgtttgcgatagctactccacttcagccaccatccatacttgaaatccggaccaaaaattttatctttagaaccaaacacaaactagacttcacacctattggttgtgatgccaaaggaagaattgttttaggatatactgaagcagagctgtgcacgagaggctcaggttatcagtttattcatgcagctgatatgctttattgtgccgagtcccatatccgaatgattaagactggagaaagtggcatgatagttttccggcttcttacaaaaaacaaccgatggacttgggtccagtctaatgcacgcctgctttataaaaatggaagaccagattatatcattgtaactcagagaccactaacagatgaggaaggaacagagcatttacgaaaacgaaatacgaagttgccttttatgtttaccactggagaagctgtgttgtatgaggcaaccaacccttttcctgccataatggatcccttaccactaaggactaaaaatggcactagtggaaaagactctgctaccacatccactctaagcaaggactctctcaatcctagttccctcctggctgccatgatgcaacaagatgagtctatttatctctatcctgcttcaagtacttcaagtactgcaccttttgaaaacaactttttcaacgaatctatgaatgaatgcagaaattggcaagataatactgcaccgatgggaaatgatactatcctgaaacatgagcaaattgaccagcctcaggatgtgaactcatttgctggaggtcacccagggctctttcaagatagtaaaaacagtgacttgtacagcataatgaaaaacctaggcattgattttgaagacatcagacacatgcagaatgaaaaatttttcagaaatgatttttctggtgaggttgacttcagagacattgacttaacggatgaaatcctgacgtatgtccaagattctttaagtaagtctcccttcataccttcagattatcaacagcaacagtccttggctctgaactcaagctgtatggtacaggaacacctacatctagaacagcaacagcaacatcaccaaaagcaagtagtagtggagccacagcaacagctgtgtcagaagatgaagcacatgcaagttaatggcatgtttgaaaattggaactctaaccaattcgtgcctttcaattgtccacagcaagacccacaacaatataatgtctttacagacttacatgggatcagtcaagagttcccctacaaatctgaaatggattctatgccttatacacagaactttatttcctgtaatcagcctgtattaccacaacattccaaatgtacagagctggactaccctatggggagttttgaaccatccccataccccactacttctagtttagaagattttgtcacttgtttacaacttcctgaaaaccaaaagcatggattaaatccacagtcagccataataactcctcagacatgttatgctggggccgtgtcgatgtatcagtgccagccagaacctcagcacacccacgtgggtcagatgcagtacaatccagtactgccaggccaacaggcatttttaaacaagtttcagaatggagttttaaatgaaacatatccagctgaattaaataacataaataacactcagactaccacacatcttcagccacttcatcatccgtcagaagccagaccttttcctgatttgacatccagtggattcctgtaattccaagcccaattttgaccctggtttttggattaaattagtttgtgaaggattatggaaaaataaaactgtcactgttggacgtcagcaagttcacatggaggcattgatgcatgctattcacaattattccaaaccaaattttaatttttgcttttagaaaagggagtttaaaaatggtatcaaaattacatatactacagtcaagatagaaagggtgctgccacggagtggtgaggtaccgtctacatttcacattattctgggcaccacaaaatatacaaaactttatcagggaaactaagattcttttaaattagaaaatattctctatttgaattatttctgtcacagtaaaaataaaatactttgagttttgagctactggattcttattagttccccaaatacaaagttagagaactaaactagtttttcctatcatgttaacctctgcttttatctcagatgttaaaataaatggtttggtgctttttataaaaagataatctcagtgctttcctccttcactgtttcatctaagtgcctcacatttttttctacctataacactctaggatgtatattttatataaagtattctttttcttttttaaattaatatctttctgcacacaaatattatttgtgtttcctaaatccaaccattttcattaattcaggcatattttaactccactgcttacctactttcttcaggtaaagggcaaataatgatcgaaaaaataattatttattacataatttagttgtttctagactataaatgttgcagagccaagatcgccccactgcactccagcctggcaatagaccgagactccgtctccaaaaaaaaaaaaaatacaatttttatttcttttactttttttagtaagttaatgtatataaaaatggcttcggacaaaatatctctgagttctgtgtattttcagtcaaaactttaaacctgtagaatcaatttaagtgttggaaaaaatttgtctgaaacatttcataatttgtttccagcatgaggtatctaaggatttagaccagaggtctagattaatactctatttttacatttaaaccttttattataagtcttacataaaccatttttgttactctcttccacatgttactggataaattgtttagtggaaaataggctttttaatcatgaatatgatgacaatcagttatacagttataaaattaaaagtttgaaaagcaatattgtatatttttatctatataaaataactaaaatgtatctaagaataataaaatcacgttaaaccaaatacacgtttgtctgtattgttaagtgccaaacaaaggatacttagtgcactgctacattgtgggatttatttctagatgatgtgcacatctaaggatatggatgtgtctaatttagtcttttcctgtaccaggtttttcttacaatacctgaagacttaccagtattctagtgtattatgaagctttcaacattactatgcacaaactagtgtttttcgatgttactaaattttaggtaaatgctttcatggcttttttcttcaaaatgttactgcttacatatatcatgcatagatttttgcttaaagtatgatttataatatcctcattatcaaagttgtatacaataatatataataaaataacaaatatgaataata

SEQ ID NO: 108972 - DNA, 1221 bp, Homo sapiens
  Payload ID: 1410
  Gene Symbol: AIP
  Gene Name: aryl hydrocarbon receptor interacting protein
  Uniprot ID: O00170
  ENST ID: ENST00000279146
  CDS Start-End: 119-1111
ccctcaaccaaaatggcgctagctcggaagctgccgaggtgctaggagttgccgaagcaagtccggaagctaccgagcgagtccggaagttgccgaaagggagcagcggggaaggaggatggcggatatcatcgcaagactccgggaggacgggatccaaaaacgtgtgatacaggaaggccgaggagagctcccggactttcaagatgggaccaaggccacgttccactaccggacgctgcacagtgacgacgagggcaccgtgctggacgacagccgggctcgtggcaagcccatggagctcatcattggcaagaagttcaagctgcctgtgtgggagaccatcgtgtgcaccatgcgagaaggggagattgcccagttcctctgtgacatcaagcatgtggtcctgtacccgctggtggccaagagtctccgcaacatcgcggtgggcaaggaccccctggagggccagcggcactgctgcggtgttgcacagatgcgtgaacacagctccctgggccatgctgacctggacgccctgcagcagaacccccagcccctcatcttccacatggagatgctgaaggtggagagccctggcacgtaccagcaggacccatgggccatgacagacgaagagaaggcaaaggcagtgccacttatccaccaggagggcaaccggttgtaccgcgaggggcatgtgaaggaggctgctgccaagtactacgatgccattgcctgcctcaagaacctgcagatgaaggaacagcctgggtcccctgaatggatccagctggaccagcagatcacgccgctgctgctcaactactgccagtgcaagctggtggtcgaggagtactacgaggtgctggaccactgctcttccatcctcaacaagtacgacgacaacgtcaaggcctacttcaagcggggcaaggcccacgcggccgtgtggaatgcccaggaggcccaggctgactttgccaaagtgctggagctggacccagccctggcgcctgtggtgagccgagagctgcgggccctggaggcacggatccggcagaaggacgaagaggacaaagcccggttccgggggatcttctcccattgacaggagcacttggccctgccttacctgccaagcccactgctgcagctgccagcccccctgcccgtgctgcgtcatgcttctgtgtatataaaggcctttatttatctctc

SEQ ID NO: 108973 - DNA, 815 bp, Homo sapiens
  Payload ID: 1410
  Gene Symbol: AIP
  Gene Name: aryl hydrocarbon receptor interacting protein
  ENST ID: ENST00000528641
  CDS Start-End: 119-815
ccctcaaccaaaatggcgctagctcggaagctgccgaggtgctaggagttgccgaagcaagtccggaagctaccgagcgagtccggaagttgccgaaagggagcagcggggaaggaggatggcggatatcatcgcaagactccgggaggacgggatccaaaaacgtgtgatacaggaaggccgaggagagctcccggactttcaagatgggaccaaggccacgttccactaccggacgctgcacagtgacgacgagggcaccgtgctggacgacagccgggctcgtggcaagcccatggagctcatcattggcaagaagttcaagctgcctgtgtgggagaccatcgtgtgcaccatgcgagaaggggagattgcccagttcctctgtgacatcaaggtggagagccctggcacgtaccagcaggacccatgggccatgacagacgaagagaaggcaaaggcagtgccacttatccaccaggagggcaaccggttgtaccgcgaggggcatgtgaaggaggctgctgccaagtactacgatgccattgcctgcctcaagaacctgcagatgaaggaacagcctgggtcccctgaatggatccagctggaccagcagatcacgccgctgctgctcaactactgccagtgcaagctggtggtcgaggagtactacgaggtgctggaccactgctcttccatcctcaacaagtacgacgacaacgtcaaggcctacttcaagcggggcaaggcccacgcggccgtgtggaatgcccaggaggcccaggctgactttgccaaagtgctggagctggacc

SEQ ID NO: 108974 - DNA, 635 bp, Homo sapiens
  Payload ID: 1410
  Gene Symbol: AIP
  Gene Name: aryl hydrocarbon receptor interacting protein
  ENST ID: ENST00000525341
  CDS Start-End: 1-567
ggccagcggcactgctgcggtgttgcacagatgcgtgaacacagctccctgggccatgctgacctggacgccctgcagcagaacccccagcccctcatcttccacatggagatgctgaaggtggagagccctggcacgtaccagcaggacccatgggccatgacagacgaagagaaggcaaaggcagtgccacttatccaccaggagggcaaccggttgtaccgcgaggggcatgtgaaggaggctgctgccaagtactacgatgccattgcctgcctcaagaacctgcagatgaaggaacagcctgggtcccctgaatggatccagctggaccagcagatcacgccgctgctgctcaactactgccagtgcaagctggtggtcgaggagtactacgaggtgctggaccactgctcttccatcctcaacaagtacgacggtgagcaccgggccctgggctgccgggggctgcgagtggtcagagagtggcctttctcctgtcactgctggggtcaagacctagcctttcacaacccccattctgagctcccacgggggcctgactaaatgcctctactcggcagggctgtgggccccattgtgccaatgaagcatgaatggtgtattgggggtgg

SEQ ID NO: 108975 - DNA, 2783 bp, Homo sapiens
  Payload ID: 1411
  Gene Symbol: AIPL1
  Gene Name: aryl hydrocarbon receptor interacting protein-like 1
  Uniprot ID: Q9NZN9
  ENST ID: ENST00000250087
  CDS Start-End: 96-1061
gctgggtaaatcccagagtctcagccgcctaagtgtcttccccggaggtgagattatctccgcctgtgctggacacctccctttctcctgcagccatggatgccgctctgctcctgaacgtggaaggggtcaagaaaaccattctgcacgggggcacgggcgagctcccaaacttcatcaccggatcccgagtgatctttcatttccgcaccatgaaatgtgatgaggagcggacagtcattgacgacagtcggcaggtgggccagcccatgcacatcatcatcggaaacatgttcaagctcgaggtctgggagatcctgcttacctccatgcgggtgcacgaggtggccgagttctggtgcgacaccatcgttgatgccccgagtgattaccagagggagacctggaacctgagcaatcatgagaagatgaaggcggtgcccgtcctccacggagagggaaatcggctcttcaagctgggccgctacgaggaggcctcttccaagtaccaggaggccatcatctgcctaaggaacctgcagaccaaggagaagccatgggaggtgcagtggctgaagctggagaagatgatcaatactctgatcctcaactactgccagtgcctgctgaagaaggaggagtactatgaggtgctggagcacaccagtgatattctccggcaccacccaggcatcgtgaaggcctactacgtgcgtgcccgggctcacgcagaggtgtggaatgaggccgaggccaaggcggacctccagaaagtgctggagctggagccgtccatgcagaaggcggtgcgcagggagctgaggctgctggagaaccgcatggcggagaagcaggaggaggagcggctgcgctgccggaacatgctgagccagggtgccacgcagcctcccgcagagccacccacagagccacccgcacagtcatccacagagccacctgcagagccacccacagcaccatctgcagagctgtccgcagggccccctgcagagccagccacagagccacccccgtccccagggcactcgctgcagcactgagccccctgaggcccacagccacccaggcagggagcaagtggcctggtcacttctggttcgattgaccaggatcgtggtgtcactttttaaaatttaaaattaatttttgaaatcaaagtcagacacacccatggtaaaaaaaaaaaaaaaaacaatcccaagggtacagaagagcttatgaataaaagtagttttctcctctacccctctcattccttccgtgccatggttttaattgaccctgtttttaattcttctggtagttttctctatttccaagtaatctgtttaaatcagtttctagattttaccccatgtcaatgacaaatgaggatttgatgctctgatcctttctcatgcctgatacccctccctgtctccccattttggatagttacatttgggggtcatctcggtgatttttgtaactttacgcaggacacttagagctctctagaatcccactgactttagtgggtcttgatgtagggtgggcaagccccgacactggagcttagcctgagagggttcttggcctcccccaggaaagatttcaaaggcaagcgccagtggtagggtagaagaaaacagctgtggtcgggcacggtggctcacgcctataatcccagcactttgggaggccgaggcgggtggatcacctgaggtcaggagttccagaccagcctggccaacatggtgaaacctcatctctactaaaaatacaaaaaaactagctgggcgtggtggcgggcgcctataatcccagctacttgggaggctgaggcaggagaattgattgaacctgggaggcggaggttgcagtgagccaagatcacgtcattgcactccagcctggtcaacaagagtaaaacttcatctcaaaaaacaaaacaaaacaaaaacaacaacaaaaaacaaaagaaaaacaaacaaaaccaaaaccaaaacagctgtattgaagctgcagtgttgcagctctgtgactgccctgcagagcagggctaccccataggcagcgagcagcagctcagggcagttctgcagtcagatttatacccacttttaattacatgtagattaaggagctgcatatacaaagatttctagggaaggagtagtaacttctgggtcctggggtctttgccacggaacagggcagtatgccagggtgttgccacggcaatggtaaactgacatggcaccctgggggtcatgccttagggaaagccgcttccactcgcccctgttttagctcatcttcaagttagtctggtgtccaagctccaccgcctgcctcagtctggtgacctccttctgtgtctgatgagcatggcagcgttgggaccttccccttccaactctctccctcctcttcgtcctccctaaaggacgggtacgaggaggggctatcacgccagcgacatcctctagcaccacccaggtgtgtggggtggggcaggggggcgacgaagtatccagcccagggccacgtagtcaactgccaagggcttcctgggcttctcttctgccccagagcttgtctccacccagcaggggttcccccagcgctaactgtatccctaaagttctgatgtactttacttttccatcttccttgttgttaacatctaccttctgctctgtaagcaaaactaaatcttctgtgctttgtccataggttgattctacaatctgaaaatcaataaacagcatttgcatgat

SEQ ID NO: 108976 - DNA, 2964 bp, Homo sapiens
  Payload ID: 1411
  Gene Symbol: AIPL1
  Gene Name: aryl hydrocarbon receptor interacting protein-like 1
  ENST ID: ENST00000381128
  CDS Start-End: 29-214
gctggacacctccctttctcctgcagccatggatgccgctctgctcctgaacgtggaaggggtcaagaaaaccattctgcacgggggcacgggcgagctcccaaacttcatcaccggatcccgagtgagtggggcccctccggagcagacagggtcccccacagcagctttcaacattccaggtgatctttcatttccgcaccatgaaatgtgatgaggagcggacagtcattgacgacagtcggcaggtgggccagcccatgcacatcatcatcggaaacatgttcaagctcgaggtctgggagatcctgcttacctccatgcgggtgcacgaggtggccgagttctggtgcgacaccatccacacgggggtctaccccatcctatcccggagcctgaggcagatggcccagggcaaggaccccacagagtggcacgtgcacacgtgcgggctggccaacatgttcgcctaccacacgctgggctacgaggacctggacgagctgcagaaggagcctcagcctctggtctttgtgatcgagctgctgcaggttgatgccccgagtgattaccagagggagacctggaacctgagcaatcatgagaagatgaaggcggtgcccgtcctccacggagagggaaatcggctcttcaagctgggccgctacgaggaggcctcttccaagtaccaggaggccatcatctgcctaaggaacctgcagaccaaggagaagccatgggaggtgcagtggctgaagctggagaagatgatcaatactctgatcctcaactactgccagtgcctgctgaagaaggaggagtactatgaggtgctggagcacaccagtgatattctccggcaccacccaggcatcgtgaaggcctactacgtgcgtgcccgggctcacgcagaggtgtggaatgaggccgaggccaaggcggacctccagaaagtgctggagctggagccgtccatgcagaaggcggtgcgcagggagctgaggctgctggagaaccgcatggcggagaagcaggaggaggagcggctgcgctgccggaacatgctgagccagggtgccacgcagcctcccgcagagccacccacagagccacccgcacagtcatccacagagccacctgcagagccacccacagcaccatctgcagagctgtccgcagggccccctgcagagccagccacagagccacccccgtccccagggcactcgctgcagcactgagccccctgaggcccacagccacccaggcagggagcaagtggcctggtcacttctggttcgattgaccaggatcgtggtgtcactttttaaaatttaaaattaatttttgaaatcaaagtcagacacacccatggtaaaaaaaaaaaaaaaaacaatcccaagggtacagaagagcttatgaataaaagtagttttctcctctacccctctcattccttccgtgccatggttttaattgaccctgtttttaattcttctggtagttttctctatttccaagtaatctgtttaaatcagtttctagattttaccccatgtcaatgacaaatgaggatttgatgctctgatcctttctcatgcctgatacccctccctgtctccccattttggatagttacatttgggggtcatctcggtgatttttgtaactttacgcaggacacttagagctctctagaatcccactgactttagtgggtcttgatgtagggtgggcaagccccgacactggagcttagcctgagagggttcttggcctcccccaggaaagatttcaaaggcaagcgccagtggtagggtagaagaaaacagctgtggtcgggcacggtggctcacgcctataatcccagcactttgggaggccgaggcgggtggatcacctgaggtcaggagttccagaccagcctggccaacatggtgaaacctcatctctactaaaaatacaaaaaaactagctgggcgtggtggcgggcgcctataatcccagctacttgggaggctgaggcaggagaattgattgaacctgggaggcggaggttgcagtgagccaagatcacgtcattgcactccagcctggtcaacaagagtaaaacttcatctcaaaaaacaaaacaaaacaaaaacaacaacaaaaaacaaaagaaaaacaaacaaaaccaaaaccaaaacagctgtattgaagctgcagtgttgcagctctgtgactgccctgcagagcagggctaccccataggcagcgagcagcagctcagggcagttctgcagtcagatttatacccacttttaattacatgtagattaaggagctgcatatacaaagatttctagggaaggagtagtaacttctgggtcctggggtctttgccacggaacagggcagtatgccagggtgttgccacggcaatggtaaactgacatggcaccctgggggtcatgccttagggaaagccgcttccactcgcccctgttttagctcatcttcaagttagtctggtgtccaagctccaccgcctgcctcagtctggtgacctccttctgtgtctgatgagcatggcagcgttgggaccttccccttccaactctctccctcctcttcgtcctccctaaaggacgggtacgaggaggggctatcacgccagcgacatcctctagcaccacccaggtgtgtggggtggggcaggggggcgacgaagtatccagcccagggccacgtagtcaactgccaagggcttcctgggcttctcttctgccccagagcttgtctccacccagcaggggttcccccagcgctaactgtatccctaaagttctgatgtactttacttttccatcttccttgttgttaacatctaccttctgctctgtaagcaaaactaaatcttctgtgctttgtccataggttgattctacaatctgaaaatcaataaacagcatttgcatgatt

SEQ ID NO: 108977 - DNA, 2959 bp, Homo sapiens
  Payload ID: 1411
  Gene Symbol: AIPL1
  Gene Name: aryl hydrocarbon receptor interacting protein-like 1
  Uniprot ID: Q9NZN9
  ENST ID: ENST00000381129
  CDS Start-End: 82-1236
agagtctcagccgcctaagtgtcttccccggaggtgagattatctccgcctgtgctggacacctccctttctcctgcagccatggatgccgctctgctcctgaacgtggaaggggtcaagaaaaccattctgcacgggggcacgggcgagctcccaaacttcatcaccggatcccgagtgatctttcatttccgcaccatgaaatgtgatgaggagcggacagtcattgacgacagtcggcaggtgggccagcccatgcacatcatcatcggaaacatgttcaagctcgaggtctgggagatcctgcttacctccatgcgggtgcacgaggtggccgagttctggtgcgacaccatccacacgggggtctaccccatcctatcccggagcctgaggcagatggcccagggcaaggaccccacagagtggcacgtgcacacgtgcgggctggccaacatgttcgcctaccacacgctgggctacgaggacctggacgagctgcagaaggagcctcagcctctggtctttgtgatcgagctgctgcaggttgatgccccgagtgattaccagagggagacctggaacctgagcaatcatgagaagatgaaggcggtgcccgtcctccacggagagggaaatcggctcttcaagctgggccgctacgaggaggcctcttccaagtaccaggaggccatcatctgcctaaggaacctgcagaccaaggagaagccatgggaggtgcagtggctgaagctggagaagatgatcaatactctgatcctcaactactgccagtgcctgctgaagaaggaggagtactatgaggtgctggagcacaccagtgatattctccggcaccacccaggcatcgtgaaggcctactacgtgcgtgcccgggctcacgcagaggtgtggaatgaggccgaggccaaggcggacctccagaaagtgctggagctggagccgtccatgcagaaggcggtgcgcagggagctgaggctgctggagaaccgcatggcggagaagcaggaggaggagcggctgcgctgccggaacatgctgagccagggtgccacgcagcctcccgcagagccacccacagagccacccgcacagtcatccacagagccacctgcagagccacccacagcaccatctgcagagctgtccgcagggccccctgcagagccagccacagagccacccccgtccccagggcactcgctgcagcactgagccccctgaggcccacagccacccaggcagggagcaagtggcctggtcacttctggttcgattgaccaggatcgtggtgtcactttttaaaatttaaaattaatttttgaaatcaaagtcagacacacccatggtaaaaaaaaaaaaaaaaacaatcccaagggtacagaagagcttatgaataaaagtagttttctcctctacccctctcattccttccgtgccatggttttaattgaccctgtttttaattcttctggtagttttctctatttccaagtaatctgtttaaatcagtttctagattttaccccatgtcaatgacaaatgaggatttgatgctctgatcctttctcatgcctgatacccctccctgtctccccattttggatagttacatttgggggtcatctcggtgatttttgtaactttacgcaggacacttagagctctctagaatcccactgactttagtgggtcttgatgtagggtgggcaagccccgacactggagcttagcctgagagggttcttggcctcccccaggaaagatttcaaaggcaagcgccagtggtagggtagaagaaaacagctgtggtcgggcacggtggctcacgcctataatcccagcactttgggaggccgaggcgggtggatcacctgaggtcaggagttccagaccagcctggccaacatggtgaaacctcatctctactaaaaatacaaaaaaactagctgggcgtggtggcgggcgcctataatcccagctacttgggaggctgaggcaggagaattgattgaacctgggaggcggaggttgcagtgagccaagatcacgtcattgcactccagcctggtcaacaagagtaaaacttcatctcaaaaaacaaaacaaaacaaaaacaacaacaaaaaacaaaagaaaaacaaacaaaaccaaaaccaaaacagctgtattgaagctgcagtgttgcagctctgtgactgccctgcagagcagggctaccccataggcagcgagcagcagctcagggcagttctgcagtcagatttatacccacttttaattacatgtagattaaggagctgcatatacaaagatttctagggaaggagtagtaacttctgggtcctggggtctttgccacggaacagggcagtatgccagggtgttgccacggcaatggtaaactgacatggcaccctgggggtcatgccttagggaaagccgcttccactcgcccctgttttagctcatcttcaagttagtctggtgtccaagctccaccgcctgcctcagtctggtgacctccttctgtgtctgatgagcatggcagcgttgggaccttccccttccaactctctccctcctcttcgtcctccctaaaggacgggtacgaggaggggctatcacgccagcgacatcctctagcaccacccaggtgtgtggggtggggcaggggggcgacgaagtatccagcccagggccacgtagtcaactgccaagggcttcctgggcttctcttctgccccagagcttgtctccacccagcaggggttcccccagcgctaactgtatccctaaagttctgatgtactttacttttccatcttccttgttgttaacatctaccttctgctctgtaagcaaaactaaatcttctgtgctttgtccataggttgattctacaatctgaaaatcaataaacagcatttgcatgatt

SEQ ID NO: 108978 - DNA, 2074 bp, Homo sapiens
  Payload ID: 1411
  Gene Symbol: AIPL1
  Gene Name: aryl hydrocarbon receptor interacting protein-like 1
  ENST ID: ENST00000574506
  CDS Start-End: 30-1148
tgctggacacctccctttctcctgcagccatggatgccgctctgctcctgaacgtggaaggggtcaagaaaaccattctgcacgggggcacgggcgagctcccaaacttcatcaccggatcccgagagcggacagtcattgacgacagtcggcaggtgggccagcccatgcacatcatcatcggaaacatgttcaagctcgaggtctgggagatcctgcttacctccatgcgggtgcacgaggtggccgagttctggtgcgacaccatccacacgggggtctaccccatcctatcccggagcctgaggcagatggcccagggcaaggaccccacagagtggcacgtgcacacgtgcgggctggccaacatgttcgcctaccacacgctgggctacgaggacctggacgagctgcagaaggagcctcagcctctggtctttgtgatcgagctgctgcaggttgatgccccgagtgattaccagagggagacctggaacctgagcaatcatgagaagatgaaggcggtgcccgtcctccacggagagggaaatcggctcttcaagctgggccgctacgaggaggcctcttccaagtaccaggaggccatcatctgcctaaggaacctgcagaccaaggagaagccatgggaggtgcagtggctgaagctggagaagatgatcaatactctgatcctcaactactgccagtgcctgctgaagaaggaggagtactatgaggtgctggagcacaccagtgatattctccggcaccacccaggcatcgtgaaggcctactacgtgcgtgcccgggctcacgcagaggtgtggaatgaggccgaggccaaggcggacctccagaaagtgctggagctggagccgtccatgcagaaggcggtgcgcagggagctgaggctgctggagaaccgcatggcggagaagcaggaggaggagcggctgcgctgccggaacatgctgagccagggtgccacgcagcctcccgcagagccacccacagagccacccgcacagtcatccacagagccacctgcagagccacccacagcaccatctgcagagctgtccgcagggccccctgcagagccagccacagagccacccccgtccccagggcactcgctgcagcactgagccccctgaggcccacagccacccaggcagggagcaagtggcctggtcacttctggttcgattgaccaggatcgtggtgtcactttttaaaatttaaaattaatttttgaaatcaaagtcagacacacccatggtaaaaaaaaaaaaaaaaacaatcccaagggtacagaagagcttatgaataaaagtagttttctcctctacccctctcattccttccgtgccatggttttaattgaccctgtttttaattcttctggtagttttctctatttccaagtaatctgtttaaatcagtttctagattttaccccatgtcaatgacaaatgaggatttgatgctctgatcctttctcatgcctgatacccctccctgtctccccattttggatagttacatttgggggtcatctcggtgatttttgtaactttacgcaggacacttagagctctctagaatcccactgactttagtgggtcttgatgtagggtgggcaagccccgacactggagcttagcctgagagggttcttggcctcccccaggaaagatttcaaaggcaagcgccagtggtagggtagaagaaaacagctgtggtcgggcacggtggctcacgcctataatcccagcactttgggaggccgaggcgggtggatcacctgaggtcaggagttccagaccagcctggccaacatggtgaaacctcatctctactaaaaatacaaaaaaactagctgggcgtggtggcgggcgcctataatcccagctacttgggaggctgaggcaggagaattgattgaacctgggaggcggaggttgcagtgagccaagatcacgtcattgcactccagcctggtcaacaagagtaaaacttcatctcaaaaaacaaaacaaaacaaaaacaacaacaaaaaacaaaagaaaaa

SEQ ID NO: 108979 - DNA, 1077 bp, Homo sapiens
  Payload ID: 1411
  Gene Symbol: AIPL1
  Gene Name: aryl hydrocarbon receptor interacting protein-like 1
  Uniprot ID: Q9NZN9
  ENST ID: ENST00000576307
  CDS Start-End: 49-1023
gtgagattatctccgcctgtgctggacacctccctttctcctgcagccatggatgccgctctgctcctgaacgtggaaggggtcaagaaaaccattctgcacgggggcacgggcgagctcccaaacttcatcaccggatcccgacacacgggggtctaccccatcctatcccggagcctgaggcagatggcccagggcaaggaccccacagagtggcacgtgcacacgtgcgggctggccaacatgttcgcctaccacacgctgggctacgaggacctggacgagctgcagaaggagcctcagcctctggtctttgtgatcgagctgctgcaggttgatgccccgagtgattaccagagggagacctggaacctgagcaatcatgagaagatgaaggcggtgcccgtcctccacggagagggaaatcggctcttcaagctgggccgctacgaggaggcctcttccaagtaccaggaggccatcatctgcctaaggaacctgcagaccaaggagaagccatgggaggtgcagtggctgaagctggagaagatgatcaatactctgatcctcaactactgccagtgcctgctgaagaaggaggagtactatgaggtgctggagcacaccagtgatattctccggcaccacccaggcatcgtgaaggcctactacgtgcgtgcccgggctcacgcagaggtgtggaatgaggccgaggccaaggcggacctccagaaagtgctggagctggagccgtccatgcagaaggcggtgcgcagggagctgaggctgctggagaaccgcatggcggagaagcaggaggaggagcggctgcgctgccggaacatgctgagccagggtgccacgcagcctcccgcagagccacccacagagccacccgcacagtcatccacagagccacctgcagagccacccacagcaccatctgcagagctgtccgcagggccccctgcagagccagccacagagccacccccgtccccagggcactcgctgcagcactgagccccctgaggcccacagccacccaggcagggagcaagtggcctggtcacttct

SEQ ID NO: 108980 - DNA, 2111 bp, Homo sapiens
  Payload ID: 1411
  Gene Symbol: AIPL1
  Gene Name: aryl hydrocarbon receptor interacting protein-like 1
  ENST ID: ENST00000575265
  CDS Start-End: 18-830
ccctttctcctgcagccatggatgccgctctgctcctgaacgtggaaggggtcaagaaaaccattctgcacgggggcacgggcgagctcccaaacttcatcaccggatcccgagtgatctttcatttccgcaccatgaaatgtgatgaggagcggacagtcattgacgacagtcggcaggtgggccagcccatgcacatcatcatcggaaacatgttcaagctcgaggtctgggagatcctgcttacctccatgcgggtgcacgaggtggccgagttctggtgcgacaccatccacacgggggtctaccccatcctatcccggagcctgaggcagatggcccagggcaaggaccccacagagtggcacgtgcacacgtgcgggctggccaacatgttcgcctaccacacgctgggctacgaggacctggacgagctgcagaaggagcctcagcctctggtctttgtgatcgagctgctgcaggttgatgccccgagtgattaccagagggagacctggaacctgagcaatcatgagaagatgaaggcggtgcccgtcctccacggagagggaaatcggctcttcaagctgggccgctacgaggaggcctcttccaagtaccaggaggccatcatctgcctaaggaacctgcagaccaaggagaagccatgggaggtgcagtggctgaagctggagaagatgatcaatactctgatcctcaactactgccagtgcctgctgaagaaggaggagtactatgaggtgctggagcacaccagtgatattctccggcaccacccaggtgcgcggggctgcaggggcggacagtgagggggcgcccagcccagggccacggagacacctgccatagccttcctggacttttctttccaccccaccagggcaccaaaccttgtctccacccagccgggtttccccgagtgtgtaactgaattgtgggtgatggatgggcagtgcttggcgcggggcggccctttattttaatgtgtgtttgaacacttacccaggaagctcgccaagcttgtgatttcagcggaacggtaaacaggcgtttaaaaaagaggggcaatcaatatagggaaaaatattatgatgtcggtactagtactggtgttgcgaggatatggcaccgtcagtactagtattgacttaatgctcgaatcgtgctcacagtaaaaacatccagcccctggctcatgcatcaggcacacgtcgtctgcgtttattatctcatttaatcctcataatcctcataatcaccatatgagggaggtgcagggaaagggcctgaaggttatctaatttaggtagcgtctataagaaaaataaaacaaagttatgaatataaaattactcacagggccttaaaaaggagaggaggaggtactgctattatgatcatcatctccatcttacagttgaggaaaccgagggatgggggatacagagaggttaaggatcatggcggggctgagggtcttggaggctggtgagtcccagctgggctggggctgcctctgaggctgggaagggagctgtagctggatgctccctgctccccacaggcatcgtgaaggcctactacgtgcgtgcccgggctcacgcagaggtgtggaatgaggccgaggccaaggcggacctccagaaagtgctggagctggagccgtccatgcagaaggcggtgcgcagggagctgaggctgctggagaaccgcatggcggagaagcaggaggaggagcggctgcgctgccggaacatgctgagccagggtgccacgcagcctcccgcagagccacccacagagccacccgcacagtcatccacagagccacctgcagagccacccacagcaccatctgcagagctgtccgcagggccccctgcagagccagccacagagccacccccgtccccagggcactcgctgcagcactgagccccctgaggcccacagccacccaggcagggagcaagtggcctggtcacttctggttcgattgaccaggatcgtggtgtcactttttaaaatttaaaattaatttttgaaatcaaagtcagacacacccatggtaaaaaaaaaaaaaaaaacaa

SEQ ID NO: 108981 - DNA, 1202 bp, Homo sapiens
  Payload ID: 1411
  Gene Symbol: AIPL1
  Gene Name: aryl hydrocarbon receptor interacting protein-like 1
  ENST ID: ENST00000571740
  CDS Start-End: 17-805
cctttctcctgcagccatggatgccgctctgctcctgaacgtggaaggggtcaagaaaaccattctgcacgggggcacgggcgagctcccaaacttcatcaccggatcccgagtgatctttcatttccgcaccatgaaatgtgatgaggagcggacagtcattgacgacagtcggcaggtgggccagcccatgcacatcatcatcggaaacatgttcaagctcgaggtctgggagatcctgcttacctccatgcgggtgcacgaggtggccgagttctggtgcgacaccatccacacgggggtctaccccatcctatcccggagcctgaggcagatggcccagggcaaggaccccacagagtggcacgtgcacacgtgcgggctggccaacatgttcgcctaccacacgctgggctacgaggacctggacgagctgcagaaggagcctcagcctctggtctttgtgatcgagctgctgcagagggagacctggaacctgagcaatcatgagaagatgaaggcggtgcccgtcctccacggagagggaaatcggctcttcaagctgggccgctacgaggaggcctcttccaagtaccaggaggccatcatctgcctaaggaacctgcagaccaaggagaagccatgggaggtgcagtggctgaagctggagaagatgatcaatactctgatcctcaactactgccagtgcctgctgaagaaggaggagtactatgaggtgctggagcacaccagtgatattctccggcaccacccaggtgcgcggggctgcaggggcggacagtgagggggcgcccagcccagggccacggagacacctgccatagccttcctggacttttctttccaccccaccagggcaccaaaccttgtctccacccagccgggtttccccgagtgtgtaactgaattgtgggtgatggatgggcagtgcttggcgcggggcggccctttattttaatgtgtgtttgaacacttacccaggaagctcgccaagcttgtgatttcagcggaacggtaaacaggcgtttaaaaaagaggggcaatcaatatagggaaaaatattatgatgtcggtactagtactggtgttgcgaggatatggcaccgtcagtactagtattgacttaatgctcgaatcgtgctcacagtaaaaacatccagcccctggctcatgcatcaggc

SEQ ID NO: 108982 - DNA, 653 bp, Homo sapiens
  Payload ID: 1411
  Gene Symbol: AIPL1
  Gene Name: aryl hydrocarbon receptor interacting protein-like 1
  ENST ID: ENST00000574913
  CDS Start-End: 4-653
gccatggatgccgctctgctcctgaacgtggaaggggtcaagaaaaccattctgcacgggggcacgggcgagctcccaaacttcatcaccggatcccgagtgatctttcatttccgcaccatgaaatgtgatgaggagcggacagtcattgacgacagtcggcaggtgggccagcccatgcacatcatcatcggaaacatgttcaagctcgaggtctgggagatcctgcttacctccatgcgggtgcacgaggtggccgagttctggtgcgacaccatccacacgggggtctaccccatcctatcccggagcctgaggcagatggcccagggcaaggaccccacagagtggcacgtgcacacgtgcgggctggccaacatgttcgcctaccacacgctgggctacgaggacctggacgagctgcagaaggagcctcagcctctggtctttgtgatcgagctgctgcagctctggggccaggttgatgccccgagtgattaccagagggagacctggaacctgagcaatcatgagaagatgaaggcggtgcccgtcctccacggagagggaaatcggctcttcaagctgggccgctacgaggaggcctcttccaagtaccaggaggccatcatctgcctaaggaacctgcagac

SEQ ID NO: 108983 - DNA, 1190 bp, Homo sapiens
  Payload ID: 1411
  Gene Symbol: AIPL1
  Gene Name: aryl hydrocarbon receptor interacting protein-like 1
  Uniprot ID: Q9NZN9
  ENST ID: ENST00000576776
  CDS Start-End: 49-1131
gtgagattatctccgcctgtgctggacacctccctttctcctgcagccatggatgccgctctgctcctgaacgtggaaggggtcaagaaaaccattctgcacgggggcacgggcgagctcccaaacttcatcaccggatcccgagtgatctttcatttccgcaccatgaaatgtgatgaggagcggacagtcattgacgacagtcggcaggtgggccagcccatgcacatcatcatcggaaacatgttcaagctcgaggtctgggagatcctgcttacctccatgcgggtgcacgaggtggccgagttctggtgcgacaccatccacacgggggtctaccccatcctatcccggagcctgaggcagatggcccagggcaaggaccccacagagtggcacgtgcacacgtgcgggctggccaacatgttcgcctaccacacgctgggctacgaggacctggacgagctgcagaaggagcctcagcctctggtctttgtgatcgagctgctgcaggttgatgccccgagtgattaccagagggagacctggaacctgagcaatcatgagaagatgaaggcggtgcccgtcctccacggagagggaaatcggctcttcaagctgggccgctacgaggaggcctcttccaagtaccaggaggccatcatctgcctaaggaacctgcagaccaagtgcctgctgaagaaggaggagtactatgaggtgctggagcacaccagtgatattctccggcaccacccaggcatcgtgaaggcctactacgtgcgtgcccgggctcacgcagaggtgtggaatgaggccgaggccaaggcggacctccagaaagtgctggagctggagccgtccatgcagaaggcggtgcgcagggagctgaggctgctggagaaccgcatggcggagaagcaggaggaggagcggctgcgctgccggaacatgctgagccagggtgccacgcagcctcccgcagagccacccacagagccacccgcacagtcatccacagagccacctgcagagccacccacagcaccatctgcagagctgtccgcagggccccctgcagagccagccacagagccacccccgtccccagggcactcgctgcagcactgagccccctgaggcccacagccacccaggcagggagcaagtggcctggtcacttctggttc

SEQ ID NO: 108984 - DNA, 1196 bp, Homo sapiens
  Payload ID: 1411
  Gene Symbol: AIPL1
  Gene Name: aryl hydrocarbon receptor interacting protein-like 1
  Uniprot ID: Q9NZN9
  ENST ID: ENST00000570466
  CDS Start-End: 49-1137
gtgagattatctccgcctgtgctggacacctccctttctcctgcagccatggatgccgctctgctcctgaacgtggaaggggtcaagaaaaccattctgcacgggggcacgggcgagctcccaaacttcatcaccggatcccgagtgggccagcccatgcacatcatcatcggaaacatgttcaagctcgaggtctgggagatcctgcttacctccatgcgggtgcacgaggtggccgagttctggtgcgacaccatccacacgggggtctaccccatcctatcccggagcctgaggcagatggcccagggcaaggaccccacagagtggcacgtgcacacgtgcgggctggccaacatgttcgcctaccacacgctgggctacgaggacctggacgagctgcagaaggagcctcagcctctggtctttgtgatcgagctgctgcaggttgatgccccgagtgattaccagagggagacctggaacctgagcaatcatgagaagatgaaggcggtgcccgtcctccacggagagggaaatcggctcttcaagctgggccgctacgaggaggcctcttccaagtaccaggaggccatcatctgcctaaggaacctgcagaccaaggagaagccatgggaggtgcagtggctgaagctggagaagatgatcaatactctgatcctcaactactgccagtgcctgctgaagaaggaggagtactatgaggtgctggagcacaccagtgatattctccggcaccacccaggcatcgtgaaggcctactacgtgcgtgcccgggctcacgcagaggtgtggaatgaggccgaggccaaggcggacctccagaaagtgctggagctggagccgtccatgcagaaggcggtgcgcagggagctgaggctgctggagaaccgcatggcggagaagcaggaggaggagcggctgcgctgccggaacatgctgagccagggtgccacgcagcctcccgcagagccacccacagagccacccgcacagtcatccacagagccacctgcagagccacccacagcaccatctgcagagctgtccgcagggccccctgcagagccagccacagagccacccccgtccccagggcactcgctgcagcactgagccccctgaggcccacagccacccaggcagggagcaagtggcctggtcacttctggttc

SEQ ID NO: 108985 - DNA, 409 bp, Homo sapiens
  Payload ID: 1411
  Gene Symbol: AIPL1
  Gene Name: aryl hydrocarbon receptor interacting protein-like 1
  ENST ID: ENST00000570584
  CDS Start-End: 1-409
tggaaggggtcaagaaaaccattctgcacgggggcacgggcgagctcccaaacttcatcaccggatcccgagtgatctttcatttccgcaccatgaaatgtgatgaggagcggacagtcattgacgacagtcggcaggtgggccagcccatgcacatcatcatcggaaacatgttcaagctcgaggtctgggagatcctgcttacctccatgcgggtgcacgaggtggccgagttctggtgcgacaccatccctgaacccacgccctcatggttttctcctctgaatgctaagactgccccattactgagccctcacgtccagccggctggaatgagctccccgtcgctggaggtattcaaggagcaacctgatgctttcttgtgcttcatgctctgggtgggaggagt

SEQ ID NO: 108986 - DNA, 1237 bp, Homo sapiens
  Payload ID: 1411
  Gene Symbol: AIPL1
  Gene Name: aryl hydrocarbon receptor interacting protein-like 1
  ENST ID: ENST00000621374
  CDS Start-End: 15-995
tttctcctgcagccatggatgccgctctgctcctgaacgtggaaggggtcaagaaaaccattctgcacgggggcacgggcgagctcccaaacttcatcaccggatcccgagtgatctttcatttccgcaccatgaaatgtgatgaggagcggacagtcattgacgacagtcggcaggtgggccagcccatgcacatcatcatcggaaacatgttcaagctcgaggtctgggagatcctgcttacctccatgcgggtgcacgaggtggccgagttctggtgcgacaccatccacacgggggtctaccccatcctatcccggagcctgaggcagatggcccagggcaaggaccccacagagtggcacgtgcacacgtgcgggctggccaacatgttcgcctaccacacgctgggctacgaggacctggacgagctgcagaaggagcctcagcctctggtctttgtgatcgagctgctgcaggttgatgccccgagtgattaccagagggagacctggaacctgagcaatcatgagaagatgaaggcggtgcccgtcctccacggagagggaaatcggctcttcaagctgggccgctacgaggaggcctcttccaagtaccaggaggccatcatctgcctaaggaacctgcagaccaaggagaagccatgggaggtgcagtggctgaagctggagaagatgatcaatactctgatcctcaactactgccagtgcctgctgaagaaggaggagtactatgaggtgctggagcacaccagtgatattctccggcaccacccaggcatcgtgaaggcctactacgtgcgtgcccgggctcacgcagaggtgtggaatgaggccgaggccaaggcggacctccagaaagtgctggagctggagccgtccatgcagaaggcggtgcgcagggagctgaggctgctggagaacgcatggcggagaagcaggaggaggagcggctgcgctgccggaacatgctgagccagggtgccacgcagcctcccgcagagccacccacagagccacccgcacagtcatccacagagccacctgcagagccacccacagcaccatctgcagagctgtccgcagggccccctgcagagccagccacagagccacccccgtccccagggcactcgctgcagcactgagccccctgaggcccacagccacccaggcagggagcaagtggcctggtcacttctggttcgattgaccag

SEQ ID NO: 108987 - DNA, 3538 bp, Homo sapiens
  Payload ID: 1412
  Gene Symbol: ARNT
  Gene Name: aryl hydrocarbon receptor nuclear translocator
  Uniprot ID: P27540
  ENST ID: ENST00000354396
  CDS Start-End: 13-2376
gcatctgcggccatggcggcgactactgccaaccccgaaatgacatcagatgtaccatcactgggtccagccattgcctctggaaactctggacctggaattcaaggtggaggagccattgtccagagggctattaagcggcgaccagggctggattttgatgatgatggagaagggaacagtaaatttttgaggtgtgatgatgatcagatgtctaacgataaggagcggtttgccaggtcggatgatgagcagagctctgcggataaagagagacttgccagggaaaatcacagtgaaattgaacggcggcgacggaacaagatgacagcctacatcacagaactgtcagatatggtacccacctgtagtgccctggctcgaaaaccagacaagctaaccatcttacgcatggcagtttctcacatgaagtccttgcggggaactggcaacacatccactgatggctcctataagccgtctttcctcactgatcaggaactgaaacatttgatcttggaggcagcagatggctttctgtttattgtctcatgtgagacaggcagggtggtgtatgtgtctgactccgtgactcctgttttgaaccagccacagtctgaatggtttggcagcacactctatgatcaggtgcacccagatgatgtggataaacttcgtgagcagctttccacttcagaaaatgccctgacagggcgtatcctggatctaaagactggaacagtgaaaaaggaaggtcagcagtcttccatgagaatgtgtatgggctcaaggagatcgtttatttgccgaatgaggtgtggcagtagctctgtggacccagtttctgtgaataggctgagctttgtgaggaacagatgcaggaatggacttggctctgtaaaggatggggaacctcacttcgtggtggtccactgcacaggctacatcaaggcctggcccccagcaggtgtttccctcccagatgatgacccagaggctggccagggaagcaagttttgcctagtggccattggcagattgcaggtaactagttctcccaactgtacagacatgagtaatgtttgtcaaccaacagagttcatctcccgacacaacattgagggtatcttcacttttgtggatcaccgctgtgtggctactgttggctaccagccacaggaactcttaggaaagaatattgtagaattctgtcatcctgaagaccagcagcttctaagagacagcttccaacaggtagtgaaattaaaaggccaagtgctgtctgtcatgttccggttccggtctaagaaccaagaatggctctggatgagaaccagctcctttactttccagaacccttactcagatgaaattgagtacatcatctgtaccaacaccaatgtgaagaactctagccaagaaccacggcctacactctccaacacaatccagaggccacaactaggtcccacagctaatttacccctggagatgggctcaggacagctggcacccaggcagcagcaacagcaaacagaattggacatggtaccaggaagagatggactggccagctacaatcattcccaggtggttcagcctgtgacaaccacaggaccagaacacagcaagccccttgagaagtcagatggtttatttgcccaggatagagatccaagattttcagaaatctatcacaacatcaatgcggatcagagtaaaggcatctcctccagcactgtccctgccacccaacagctattctcccagggcaacacattccctcctaccccccggccggcagagaatttcagtggcctagcccctcctgtaaccattgtccagccatcagcttctgcaggacagatgttggcccagatttcccgccactccaaccccacccaaggagcaaccccaacttggacccctactacccgctcaggcttttctgcccagcaggtggctacccaggctactgctaagactcgtacttcccagtttggtgtgggcagctttcagactccatcctccttcagctccatgtccctccctggtgccccaactgcatcgcctggtgctgctgcctaccctagtctcaccaatcgtggatctaactttgctcctgagactggacagactgcaggacaattccagacacggacagcagagggtgtgggtgtctggccacagtggcagggccagcagcctcatcatcgttcaagttctagtgagcaacatgttcaacaaccgccagcacagcaacctggccagcctgaggtcttccaggagatgctgtccatgctgggagatcagagcaacagctacaacaatgaagaattccctgatctaactatgtttccccccttttcagaatagaactattggggtgaggataaggggtgggggagaaaaaatcactgtttgtttttaaaaagcaaatctttctgtaaacagaataaaagttcctctcccttcccttccctcacccctgacatgtaccccctttcccttctggctgttcccctgctctgttgcctctctaaggtaacatttatagaagaaatggaatgaatctccaaggcttttaggactgtctgaaaatttgaggctgggtgaagttaaaacacctttccttatgtctcctgacctgaaattgtatagtgttgatttgtgctgagatcaagaggcaggttagaagaacctgacatccactgtttgccttggatagtatggcttgtttttggaaagaaattctgaagagagtggaggagaggagaaatgtcctcatatttgaggaccatgaaacattgtaggtatatatggggctttagcaagtttgagcataggctctttttgctgcctgtgagcagtccctctggaaagaaacatgtgagtaagtgagagagagtgtgtgtgtatgtgtgtgtgtgtgtgtgtgcgcacacatgcttctgtatttcactctttctccctattagggagttatgcaaaatttgtccccgattttacctttgtctttctgtgtacttttcaaagagtcctaaggagttaaatcttccaggtattttccacttagtattgcagccaaagaatatttaaataaacgtctttgctgcgcttgcatccatgcccagccaatatacaactgtaaagcaaatatagaaagtcggctgttgatacgattgtctgttatcgaacacattcagtgataaagctgggttactgctgcttttggtgctctcaccttatctggaagatctgcaaacattacctaaataggctggcaagataaacactttctggaacccgagacttggccataaagataatgctgcatttttctgtcagaatcacatatgatgtgtgttctgtagaggttatttctgcatggaaactcaacttcttggattagccgtcccagtgaaaatcctcattgttggagtgtaaaccaaatacgaagccctcttgcaaagtagcctctttcatcccatactcaaaatacccagtttagcaagcaactgagatttaagtctctctg

SEQ ID NO: 108988 - DNA, 4887 bp, Homo sapiens
  Payload ID: 1412
  Gene Symbol: ARNT
  Gene Name: aryl hydrocarbon receptor nuclear translocator
  Uniprot ID: P27540
  ENST ID: ENST00000358595
  CDS Start-End: 202-2571
atataggcggggtctccccgccgcaggggctgggatgctgggggctgctgaagccgccatcttggattccgcggtagcggaggcggcggtcaggcgccgcttctggggagtggcctttcttttcccctccctcccggttcggtggcggcggctcctcccactgggggggggggtggcgcggcggcggtggcatctgcggccatggcggcgactactgccaaccccgaaatgacatcagatgtaccatcactgggtccagccattgcctctggaaactctggacctggaattcaaggtggaggagccattgtccagagggctattaagcggcgaccagggctggattttgatgatgatggagaagggaacagtaaatttttgaggtgtgatgatgatcagatgtctaacgataaggagcggtttgccaggtcggatgatgagcagagctctgcggataaagagagacttgccagggaaaatcacagtgaaattgaacggcggcgacggaacaagatgacagcctacatcacagaactgtcagatatggtacccacctgtagtgccctggctcgaaaaccagacaagctaaccatcttacgcatggcagtttctcacatgaagtccttgcggggaactggcaacacatccactgatggctcctataagccgtctttcctcactgatcaggaactgaaacatttgatcttggaggcagcagatggctttctgtttattgtctcatgtgagacaggcagggtggtgtatgtgtctgactccgtgactcctgttttgaaccagccacagtctgaatggtttggcagcacactctatgatcaggtgcacccagatgatgtggataaacttcgtgagcagctttccacttcagaaaatgccctgacagggcgtatcctggatctaaagactggaacagtgaaaaaggaaggtcagcagtcttccatgagaatgtgtatgggctcaaggagatcgtttatttgccgaatgaggtgtggcagtagctctgtggacccagtttctgtgaataggctgagctttgtgaggaacagatgcaggaatggacttggctctgtaaaggatggggaacctcacttcgtggtggtccactgcacaggctacatcaaggcctggcccccagcaggtgtttccctcccagatgatgacccagaggctggccagggaagcaagttttgcctagtggccattggcagattgcaggtaactagttctcccaactgtacagacatgagtaatgtttgtcaaccaacagagttcatctcccgacacaacattgagggtatcttcacttttgtggatcaccgctgtgtggctactgttggctaccagccacaggaactcttaggaaagaatattgtagaattctgtcatcctgaagaccagcagcttctaagagacagcttccaacaggtagtgaaattaaaaggccaagtgctgtctgtcatgttccggttccggtctaagaaccaagaatggctctggatgagaaccagctcctttactttccagaacccttactcagatgaaattgagtacatcatctgtaccaacaccaatgtgaagaactctagccaagaaccacggcctacactctccaacacaatccagaggccacaactaggtcccacagctaatttacccctggagatgggctcaggacagctggcacccaggcagcagcaacagcaaacagaattggacatggtaccaggaagagatggactggccagctacaatcattcccaggtggttcagcctgtgacaaccacaggaccagaacacagcaagccccttgagaagtcagatggtttatttgcccaggatagagatccaagattttcagaaatctatcacaacatcaatgcggatcagagtaaaggcatctcctccagcactgtccctgccacccaacagctattctcccagggcaacacattccctcctaccccccggccggcagagaatttcaggaatagtggcctagcccctcctgtaaccattgtccagccatcagcttctgcaggacagatgttggcccagatttcccgccactccaaccccacccaaggagcaaccccaacttggacccctactacccgctcaggcttttctgcccagcaggtggctacccaggctactgctaagactcgtacttcccagtttggtgtgggcagctttcagactccatcctccttcagctccatgtccctccctggtgccccaactgcatcgcctggtgctgctgcctaccctagtctcaccaatcgtggatctaactttgctcctgagactggacagactgcaggacaattccagacacggacagcagagggtgtgggtgtctggccacagtggcagggccagcagcctcatcatcgttcaagttctagtgagcaacatgttcaacaaccgccagcacagcaacctggccagcctgaggtcttccaggagatgctgtccatgctgggagatcagagcaacagctacaacaatgaagaattccctgatctaactatgtttccccccttttcagaatagaactattggggtgaggataaggggtgggggagaaaaaatcactgtttgtttttaaaaagcaaatctttctgtaaacagaataaaagttcctctcccttcccttccctcacccctgacatgtaccccctttcccttctggctgttcccctgctctgttgcctctctaaggtaacatttatagaagaaatggaatgaatctccaaggcttttaggactgtctgaaaatttgaggctgggtgaagttaaaacacctttccttatgtctcctgacctgaaattgtatagtgttgatttgtgctgagatcaagaggcaggttagaagaacctgacatccactgtttgccttggatagtatggcttgtttttggaaagaaattctgaagagagtggaggagaggagaaatgtcctcatatttgaggaccatgaaacattgtaggtatatatggggctttagcaagtttgagcataggctctttttgctgcctgtgagcagtccctctggaaagaaacatgtgagtaagtgagagagagtgtgtgtgtatgtgtgtgtgtgtgtgtgtgcgcacacatgcttctgtatttcactctttctccctattagggagttatgcaaaatttgtccccgattttacctttgtctttctgtgtacttttcaaagagtcctaaggagttaaatcttccaggtattttccacttagtattgcagccaaagaatatttaaataaacgtctttgctgcgcttgcatccatgcccagccaatatacaactgtaaagcaaatatagaaagtcggctgttgatacgattgtctgttatcgaacacattcagtgataaagctgggttactgctgcttttggtgctctcaccttatctggaagatctgcaaacattacctaaataggctggcaagataaacactttctggaacccgagacttggccataaagataatgctgcatttttctgtcagaatcacatatgatgtgtgttctgtagaggttatttctgcatggaaactcaacttcttggattagccgtcccagtgaaaatcctcattgttggagtgtaaaccaaatacgaagccctcttgcaaagtagcctctttcatcccatactcaaaatacccagtttagcaagcaactgagatttaagtctctctggccctaagaggtttttcctctttgctccctccaatcttgagattgggttttgctttagagtgcaagtatcataattccgtatgatagatggggcctggacacccatctcaacagggtcacttggtaattaacaatagccatataaatgcggatacaggttactaccctcaccctttaccttcctcaggtaacagtcgtagataccagcttttttttttttttttttaaattggctttggccagtagctaaagtgcaagactgaattaatgagaagatatattaaatgtagtcataggggactgaggagcaagggtggccttgaagaggccaaaggaatgtccatttgctgagtttcccttccttatgtctccagtctggtgccaggtagtggagtaaaaaaggagacagtttatttttttattctatgtgcacacttacagtatacatatatatttatatcacaatttacgaaaccaaaaagttgagtttccaatggaacccttgttttttaataatcgactttttaaatgtgatcaggactataatattgtacagttattatagggcttttggggaaggggaggatagcgagaagatgctctgggggttttgtttttgcttttccttcagggttttatttttgactgttttgttttcttgttggccatttctgtattgctggcatctgtgctaagctttacagtggcaaaaataatgacatgtagcaaagattttcaaacaaaatattttttccttttgtaaaatttcttgtgttgtgtgatcttgattgcggctttatcattcctttccagttcataaacaacaggcacccacaaccagaggaatctatagtttaagctccagacatacaaacataaggcacattgtgtctttaatttcaggaatcagaaatcatagggttctgatcacattgcacgcctcccccctcacttgtcctcctgatcctgacacattctgagtaacatcagcaggaatgctctgaccatgaggtgggggttttggggtgggcgttgcctgggttcttgggagagaggggaagagtcgggacttgaaaaccactagggcacatctggatgccttcccccagtatgtccttttctggattaaaatgagtgaaatttaaactgttcaa

SEQ ID NO: 108989 - DNA, 2892 bp, Homo sapiens
  Payload ID: 1412
  Gene Symbol: ARNT
  Gene Name: aryl hydrocarbon receptor nuclear translocator
  Uniprot ID: P27540
  ENST ID: ENST00000515192
  CDS Start-End: 225-2552
cttggattccgcggtagcggaggcggcggtcaggcgccgcttctggggagtggcctttcttttcccctccctcccggttcggtggcggcggctcctcccactgggggggggggtggcgcggcggcggtggcatctgcggccatggcggcgactactgccaaccccgcctgatcttggactcaagattctcctgcctcagaccccgagtagctgggactacagaaatgacatcagatgtaccatcactgggtccagccattgcctctggaaactctggacctggaattcaaggtggaggagccattgtccagagggctattaagcggcgaccagggctggattttgatgatgatggagaagggaacagtaaatttttgaggtgtgatgatgatcagatgtctaacgataaggagcggtttgccaggtcggatgatgagcagagctctgcggataaagagagacttgccagggaaaatcacagtgaaattgaacggcggcgacggaacaagatgacagcctacatcacagaactgtcagatatggtacccacctgtagtgccctggctcgaaaaccagacaagctaaccatcttacgcatggcagtttctcacatgaagtccttgcggggaactggcaacacatccactgatggctcctataagccgtctttcctcactgatcaggaactgaaacatttgatcttggaggcagcagatggctttctgtttattgtctcatgtgagacaggcagggtggtgtatgtgtctgactccgtgactcctgttttgaaccagccacagtctgaatggtttggcagcacactctatgatcaggtgcacccagatgatgtggataaacttcgtgagcagctttccacttcagaaaatgccctgacagggcgtatcctggatctaaagactggaacagtgaaaaaggaaggtcagcagtcttccatgagaatgtgtatgggctcaaggagatcgtttatttgccgaatgaggtgtggcagtagctctgtggacccagtttctgtgaataggctgagctttgtgaggaacagatgcaggaatggacttggctctgtaaaggatggggaacctcacttcgtggtggtccactgcacaggctacatcaaggcctggcccccagcagatgatgacccagaggctggccagggaagcaagttttgcctagtggccattggcagattgcaggtaactagttctcccaactgtacagacatgagtaatgtttgtcaaccaacagagttcatctcccgacacaacattgagggtatcttcacttttgtggatcaccgctgtgtggctactgttggctaccagccacaggaactcttaggaaagaatattgtagaattctgtcatcctgaagaccagcagcttctaagagacagcttccaacaggtagtgaaattaaaaggccaagtgctgtctgtcatgttccggttccggtctaagaaccaagaatggctctggatgagaaccagctcctttactttccagaacccttactcagatgaaattgagtacatcatctgtaccaacaccaatgtgaagaactctagccaagaaccacggcctacactctccaacacaatccagaggccacaactaggtcccacagctaatttacccctggagatgggctcaggacagctggcacccaggcagcagcaacagcaaacagaattggacatggtaccaggaagagatggactggccagctacaatcattcccaggtggttcagcctgtgacaaccacaggaccagaacacagcaagccccttgagaagtcagatggtttatttgcccaggatagagatccaagattttcagaaatctatcacaacatcaatgcggatcagagtaaaggcatctcctccagcactgtccctgccacccaacagctattctcccagggcaacacattccctcctaccccccggccggcagagaatttcaggaatagtggcctagcccctcctgtaaccattgtccagccatcagcttctgcaggacagatgttggcccagatttcccgccactccaaccccacccaaggagcaaccccaacttggacccctactacccgctcaggcttttctgcccagcaggtggctacccaggctactgctaagactcgtacttcccagtttggtgtgggcagctttcagactccatcctccttcagctccatgtccctccctggtgccccaactgcatcgcctggtgctgctgcctaccctagtctcaccaatcgtggatctaactttgctcctgagactggacagactgcaggacaattccagacacggacagcagagggtgtgggtgtctggccacagtggcagggccagcagcctcatcatcgttcaagttctagtgagcaacatgttcaacaaccgccagcacagcaacctggccagcctgaggtcttccaggagatgctgtccatgctgggagatcagagcaacagctacaacaatgaagaattccctgatctaactatgtttccccccttttcagaatagaactattggggtgaggataaggggtgggggagaaaaaatcactgtttgtttttaaaaagcaaatctttctgtaaacagaataaaagttcctctcccttcccttccctcacccctgacatgtaccccctttcccttctggctgttcccctgctctgttgcctctctaaggtaacatttatagaagaaatggaatgaatctccaaggcttttaggactgtctgaaaatttgaggctgggtgaagttaaaacacctttccttatgtctcctgacctgaaattgtatagtgttgatttgtgctgagatcaagaggcaggttagaagaacctgacatccactgtt

SEQ ID NO: 108990 - DNA, 571 bp, Homo sapiens
  Payload ID: 1412
  Gene Symbol: ARNT
  Gene Name: aryl hydrocarbon receptor nuclear translocator
  ENST ID: ENST00000504358
  CDS Start-End: 130-297
ggtagcggaggcggcggtcaggcgccgcttctggggagtggcctttcttttcccctccctcccggttcggtggcggcggctcctcccactgggggggggggtggcgcggcggcggtggcatctgcggccatggcggcgactactgccaaccccgaaatgacatcagatgtaccatcactgggtccagccattgcctctggaaactctggacctggaattcaaggtggaggagccattgtccagagggctattaagcggcgaccaggatggagtcttgcagttgtcgcccaggcttgagtgcaatggtgcgatcttggctcactgaaacctccacctcccgggttccagcaattctcctgcctcagcctcctgagtagctgagattacaggctggattttgatgatgatggagaagggaacagtaaatttttgaggtgtgatgatgatcagatgtctaacgataaggagcggtttgccaggtcggatgatgagcagagctctgcggataaagagagacttgccagggaaaatcacagtgaaattgaacggcggcgacggaacaagatgacag

SEQ ID NO: 108991 - DNA, 3703 bp, Homo sapiens
  Payload ID: 1412
  Gene Symbol: ARNT
  Gene Name: aryl hydrocarbon receptor nuclear translocator
  ENST ID: ENST00000471844
  CDS Start-End: 139-1389
ggattccgcggtagcggaggcggcggtcaggcgccgcttctggggagtggcctttcttttcccctccctcccggttcggtggcggcggctcctcccactgggggggggggtggcgcggcggcggtggcatctgcggccatggcggcgactactgccaaccccgaaatgacatcagatgtaccatcactgggtccagccattgcctctggaaactctggacctggaattcaaggtggaggagccattgtccagagggctattaagcggcgaccagggctggattttgatgatgatggagaagggaacagtaaatttttgaggtgtgatgatgatcagatgtctaacgataaggagcggtttgccaggtcggatgatgagcagagctctgcggataaagagagacttgccagggaaaatcacagtgaaattgaacggcggcgacggaacaagatgacagcctacatcacagaactgtcagatatggtacccacctgtagtgccctggctcgaaaaccagacaagctaaccatcttacgcatggcagtttctcacatgaagtccttgcggggaactggcaacacatccactgatggctcctataagccgtctttcctcactgatcaggaactgaaacatttgatcttggaggcagcagatggctttctgtttattgtctcatgtgagacaggcagggtggtgtatgtgtctgactccgtgactcctgttttgaaccagccacagtctgaatggtttggcagcacactctatgatcaggtgcacccagatgatgtggataaacttcgtgagcagctttccacttcagaaaatgccctgacagggcgtatcctggatctaaagactggaacagtgaaaaaggaaggtcagcagtcttccatgagaatgtgtatgggctcaaggagatcgtttatttgccgaatgaggtgtggcagtagctctgtggacccagtttctgtgaataggctgagctttgtgaggaacagatgcaggaatggacttggctctgtaaaggatggggaacctcacttcgtggtggtccactgcacaggctacatcaaggcctggcccccagcaggtgtttccctcccagatgatgacccagaggctggccagggaagcaagttttgcctagtggccattggcagattgcaggtaactagttctcccaactgtacagacatgagtaatgtttgtcaaccaacagagttcatctcccgacacaacattgagggtatcttcacttttgtggatcaccgctgtgtggctactgttggctaccagccacaggaactcttaggaaagaatattgtagaattctgtcatcctgaagaccagcagcttctaagagacagcttccaacaggaactctagccaagaaccacggcctacactctccaacacaatccagaggccacaactaggtcccacagctaatttacccctggagatgggctcaggacagctgcctaccctagtctcaccaatcgtggatctaactttgctcctgagactggacagactgcaggacaattccagacacggacagcagagggtgtgggtgtctggccacagtggcagggccagcagcctcatcatcgttcaagttctagtgagcaacatgttcaacaaccgccagcacagcaacctggccagcctgaggtcttccaggagatgctgtccatgctgggagatcagagcaacagctacaacaatgaagaattccctgatctaactatgtttccccccttttcagaatagaactattggggtgaggataaggggtgggggagaaaaaatcactgtttgtttttaaaaagcaaatctttctgtaaacagaataaaagttcctctcccttcccttccctcacccctgacatgtaccccctttcccttctggctgttcccctgctctgttgcctctctaaggtaacatttatagaagaaatggaatgaatctccaaggcttttaggactgtctgaaaatttgaggctgggtgaagttaaaacacctttccttatgtctcctgacctgaaattgtatagtgttgatttgtgctgagatcaagaggcaggttagaagaacctgacatccactgtttgccttggatagtatggcttgtttttggaaagaaattctgaagagagtggaggagaggagaaatgtcctcatatttgaggaccatgaaacattgtaggtatatatggggctttagcaagtttgagcataggctctttttgctgcctgtgagcagtccctctggaaagaaacatgtgagtaagtgagagagagtgtgtgtgtatgtgtgtgtgtgtgtgtgtgcgcacacatgcttctgtatttcactctttctccctattagggagttatgcaaaatttgtccccgattttacctttgtctttctgtgtacttttcaaagagtcctaaggagttaaatcttccaggtattttccacttagtattgcagccaaagaatatttaaataaacgtctttgctgcgcttgcatccatgcccagccaatatacaactgtaaagcaaatatagaaagtcggctgttgatacgattgtctgttatcgaacacattcagtgataaagctgggttactgctgcttttggtgctctcaccttatctggaagatctgcaaacattacctaaataggctggcaagataaacactttctggaacccgagacttggccataaagataatgctgcatttttctgtcagaatcacatatgatgtgtgttctgtagaggttatttctgcatggaaactcaacttcttggattagccgtcccagtgaaaatcctcattgttggagtgtaaaccaaatacgaagccctcttgcaaagtagcctctttcatcccatactcaaaatacccagtttagcaagcaactgagatttaagtctctctggccctaagaggtttttcctctttgctccctccaatcttgagattgggttttgctttagagtgcaagtatcataattccgtatgatagatggggcctggacacccatctcaacagggtcacttggtaattaacaatagccatataaatgcggatacaggttactaccctcaccctttaccttcctcaggtaacagtcgtagataccagcttttttttttttttttttaaattggctttggccagtagctaaagtgcaagactgaattaatgagaagatatattaaatgtagtcataggggactgaggagcaagggtggccttgaagaggccaaaggaatgtccatttgctgagtttcccttccttatgtctccagtctggtgccaggtagtggagtaaaaaaggagacagtttatttttttattctatgtgcacacttacagtatacatatatatttatatcacaatttacgaaaccaaaaagttgagtttccaatggaacccttgttttttaataatcgactttttaaatgtgatcaggactataatattgtacagttattatagggcttttggggaaggggaggatagcgagaagatgctctgggggttttgtttttgcttttccttcagggttttatttttgactgttttgttttcttgttggccatttctgtattgctggcatctgtgctaagctttacagtggcaaaaataatgacatgtagcaaagattttcaaacaaaatattttttccttttgtaaaa

SEQ ID NO: 108992 - DNA, 2427 bp, Homo sapiens
  Payload ID: 1412
  Gene Symbol: ARNT
  Gene Name: aryl hydrocarbon receptor nuclear translocator
  Uniprot ID: P27540
  ENST ID: ENST00000505755
  CDS Start-End: 43-2367
actgggggggggggtggcgcggcggcggtggcatctgcggccatggcggcgactactgccaaccccgaaatgacatcagatgtaccatcactgggtccagccattgcctctggaaactctggacctggaattcaaggtggaggagccattgtccagagggctattaagcggcgaccagggctggattttgatgatgatggagaagggaacagtaaatttttgaggtgtgatgatgatcagatgtctaacgataaggagcggtttgccagggaaaatcacagtgaaattgaacggcggcgacggaacaagatgacagcctacatcacagaactgtcagatatggtacccacctgtagtgccctggctcgaaaaccagacaagctaaccatcttacgcatggcagtttctcacatgaagtccttgcggggaactggcaacacatccactgatggctcctataagccgtctttcctcactgatcaggaactgaaacatttgatcttggaggcagcagatggctttctgtttattgtctcatgtgagacaggcagggtggtgtatgtgtctgactccgtgactcctgttttgaaccagccacagtctgaatggtttggcagcacactctatgatcaggtgcacccagatgatgtggataaacttcgtgagcagctttccacttcagaaaatgccctgacagggcgtatcctggatctaaagactggaacagtgaaaaaggaaggtcagcagtcttccatgagaatgtgtatgggctcaaggagatcgtttatttgccgaatgaggtgtggcagtagctctgtggacccagtttctgtgaataggctgagctttgtgaggaacagatgcaggaatggacttggctctgtaaaggatggggaacctcacttcgtggtggtccactgcacaggctacatcaaggcctggcccccagcaggtgtttccctcccagatgatgacccagaggctggccagggaagcaagttttgcctagtggccattggcagattgcaggtaactagttctcccaactgtacagacatgagtaatgtttgtcaaccaacagagttcatctcccgacacaacattgagggtatcttcacttttgtggatcaccgctgtgtggctactgttggctaccagccacaggaactcttaggaaagaatattgtagaattctgtcatcctgaagaccagcagcttctaagagacagcttccaacaggtagtgaaattaaaaggccaagtgctgtctgtcatgttccggttccggtctaagaaccaagaatggctctggatgagaaccagctcctttactttccagaacccttactcagatgaaattgagtacatcatctgtaccaacaccaatgtgaagaactctagccaagaaccacggcctacactctccaacacaatccagaggccacaactaggtcccacagctaatttacccctggagatgggctcaggacagctggcacccaggcagcagcaacagcaaacagaattggacatggtaccaggaagagatggactggccagctacaatcattcccaggtggttcagcctgtgacaaccacaggaccagaacacagcaagccccttgagaagtcagatggtttatttgcccaggatagagatccaagattttcagaaatctatcacaacatcaatgcggatcagagtaaaggcatctcctccagcactgtccctgccacccaacagctattctcccagggcaacacattccctcctaccccccggccggcagagaatttcaggaatagtggcctagcccctcctgtaaccattgtccagccatcagcttctgcaggacagatgttggcccagatttcccgccactccaaccccacccaaggagcaaccccaacttggacccctactacccgctcaggcttttctgcccagcaggtggctacccaggctactgctaagactcgtacttcccagtttggtgtgggcagctttcagactccatcctccttcagctccatgtccctccctggtgccccaactgcatcgcctggtgctgctgcctaccctagtctcaccaatcgtggatctaactttgctcctgagactggacagactgcaggacaattccagacacggacagcagagggtgtgggtgtctggccacagtggcagggccagcagcctcatcatcgttcaagttctagtgagcaacatgttcaacaaccgccagcacagcaacctggccagcctgaggtcttccaggagatgctgtccatgctgggagatcagagcaacagctacaacaatgaagaattccctgatctaactatgtttccccccttttcagaatagaactattggggtgaggataaggggtgggggagaaaaaatcactgtttgtttttaaaaagc

SEQ ID NO: 108993 - DNA, 2776 bp, Homo sapiens
  Payload ID: 1413
  Gene Symbol: ARNTL
  Gene Name: aryl hydrocarbon receptor nuclear translocator-like
  Uniprot ID: O00327
  ENST ID: ENST00000389707
  CDS Start-End: 389-2266
gacatttagggaaggcagaaagtaggtcagggacggaggtgcctgtttacccgcgccggactcaccgccgccgccgccgcgggatccgagtgcgggcgcgggcgcgggcgctcccggcgagccacggtggtgctggctagagtgtatacgtttggacccaagcttaacttttccaatgtggaatcctgggccttcattggttccgatgtcataggaatctacgctagagggcttcctgtgtgccgggcactgtggtttttggaagaagctgaccgcctgaaaagaaattataaaacatgaaaatcgctttgaggtgaccaagtccagaggcccctaactcctcccaagctggatctggggtgtaagaactgtgacttcagatcatccaatggcagaccagagaatggacatttcttcaaccatcagtgatttcatgtccccgggccccaccgacctgctttccagctctcttggtaccagtggtgtggattgcaaccgcaaacggaaaggcagctccactgactaccaagaaagcatggacacagacaaagatgaccctcatggaaggttagaatatacagaacaccaaggaaggataaaaaatgcaagggaagctcacagtcagattgaaaagcggcgtcgggataaaatgaacagttttatagatgaattggcttctttggtaccaacatgcaacgcaatgtccaggaaattagataaacttactgtgctaaggatggctgttcagcacatgaaaacattaagaggtgccaccaatccatacacagaagcaaactacaaaccaacttttctatcagacgatgaattgaaacacctcattctcagggcagcagatggatttttgtttgtcgtaggatgtgaccgagggaagatactctttgtctcagagtctgtcttcaagatcctcaactacagccagaatgatctgattggtcagagtttgtttgactacctgcatcctaaagatattgccaaagtcaaggagcagctctcctcctctgacaccgcaccccgggagcggctcatagatgcaaaaactggacttccagttaaaacagatataacccctgggccatctcgattatgttctggagcacgacgttctttcttctgtaggatgaagtgtaacaggccttcagtaaaggttgaagacaaggacttcccctctacctgctcaaagaaaaaagatcgaaaaagcttctgcacaatccacagcacaggctatttgaaaagctggccacccacaaagatggggctggatgaagacaacgaaccagacaatgaggggtgtaacctcagctgcctcgtcgcaattggacgactgcattctcatgtagttccacaaccagtgaacggggaaatcagggtgaaatctatggaatatgtttctcggcacgcgatagatggaaagtttgtttttgtagaccagagggcaacagctattttggcatatttaccacaagaacttctaggcacatcgtgttatgaatattttcaccaagatgacataggacatcttgcagaatgtcataggcaagttttacagacgagagaaaaaattacaactaattgctataaatttaaaatcaaagatggttcttttatcacactacggagtcgatggttcagtttcatgaacccttggaccaaggaagtagaatatattgtctcaactaacactgttgttttagccaacgtcctggaaggcggggacccaaccttcccacagctcacagcatccccccacagcatggacagcatgctgccctctggagaaggtggcccaaagaggacccaccccactgttccagggattccagggggaacccgggctggggcaggaaaaataggccgaatgattgctgaggaaatcatggaaatccacaggataagagggtcatcgccttctagctgtggctccagcccattgaacatcacgagtacgcctccccctgatgcctcttctccaggaggcaagaagattttaaatggagggactccagacattccttccagtggcctactatcaggccaggctcaggagaacccaggttatccatattctgatagttcttctattcttggtgagaacccccacataggtatagacatgattgacaacgaccaaggatcaagtagtcccagtaatgatgaggcagcaatggctgtcatcatgagcctcttggaagcagatgctggactgggtggccctgttgactttagtgacttgccatggccgctgtaaacactacatgttgctttggcaacagctatagtatcaaagtgcattactggtggagttttacagtctgtgaagcttactggataaggagagaatagcttttatgtactgacttcataaaagccatctcagagccattgatacaagtcaatcttactatatgtaacttcagacaaagtggaactaagcctgctccagtgtttcctcatcattgattattgggctagctgtggatagcttgcattaattgtatattttggattctgtttgtgttgaattttttaatcattgtgcacagaagcatcattggtagcttttatatgcaaatggtcatttcagatgtatggtgtttttacactacaaagaagtcccccatgtggatatttcttatactaattgtatcataaagccgtttattcttccttgtaagaatcctttactataaatatgggttaaagtataatgtactagacagttaaatatttttaataaatgtttcccttgttctataaa

SEQ ID NO: 108994 - DNA, 2746 bp, Homo sapiens
  Payload ID: 1413
  Gene Symbol: ARNTL
  Gene Name: aryl hydrocarbon receptor nuclear translocator-like
  Uniprot ID: O00327
  ENST ID: ENST00000403290
  CDS Start-End: 356-2236
cggaggtgcctgtttacccgcgccggactcaccgccgccgccgccgcgggatccgagtgcgggcgcgggcgcgggcgctcccggcgagccacggtggtgctggctagagtgtatacgtttggacccaagcttaacttttccaatgtggaatcctgggccttcattggttccgatgtcataggaatctacgctagagggcttcctgtgtgccgggcactgtggtttttggaagaagctgaccgcctgaaaagaaattataaaacatgaaaatcgctttgaggtgaccaagtccagaggcccctaactcctcccaagctggatctggggtgtaagaactgtgacttcagatcatccaatggcagaccagagaatggacatttcttcaaccatcagtgatttcatgtccccgggccccaccgacctgctttccagctctcttggtaccagtggtgtggattgcaaccgcaaacggaaaggcagctccactgactaccaagaaagcatggacacagacaaagatgaccctcatggaaggttagaatatacagaacaccaaggaaggataaaaaatgcaagggaagctcacagtcagattgaaaagcggcgtcgggataaaatgaacagttttatagatgaattggcttctttggtaccaacatgcaacgcaatgtccaggaaattagataaacttactgtgctaaggatggctgttcagcacatgaaaacattaagaggtgccaccaatccatacacagaagcaaactacaaaccaacttttctatcagacgatgaattgaaacacctcattctcagggcagcagatggatttttgtttgtcgtaggatgtgaccgagggaagatactctttgtctcagagtctgtcttcaagatcctcaactacagccagaatgatctgattggtcagagtttgtttgactacctgcatcctaaagatattgccaaagtcaaggagcagctctcctcctctgacaccgcaccccgggagcggctcatagatgcaaaaactggacttccagttaaaacagatataacccctgggccatctcgattatgttctggagcacgacgttctttcttctgtaggatgaagtgtaacaggccttcagtaaaggttgaagacaaggacttcccctctacctgctcaaagaaaaaagcagatcgaaaaagcttctgcacaatccacagcacaggctatttgaaaagctggccacccacaaagatggggctggatgaagacaacgaaccagacaatgaggggtgtaacctcagctgcctcgtcgcaattggacgactgcattctcatgtagttccacaaccagtgaacggggaaatcagggtgaaatctatggaatatgtttctcggcacgcgatagatggaaagtttgtttttgtagaccagagggcaacagctattttggcatatttaccacaagaacttctaggcacatcgtgttatgaatattttcaccaagatgacataggacatcttgcagaatgtcataggcaagttttacagacgagagaaaaaattacaactaattgctataaatttaaaatcaaagatggttcttttatcacactacggagtcgatggttcagtttcatgaacccttggaccaaggaagtagaatatattgtctcaactaacactgttgttttagccaacgtcctggaaggcggggacccaaccttcccacagctcacagcatccccccacagcatggacagcatgctgccctctggagaaggtggcccaaagaggacccaccccactgttccagggattccagggggaacccgggctggggcaggaaaaataggccgaatgattgctgaggaaatcatggaaatccacaggataagagggtcatcgccttctagctgtggctccagcccattgaacatcacgagtacgcctccccctgatgcctcttctccaggaggcaagaagattttaaatggagggactccagacattccttccagtggcctactatcaggccaggctcaggagaacccaggttatccatattctgatagttcttctattcttggtgagaacccccacataggtatagacatgattgacaacgaccaaggatcaagtagtcccagtaatgatgaggcagcaatggctgtcatcatgagcctcttggaagcagatgctggactgggtggccctgttgactttagtgacttgccatggccgctgtaaacactacatgttgctttggcaacagctatagtatcaaagtgcattactggtggagttttacagtctgtgaagcttactggataaggagagaatagcttttatgtactgacttcataaaagccatctcagagccattgatacaagtcaatcttactatatgtaacttcagacaaagtggaactaagcctgctccagtgtttcctcatcattgattattgggctagctgtggatagcttgcattaattgtatattttggattctgtttgtgttgaattttttaatcattgtgcacagaagcatcattggtagcttttatatgcaaatggtcatttcagatgtatggtgtttttacactacaaagaagtcccccatgtggatatttcttatactaattgtatcataaagccgtttattcttccttgtaagaatcctttactataaatatgggttaaagtataatgtactagacagttaaatatttttaataaatgtttcccttgttctataaa

SEQ ID NO: 108995 - DNA, 2745 bp, Homo sapiens
  Payload ID: 1413
  Gene Symbol: ARNTL
  Gene Name: aryl hydrocarbon receptor nuclear translocator-like
  Uniprot ID: O00327
  ENST ID: ENST00000403510
  CDS Start-End: 490-2238
gtttacccgcgccggactcaccgccgccgccgccgcgggatccgagtgcgggcgcgggcgcgggcgctcccggcgagccacggtggtgctggctagagtgtatacgtttggacccaagcttaacttttccaatgtggaatcctgggccttcattggtttttggaagaagctgaccgcctgaaaagaaattataaaacatgaaaatcgctttgaggtgaccaagtccagaggcccctaactcctcccaagctggatctggggtgtaagaactgtgacttcagatcatccaatggcagaccagagaatggacatttcttcaaccatcagtgatttcatgtccccgggccccaccgacctgctttccagctctcttggtaccagtggtgtggattgcaaccgcaaacggaaaggcagctccactgactaccattcacaggtcgaatttggggagcacaatggctggaggtcagatgcccactaggagatgctatgattaatatagaaagcatggacacagacaaagatgaccctcatggaaggttagaatatacagaacaccaaggaaggataaaaaatgcaagggaagctcacagtcagattgaaaagcggcgtcgggataaaatgaacagttttatagatgaattggcttctttggtaccaacatgcaacgcaatgtccaggaaattagataaacttactgtgctaaggatggctgttcagcacatgaaaacattaagaggtgccaccaatccatacacagaagcaaactacaaaccaacttttctatcagacgatgaattgaaacacctcattctcagggcagcagatggatttttgtttgtcgtaggatgtgaccgagggaagatactctttgtctcagagtctgtcttcaagatcctcaactacagccagaatgatctgattggtcagagtttgtttgactacctgcatcctaaagatattgccaaagtcaaggagcagctctcctcctctgacaccgcaccccgggagcggctcatagatgcaaaaactggacttccagttaaaacagatataacccctgggccatctcgattatgttctggagcacgacgttctttcttctgtaggatgaagtgtaacaggccttcagtaaaggttgaagacaaggacttcccctctacctgctcaaagaaaaaagatcgaaaaagcttctgcacaatccacagcacaggctatttgaaaagctggccacccacaaagatggggctggatgaagacaacgaaccagacaatgaggggtgtaacctcagctgcctcgtcgcaattggacgactgcattctcatgtagttccacaaccagtgaacggggaaatcagggtgaaatctatggaatatgtttctcggcacgcgatagatggaaagtttgtttttgtagaccagagggcaacagctattttggcatatttaccacaagaacttctaggcacatcgtgttatgaatattttcaccaagatgacataggacatcttgcagaatgtcataggcaagttttacagacgagagaaaaaattacaactaattgctataaatttaaaatcaaagatggttcttttatcacactacggagtcgatggttcagtttcatgaacccttggaccaaggaagtagaatatattgtctcaactaacactgttgttttagccaacgtcctggaaggcggggacccaaccttcccacagctcacagcatccccccacagcatggacagcatgctgccctctggagaaggtggcccaaagaggacccaccccactgttccagggattccagggggaacccgggctggggcaggaaaaataggccgaatgattgctgaggaaatcatggaaatccacaggataagagggtcatcgccttctagctgtggctccagcccattgaacatcacgagtacgcctccccctgatgcctcttctccaggaggcaagaagattttaaatggagggactccagacattccttccagtggcctactatcaggccaggctcaggagaacccaggttatccatattctgatagttcttctattcttggtgagaacccccacataggtatagacatgattgacaacgaccaaggatcaagtagtcccagtaatgatgaggcagcaatggctgtcatcatgagcctcttggaagcagatgctggactgggtggccctgttgactttagtgacttgccatggccgctgtaaacactacatgttgctttggcaacagctatagtatcaaagtgcattactggtggagttttacagtctgtgaagcttactggataaggagagaatagcttttatgtactgacttcataaaagccatctcagagccattgatacaagtcaatcttactatatgtaacttcagacaaagtggaactaagcctgctccagtgtttcctcatcattgattattgggctagctgtggatagcttgcattaattgtatattttggattctgtttgtgttgaattttttaatcattgtgcacagaagcatcattggtagcttttatatgcaaatggtcatttcagatgtatggtgtttttacactacaaagaagtcccccatgtggatatttcttatactaattgtatcataaagccgtttattcttccttgtaagaatcctttactataaatatgggttaaagtataatgtactagacagttaaatatttttaataaatgtttcccttgttctat

SEQ ID NO: 108996 - DNA, 2389 bp, Homo sapiens
  Payload ID: 1413
  Gene Symbol: ARNTL
  Gene Name: aryl hydrocarbon receptor nuclear translocator-like
  Uniprot ID: O00327
  ENST ID: ENST00000403482
  CDS Start-End: 5-1879
ggagatgagcaaggaggccgtgagcctgtgggcgctcactgtgtccctccaacccccagtccccttgtgtgtctgcagagagatgacaggatcaggcagaagaaaacagcaatgtgtaactttgccattcatctccagagaattatgtttttatcttttgctttttcctccccccaggttagaatatacagaacaccaaggaaggataaaaaatgcaagggaagctcacagtcagattgaaaagcggcgtcgggataaaatgaacagttttatagatgaattggcttctttggtaccaacatgcaacgcaatgtccaggaaattagataaacttactgtgctaaggatggctgttcagcacatgaaaacattaagaggtgccaccaatccatacacagaagcaaactacaaaccaacttttctatcagacgatgaattgaaacacctcattctcagggcagcagatggatttttgtttgtcgtaggatgtgaccgagggaagatactctttgtctcagagtctgtcttcaagatcctcaactacagccagaatgatctgattggtcagagtttgtttgactacctgcatcctaaagatattgccaaagtcaaggagcagctctcctcctctgacaccgcaccccgggagcggctcatagatgcaaaaactggacttccagttaaaacagatataacccctgggccatctcgattatgttctggagcacgacgttctttcttctgtaggatgaagtgtaacaggccttcagtaaaggttgaagacaaggacttcccctctacctgctcaaagaaaaaagcagatcgaaaaagcttctgcacaatccacagcacaggctatttgaaaagctggccacccacaaagatggggctggatgaagacaacgaaccagacaatgaggggtgtaacctcagctgcctcgtcgcaattggacgactgcattctcatgtagttccacaaccagtgaacggggaaatcagggtgaaatctatggaatatgtttctcggcacgcgatagatggaaagtttgtttttgtagaccagagggcaacagctattttggcatatttaccacaagaacttctaggcacatcgtgttatgaatattttcaccaagatgacataggacatcttgcagaatgtcataggcaagttttacagacgagagaaaaaattacaactaattgctataaatttaaaatcaaagatggttcttttatcacactacggagtcgatggttcagtttcatgaacccttggaccaaggaagtagaatatattgtctcaactaacactgttgttttagccaacgtcctggaaggcggggacccaaccttcccacagctcacagcatccccccacagcatggacagcatgctgccctctggagaaggtggcccaaagaggacccaccccactgttccagggattccagggggaacccgggctggggcaggaaaaataggccgaatgattgctgaggaaatcatggaaatccacaggataagagggtcatcgccttctagctgtggctccagcccattgaacatcacgagtacgcctccccctgatgcctcttctccaggaggcaagaagattttaaatggagggactccagacattccttccagtggcctactatcaggccaggctcaggagaacccaggttatccatattctgatagttcttctattcttggtgagaacccccacataggtatagacatgattgacaacgaccaaggatcaagtagtcccagtaatgatgaggcagcaatggctgtcatcatgagcctcttggaagcagatgctggactgggtggccctgttgactttagtgacttgccatggccgctgtaaacactacatgttgctttggcaacagctatagtatcaaagtgcattactggtggagttttacagtctgtgaagcttactggataaggagagaatagcttttatgtactgacttcataaaagccatctcagagccattgatacaagtcaatcttactatatgtaacttcagacaaagtggaactaagcctgctccagtgtttcctcatcattgattattgggctagctgtggatagcttgcattaattgtatattttggattctgtttgtgttgaattttttaatcattgtgcacagaagcatcattggtagcttttatatgcaaatggtcatttcagatgtatggtgtttttacactacaaagaagtcccccatgtggatatttcttatactaattgtatcataaagccgtttattcttccttgtaagaatcctttactataaatatgggttaaagtataatgtactagacagttaaatatttttaataaatgtttcccttgttctataaa

SEQ ID NO: 108997 - DNA, 2788 bp, Homo sapiens
  Payload ID: 1413
  Gene Symbol: ARNTL
  Gene Name: aryl hydrocarbon receptor nuclear translocator-like
  Uniprot ID: O00327
  ENST ID: ENST00000401424
  CDS Start-End: 527-2278
gacatttagggaaggcagaaagtaggtcagggacggaggtgcctgtttacccgcgccggactcaccgccgccgccgccgcgggatccgagtgcgggcgcgggcgcgggcgctcccggcgagccacggtggtgctggctagagtgtatacgtttggacccaagcttaacttttccaatgtggaatcctgggccttcattggtttttggaagaagctgaccgcctgaaaagaaattataaaacatgaaaatcgctttgaggtgaccaagtccagaggcccctaactcctcccaagctggatctggggtgtaagaactgtgacttcagatcatccaatggcagaccagagaatggacatttcttcaaccatcagtgatttcatgtccccgggccccaccgacctgctttccagctctcttggtaccagtggtgtggattgcaaccgcaaacggaaaggcagctccactgactaccagtcgaatttggggagcacaatggctggaggtcagatgcccactaggagatgctatgattaatatagaaagcatggacacagacaaagatgaccctcatggaaggttagaatatacagaacaccaaggaaggataaaaaatgcaagggaagctcacagtcagattgaaaagcggcgtcgggataaaatgaacagttttatagatgaattggcttctttggtaccaacatgcaacgcaatgtccaggaaattagataaacttactgtgctaaggatggctgttcagcacatgaaaacattaagaggtgccaccaatccatacacagaagcaaactacaaaccaacttttctatcagacgatgaattgaaacacctcattctcagggcagcagatggatttttgtttgtcgtaggatgtgaccgagggaagatactctttgtctcagagtctgtcttcaagatcctcaactacagccagaatgatctgattggtcagagtttgtttgactacctgcatcctaaagatattgccaaagtcaaggagcagctctcctcctctgacaccgcaccccgggagcggctcatagatgcaaaaactggacttccagttaaaacagatataacccctgggccatctcgattatgttctggagcacgacgttctttcttctgtaggatgaagtgtaacaggccttcagtaaaggttgaagacaaggacttcccctctacctgctcaaagaaaaaagcagatcgaaaaagcttctgcacaatccacagcacaggctatttgaaaagctggccacccacaaagatggggctggatgaagacaacgaaccagacaatgaggggtgtaacctcagctgcctcgtcgcaattggacgactgcattctcatgtagttccacaaccagtgaacggggaaatcagggtgaaatctatggaatatgtttctcggcacgcgatagatggaaagtttgtttttgtagaccagagggcaacagctattttggcatatttaccacaagaacttctaggcacatcgtgttatgaatattttcaccaagatgacataggacatcttgcagaatgtcataggcaagttttacagacgagagaaaaaattacaactaattgctataaatttaaaatcaaagatggttcttttatcacactacggagtcgatggttcagtttcatgaacccttggaccaaggaagtagaatatattgtctcaactaacactgttgttttagccaacgtcctggaaggcggggacccaaccttcccacagctcacagcatccccccacagcatggacagcatgctgccctctggagaaggtggcccaaagaggacccaccccactgttccagggattccagggggaacccgggctggggcaggaaaaataggccgaatgattgctgaggaaatcatggaaatccacaggataagagggtcatcgccttctagctgtggctccagcccattgaacatcacgagtacgcctccccctgatgcctcttctccaggaggcaagaagattttaaatggagggactccagacattccttccagtggcctactatcaggccaggctcaggagaacccaggttatccatattctgatagttcttctattcttggtgagaacccccacataggtatagacatgattgacaacgaccaaggatcaagtagtcccagtaatgatgaggcagcaatggctgtcatcatgagcctcttggaagcagatgctggactgggtggccctgttgactttagtgacttgccatggccgctgtaaacactacatgttgctttggcaacagctatagtatcaaagtgcattactggtggagttttacagtctgtgaagcttactggataaggagagaatagcttttatgtactgacttcataaaagccatctcagagccattgatacaagtcaatcttactatatgtaacttcagacaaagtggaactaagcctgctccagtgtttcctcatcattgattattgggctagctgtggatagcttgcattaattgtatattttggattctgtttgtgttgaattttttaatcattgtgcacagaagcatcattggtagcttttatatgcaaatggtcatttcagatgtatggtgtttttacactacaaagaagtcccccatgtggatatttcttatactaattgtatcataaagccgtttattcttccttgtaagaatcctttactataaatatgggttaaagtataatgtactagacagttaaatatttttaataaatgtttcccttgttctataaa

SEQ ID NO: 108998 - DNA, 567 bp, Homo sapiens
  Payload ID: 1413
  Gene Symbol: ARNTL
  Gene Name: aryl hydrocarbon receptor nuclear translocator-like
  ENST ID: ENST00000533520
  CDS Start-End: 266-567
ggtgcgacatttagggaaggcagaaagtaggtcagggacggaggtgcctgtttacccgcgccggactcaccgccgccgccgccgcgggatccgagtgcgggcgcgggcgcgggcgctcccggcgagccacggtttttggaagaagctgaccgcctgaaaagaaattataaaacatgaaaatcgctttgaggtgaccaagtccagaggcccctaactcctcccaagctggatctggggtgtaagaactgtgacttcagatcatccaatggcagaccagagaatggacatttcttcaaccatcagtgatttcatgtccccgggccccaccgacctgctttccagctctcttggtaccagtggtgtggattgcaaccgcaaacggaaaggcagctccactgactaccaagaaagcatggacacagacaaagatgaccctcatggaaggttagaatatacagaacaccaaggaaggataaaaaatgcaagggaagctcacagtcagattgaaaagcggcgtcgggataaaatgaacagttttatagatgaattggcttctttggtaccaac

SEQ ID NO: 108999 - DNA, 807 bp, Homo sapiens
  Payload ID: 1413
  Gene Symbol: ARNTL
  Gene Name: aryl hydrocarbon receptor nuclear translocator-like
  ENST ID: ENST00000534544
  CDS Start-End: 629-807
accctaccccagcaggcgctaaaggagagctgacatgatggataacgaaaaagaagacgctgtccttctattcagggagtttaacatctggaagagccgggagttctttgtgctaaaggccctctacaaagtgcctgagatgcaaaaataagtcactttctctgtcctctcagcaaccgagtcgcatgtcgttatcaaatttttattttctgtaactgtttccttccgtcttgctccgtagacagctttttgcagcagagagcgctgccgcggggctggtgtctactcttcagtaagtggtcaaaacctggctactggaaggaaatgcaatggaatcgctccgcgctcgagtattctctttggaactacgggaatgacagctccagtgggacacttggaggtcatgatgaacgcaaagaacgtggtgctggctagagtgtatacgtttggacccaagcttaacttttccaatgtggaatcctgggccttcattggtttttggaagaagctgaccgcctgaaaagaaattataaaacatgaaaatcgctttgaggtgaccaagtccagaggcccctaactcctcccaagctggatctggggtgtaagaactgtgacttcagatcatccaatggcagaccagagaatggacatttcttcaaccatcagtgatttcatgtccccgggccccaccgacctgctttccagctctcttggtaccagtggtgtggattgcaaccgcaaacggaaaggcagctccactgactaccaagaaagcatggacacagacaaagatgaccctcatggaag

SEQ ID NO: 109000 - DNA, 519 bp, Homo sapiens
  Payload ID: 1413
  Gene Symbol: ARNTL
  Gene Name: aryl hydrocarbon receptor nuclear translocator-like
  ENST ID: ENST00000527998
  CDS Start-End: 292-519
cgggcgttcggattggctggcgggaagaggtggtgctggctagagtgtatacgtttggacccaagcttaacttttccaatgtggaatcctgggccttcattggttccgatgtcataggaatctacgctagagggcttcctgtgtgccgggcactgtggtttttggaagaagctgaccgcctgaaaagaaattataaaacatgaaaatcgctttgaggtgaccaagtccagaggcccctaactcctcccaagctggatctggggtgtaagaactgtgacttcagatcatccaatggcagaccagagaatggacatttcttcaaccatcagtgatttcatgtccccgggccccaccgacctgctttccagctctcttggtaccagtggtgtggattgcaaccgcaaacggaaaggcagctccactgactaccaagaaagcatggacacagacaaagatgaccctcatggaaggttagaatatacagaacaccaaggaaggataaaaaatgcaagggaagct

SEQ ID NO: 109001 - DNA, 610 bp, Homo sapiens
  Payload ID: 1413
  Gene Symbol: ARNTL
  Gene Name: aryl hydrocarbon receptor nuclear translocator-like
  ENST ID: ENST00000529388
  CDS Start-End: 204-610
tttagggaaggcagaaagtaggtcagggacggaggtgcctgtttacccgcgccggactcaccgccgccgccgccgcgggatccgagtgcgggcgcgggcgcgggcgctcccggcgagccacggtggtgctggctagagtgtatacgtttggacccaagcttaacttttccaatgtggaatcctgggccttcattgatcatccaatggcagaccagagaatggacatttcttcaaccatcagtgatttcatgtccccgggccccaccgacctgctttccagctctcttggtaccagtggtgtggattgcaaccgcaaacggaaaggcagctccactgactaccaagaaagcatggacacagacaaagatgaccctcatggaaggttagaatatacagaacaccaaggaaggataaaaaatgcaagggaagctcacagtcagattgaaaagcggcgtcgggataaaatgaacagttttatagatgaattggcttctttggtaccaacatgcaacgcaatgtccaggaaattagataaacttactgtgctaaggatggctgttcagcacatgaaaacattaagaggtgccaccaatccatacacagaagcaaa

SEQ ID NO: 109002 - DNA, 571 bp, Homo sapiens
  Payload ID: 1413
  Gene Symbol: ARNTL
  Gene Name: aryl hydrocarbon receptor nuclear translocator-like
  ENST ID: ENST00000529050
  CDS Start-End: 503-571
accctaccccagcaggcgctaaaggagagctgacatgatggataacgaaaaagaagacgctgtccttctattcagggagtttaacatctggaagagccgggagttctttgtgctaaaggccctctacaaagtgcctgagatgcaaaaataagtcactttctctgtcctctcagcaaccgagtcgcatgtcgttatcaaatttttattttctgtaactgtttccttccgtcttgctccgtagacagctttttgcagcagagagcgctgccgcggggctggtgtctactcttcagtaagtggtcaaaacctggctactggaaggaaatgcaatggaatcgctccgcgctcgagtattctctttggaactacgggaatgacagctccagtgggacacttggaggtcatgatgaacgcaaagaacgtggtgctggctagagtgtatacgtttggacccaagcttaacttttccaatgtggaatcctgggccttcattgatcatccaatggcagaccagagaatggacatttcttcaaccatcagtgatttcatgtccccgggccccaccgacctg

SEQ ID NO: 109003 - DNA, 551 bp, Homo sapiens
  Payload ID: 1413
  Gene Symbol: ARNTL
  Gene Name: aryl hydrocarbon receptor nuclear translocator-like
  ENST ID: ENST00000529825
  CDS Start-End: 412-551
gtgcgacatttagggaaggcagaaagtaggtcagggacggaggtgcctgtttacccgcgccggactcaccgccgccgccgccgcgggatccgagtgcgggcgcgggcgcgggcgctcccggcgagccacggtggtgctggctagagtgtatacgtttggacccaagcttaacttttccaatgtggaatcctgggccttcattgatcatccaatggcagaccagagaatggacatttcttcaaccatcagtgatttcatgtccccgggccccaccgacctgctttccagctctcttggtaccagtggtgtggattgcaaccgcaaacggaaaggcagctccactgactaccattcacaggtcgaatttggggagcacaatggctggaggtcagatgcccactaggagatgctatgattaatatagaaagcatggacacagacaaagatgaccctcatggaaggttagaatatacagaacaccaaggaaggataaaaaatgcaagggaagctcacagtcagattgaaaagcggcgtcgggataaaatgaacag

SEQ ID NO: 109004 - DNA, 390 bp, Homo sapiens
  Payload ID: 1413
  Gene Symbol: ARNTL
  Gene Name: aryl hydrocarbon receptor nuclear translocator-like
  ENST ID: ENST00000531665
  CDS Start-End: 209-390
ggtggtgctggctagagtgtatacgtttggacccaagcttaacttttccaatgtggaatcctgggccttcattggtttttggaagaagctgaccgcctgaaaagaaattataaaacatgaaaatcgctttgaggtgaccaagtccagaggcccctaactcctcccaagctggatctggggtgtaagaactgtgacttcagatcatccaatggcagaccagagaatggacatttcttcaaccatcagtgatttcatgtccccgggccccaccgacctgctttccagctctcttggtaccagtggtgtggattgcaaccgcaaacggaaaggcagctccactgactaccagttagaatatacagaacaccaaggaaggataaaaaatgcaag

SEQ ID NO: 109005 - DNA, 868 bp, Homo sapiens
  Payload ID: 1413
  Gene Symbol: ARNTL
  Gene Name: aryl hydrocarbon receptor nuclear translocator-like
  ENST ID: ENST00000530357
  CDS Start-End: 446-868
gaaagtaggtcagggacggaggtgcctgtttacccgcgccggactcaccgccgccgccgccgcgggatccgagtgcgggcgcgggcgcgggcgctcccggcgagccacggtggtgctggctagagtgtatacgtttggacccaagcttaacttttccaatgtggaatcctgggccttcattggttccgatgtcataggaatctacgctagagggcttcctgtgtgccgggcactgtgatcatccaatggcagaccagagaatggacatttcttcaaccatcagtgatttcatgtccccgggccccaccgacctgctttccagctctcttggtaccagtggtgtggattgcaaccgcaaacggaaaggcagctccactgactaccattcacaggtcgaatttggggagcacaatggctggaggtcagatgcccactaggagatgctatgattaatatagaaagcatggacacagacaaagatgaccctcatggaaggttagaatatacagaacaccaaggaaggataaaaaatgcaagggaagctcacagtcagattgaaaagcggcgtcgggataaaatgaacagttttatagatgaattggcttctttggtaccaacatgcaacgcaatgtccaggaaattagataaacttactgtgctaaggatggctgttcagcacatgaaaacattaagaggtgccaccaatccatacacagaagcaaactacaaaccaacttttctatcagacgatgaattgaaacacctcattctcagggcagcagatggatttttgtttgtcgtaggatgtgaccgagggaagatactctttgtctcagagtctgtcttcaagatcctcaactacagccag

SEQ ID NO: 109006 - DNA, 1421 bp, Homo sapiens
  Payload ID: 1413
  Gene Symbol: ARNTL
  Gene Name: aryl hydrocarbon receptor nuclear translocator-like
  ENST ID: ENST00000524392
  CDS Start-End: 1-516
agggcaacagctattttggcatatttaccacaagaacttctaggcacatcgtgttatgaatattttcaccaagatgacataggacatcttgcagaatgtcataggcaagttttacagacgagagaaaaaattacaactaattgctataaatttaaaatcaaagatggttcttttatcacactacggagtcgatggttcagtttcatgaacccttggaccaaggaagtagaatatattgtctcaactaacactgttgttttgtccagagtggacaccggacaccttggccaagttgaatggtgcacagttctgagcaggcctgactcacgtttccttattgctgggatgttcacagagccaacgtcctggaaggcggggacccaaccttcccacagctcacagcatccccccacagcatggacagcatgctgccctctggagaaggtggcccaaagaggacccaccccactgttccagggattccagggggaacccgggctggggcaggaaaaataggccgaatgattgctgaggaaatcatggaaatccacaggataagagggtcatcgccttctagctgtggctccagcccattgaacatcacgagtacgcctccccctgatgcctcttctccaggaggcaagaagattttaaatggagggactccagacattccttccagtggcctactatcaggccaggctcaggagaacccaggttatccatattctgatagttcttctattcttggtgagaacccccacataggtatagacatgattgacaacgaccaaggatcaagtagtcccagtaatgatgaggcagcaatggctgtcatcatgagcctcttggaagcagatgctggactgggtggccctgttgactttagtgacttgccatggccgctgtaaacactacatgttgctttggcaacagctatagtatcaaagtgcattactggtggagttttacagtctgtgaagcttactggataaggagagaatagcttttatgtactgacttcataaaagccatctcagagccattgatacaagtcaatcttactatatgtaacttcagacaaagtggaactaagcctgctccagtgtttcctcatcattgattattgggctagctgtggatagcttgcattaattgtatattttggattctgtttgtgttgaattttttaatcattgtgcacagaagcatcattggtagcttttatatgcaaatggtcatttcagatgtatggtgtttttacactacaaagaagtcccccatgtggatatttcttatactaattgtatcataaagccgtttattcttccttgtaagaatcctttactataaatatgggttaaagtataatgtactagacagttaaatatttttaataaatgtttcccttgttctataaa

SEQ ID NO: 109007 - DNA, 739 bp, Homo sapiens
  Payload ID: 1413
  Gene Symbol: ARNTL
  Gene Name: aryl hydrocarbon receptor nuclear translocator-like
  ENST ID: ENST00000482049
  CDS Start-End: 523-739
gagtgcgggcgcgggcgcgggcgctcccggcgagccacggtggtgctggctagagtgtatacgtttggacccaagcttaacttttccaatgtggaatcctgggccttcattggttccgatgtcataggaatctacgctagagggcttcctgtgtgccgggcactgtggtttttggaagaagctgaccgcctgaaaagaaattataaaacatgaaaatcgctttgaggtgaccaagtccagaggcccctaactcctcccaagctggatctggggtgtaagaactgtgacttcagatcatccaatggcagaccagagaatggacatttcttcaaccatcagtgatttcatgtccccgggccccaccgacctgctttccagctctcttggtaccagtggtgtggattgcaaccgcaaacggaaaggcagctccactgactaccaacttgttgacttttcgtttgattcacaggtcgaatttggggagcacaatggctggaggtcagatgcccactaggagatgctatgattaatatagaaagcatggacacagacaaagatgaccctcatggaaggttagaatatacagaacaccaaggaaggataaaaaatgcaagggaagctcacagtcagattgaaaagcggcgtcgggataaaatgaacagttttatagatgaattggcttctttggtaccaacatgcaacgcaatgtccaggaaattagataaacttactgtgctaa

SEQ ID NO: 109008 - DNA, 1843 bp, Homo sapiens
  Payload ID: 1414
  Gene Symbol: ARNTL2
  Gene Name: aryl hydrocarbon receptor nuclear translocator-like 2
  Uniprot ID: Q8WYA1
  ENST ID: ENST00000261178
  CDS Start-End: 19-1785
gaccaagtggctcctgcgatggcggcggaagaggaggctgcggcgggaggtaaagtgttgagagaggagaaccagtgcattgctcctgtggtttccagccgcgtgagtccagggacaagaccaacagctatggggtctttcagctcacacatgacagagtttccacgaaaacgcaaaggaagtgattcagacccatcccaagaagctcatagccaaactgaaaagcggaggagagataaaatgaataacctgattgaagaactgtctgcaatgatccctcagtgcaaccccatggcgcgtaaactggacaaacttacagttttaagaatggctgttcaacacttgagatctttaaaaggcttgacaaattcttatgtgggaagtaattatagaccatcatttcttcaggataatgagctcagacatttaatccttaagactgcagaaggcttcttatttgtggttggatgtgaaagaggaaaaattctcttcgtttctaagtcagtctccaaaatacttaattatgatcaggctagtttgactggacaaagcttatttgacttcttacatccaaaagatgttgccaaagtaaaggaacaactttcttcttttgatatttcaccaagagaaaagctaatagatgccaaaactggtttgcaagttcacagtaatctccacgctggaaggacacgtgtgtattctggctcaagacgatcttttttctgtcggataaagagttgtaaaatctctgtcaaagaagagcatggatgcttacccaactcaaagaagaaagagcacagaaaattctatactatccattgcactggttacttgagaagctggcctccaaatattgttggaatggaagaagaaaggaacagtaagaaagacaacagtaattttacctgccttgtggccattggaagattacagccatatattgttccacagaacagtggagagattaatgtgaaaccaactgaatttataacccggtttgcagtgaatggaaaatttgtctatgtagatcaaagggcaacagcgattttaggatatctgcctcaggaacttttgggaacttcttgttatgaatattttcatcaagatgaccacaataatttgactgacaagcacaaagcagttctacagagtaaggagaaaatacttacagattcctacaaattcagagcaaaagatggctcttttgtaactttaaaaagccaatggtttagtttcacaaatccttggacaaaagaactggaatatattgtatctgtcaacactttagttttgggacatagtgagcctggagaagcatcatttttaccttgtagctctcaatcatcagaagaatcctctagacagtcctgtatgagtgtacctggaatgtctactggaacagtacttggtgctggtagtattggaacagatattgcaaatgaaattctggatttacagaggttacagtcttcttcataccttgatgattcgagtccaacaggtttaatgaaagatactcatactgtaaactgcaggagtatgtcaaataaggagttgtttccaccaagtccttctgaaatgggggagctagaggctaccaggcaaaaccagagtactgttgctgtccacagccatgagccactcctcagtgatggtgcacagttggatttcgatgccctatgtgacaatgatgacacagccatggctgcatttatgaattacttagaagcagaggggggcctgggagaccctggggacttcagtgacatccagtggaccctctagcctttgatttttaactccaaaaatgagaaacattttaaagcatttcatttacgaaaaa

SEQ ID NO: 109009 - DNA, 2291 bp, Homo sapiens
  Payload ID: 1414
  Gene Symbol: ARNTL2
  Gene Name: aryl hydrocarbon receptor nuclear translocator-like 2
  Uniprot ID: Q8WYA1
  ENST ID: ENST00000266503
  CDS Start-End: 19-1929
gaccaagtggctcctgcgatggcggcggaagaggaggctgcggcgggaggtaaagtgttgagagaggagaaccagtgcattgctcctgtggtttccagccgcgtgagtccagggacaagaccaacagctatggggtctttcagctcacacatgacagagtttccacgaaaacgcaaaggaagtgattcagacccatcccagtcaggaatcatgacagaaaaagtggtggaaaagctttctcagaatccccttacctatcttctttcaacaaggatagaaatatcagcctccagtggcagcagagtggaagatggtgaacaccaagttaaaatgaaggccttcagagaagctcatagccaaactgaaaagcggaggagagataaaatgaataacctgattgaagaactgtctgcaatgatccctcagtgcaaccccatggcgcgtaaactggacaaacttacagttttaagaatggctgttcaacacttgagatctttaaaaggcttgacaaattcttatgtgggaagtaattatagaccatcatttcttcaggataatgagctcagacatttaatccttaagactgcagaaggcttcttatttgtggttggatgtgaaagaggaaaaattctcttcgtttctaagtcagtctccaaaatacttaattatgatcaggctagtttgactggacaaagcttatttgacttcttacatccaaaagatgttgccaaagtaaaggaacaactttcttcttttgatatttcaccaagagaaaagctaatagatgccaaaactggtttgcaagttcacagtaatctccacgctggaaggacacgtgtgtattctggctcaagacgatcttttttctgtcggataaagagttgtaaaatctctgtcaaagaagagcatggatgcttacccaactcaaagaagaaagagcacagaaaattctatactatccattgcactggttacttgagaagctggcctccaaatattgttggaatggaagaagaaaggaacagtaagaaagacaacagtaattttacctgccttgtggccattggaagattacagccatatattgttccacagaacagtggagagattaatgtgaaaccaactgaatttataacccggtttgcagtgaatggaaaatttgtctatgtagatcaaagggcaacagcgattttaggatatctgcctcaggaacttttgggaacttcttgttatgaatattttcatcaagatgaccacaataatttgactgacaagcacaaagcagttctacagagtaaggagaaaatacttacagattcctacaaattcagagcaaaagatggctcttttgtaactttaaaaagccaatggtttagtttcacaaatccttggacaaaagaactggaatatattgtatctgtcaacactttagttttgggacatagtgagcctggagaagcatcatttttaccttgtagctctcaatcatcagaagaatcctctagacagtcctgtatgagtgtacctggaatgtctactggaacagtacttggtgctggtagtattggaacagatattgcaaatgaaattctggatttacagaggttacagtcttcttcataccttgatgattcgagtccaacaggtttaatgaaagatactcatactgtaaactgcaggagtatgtcaaataaggagttgtttccaccaagtccttctgaaatgggggagctagaggctaccaggcaaaaccagagtactgttgctgtccacagccatgagccactcctcagtgatggtgcacagttggatttcgatgccctatgtgacaatgatgacacagccatggctgcatttatgaattacttagaagcagaggggggcctgggagaccctggggacttcagtgacatccagtggaccctctagcctttgatttttaactccaaaaatgagaaacattttaaagcatttcatttacgaaaaactgtctcaactattcttaagtactgtattgatattgtttgtatcttttattaatgttctaccactttttatagatttgcatcttcctgtcacagggatgtggggaaatacgttttcctcccaagagaaccaagtttattatagactcctttattcagtgaaatggcttataatccactagttgccatatttttgctaaaatatttctaaccaagaatactacttacatattgttttggctttgttttatttttgatgcagttttttttagttgaggtaatgtaatatattgatgttttcctttg

SEQ ID NO: 109010 - DNA, 1888 bp, Homo sapiens
  Payload ID: 1414
  Gene Symbol: ARNTL2
  Gene Name: aryl hydrocarbon receptor nuclear translocator-like 2
  Uniprot ID: Q8WYA1
  ENST ID: ENST00000311001
  CDS Start-End: 19-1887
gaccaagtggctcctgcgatggcggcggaagaggaggctgcggcgggaggtaaagtgttgagagaggagaaccagtgcattgctcctgtggtttccagccgcgtgagtccagggacaagaccaacagctatggggtctttcagctcacacatgacagagtttccacgaaaacgcaaaggaagtgattcagacccatcccagtcaggaatcatgacagaaaaagtggtggaaaagctttctcagaatccccttacctatcttctttcaacaaggatagaaatatcagcctccagtggcagcagagaagctcatagccaaactgaaaagcggaggagagataaaatgaataacctgattgaagaactgtctgcaatgatccctcagtgcaaccccatggcgcgtaaactggacaaacttacagttttaagaatggctgttcaacacttgagatctttaaaaggcttgacaaattcttatgtgggaagtaattatagaccatcatttcttcaggataatgagctcagacatttaatccttaagactgcagaaggcttcttatttgtggttggatgtgaaagaggaaaaattctcttcgtttctaagtcagtctccaaaatacttaattatgatcaggctagtttgactggacaaagcttatttgacttcttacatccaaaagatgttgccaaagtaaaggaacaactttcttcttttgatatttcaccaagagaaaagctaatagatgccaaaactggtttgcaagttcacagtaatctccacgctggaaggacacgtgtgtattctggctcaagacgatcttttttctgtcggataaagagttgtaaaatctctgtcaaagaagagcatggatgcttacccaactcaaagaagaaagagcacagaaaattctatactatccattgcactggttacttgagaagctggcctccaaatattgttggaatggaagaagaaaggaacagtaagaaagacaacagtaattttacctgccttgtggccattggaagattacagccatatattgttccacagaacagtggagagattaatgtgaaaccaactgaatttataacccggtttgcagtgaatggaaaatttgtctatgtagatcaaagggcaacagcgattttaggatatctgcctcaggaacttttgggaacttcttgttatgaatattttcatcaagatgaccacaataatttgactgacaagcacaaagcagttctacagagtaaggagaaaatacttacagattcctacaaattcagagcaaaagatggctcttttgtaactttaaaaagccaatggtttagtttcacaaatccttggacaaaagaactggaatatattgtatctgtcaacactttagttttgggacatagtgagcctggagaagcatcatttttaccttgtagctctcaatcatcagaagaatcctctagacagtcctgtatgagtgtacctggaatgtctactggaacagtacttggtgctggtagtattggaacagatattgcaaatgaaattctggatttacagaggttacagtcttcttcataccttgatgattcgagtccaacaggtttaatgaaagatactcatactgtaaactgcaggagtatgtcaaataaggagttgtttccaccaagtccttctgaaatgggggagctagaggctaccaggcaaaaccagagtactgttgctgtccacagccatgagccactcctcagtgatggtgcacagttggatttcgatgccctatgtgacaatgatgacacagccatggctgcatttatgaattacttagaagcagaggggggcctgggagaccctggggacttcagtgacatccagtggaccctctagc

SEQ ID NO: 109011 - DNA, 1954 bp, Homo sapiens
  Payload ID: 1414
  Gene Symbol: ARNTL2
  Gene Name: aryl hydrocarbon receptor nuclear translocator-like 2
  Uniprot ID: Q8WYA1
  ENST ID: ENST00000395901
  CDS Start-End: 154-1953
gggctgcggtggcggccgccgcggcacccggcagggcccgccagtccccgcttccctgctccagagccgccgcctgggccggggcagggcgggcccggggctcctccatgctgccagccgcggggctgcggagccgaccaagtggctcctgcgatggcggcggaagaggaggctgcggcgggaggtgaggttgccggtggcgaggcgacggccccaggtaaagtgttgagagaggagaaccagtgcattgctcctgtggtttccagccgcgtgagtccagggacaagaccaacagctatggggtctttcagctcacacatgacagagtttccacgaaaacgcaaaggaagtgattcagacccatcccaagaagctcatagccaaactgaaaagcggaggagagataaaatgaataacctgattgaagaactgtctgcaatgatccctcagtgcaaccccatggcgcgtaaactggacaaacttacagttttaagaatggctgttcaacacttgagatctttaaaaggcttgacaaattcttatgtgggaagtaattatagaccatcatttcttcaggataatgagctcagacatttaatccttaagactgcagaaggcttcttatttgtggttggatgtgaaagaggaaaaattctcttcgtttctaagtcagtctccaaaatacttaattatgatcaggctagtttgactggacaaagcttatttgacttcttacatccaaaagatgttgccaaagtaaaggaacaactttcttcttttgatatttcaccaagagaaaagctaatagatgccaaaactggtttgcaagttcacagtaatctccacgctggaaggacacgtgtgtattctggctcaagacgatcttttttctgtcggataaagagttgtaaaatctctgtcaaagaagagcatggatgcttacccaactcaaagaagaaagagcacagaaaattctatactatccattgcactggttacttgagaagctggcctccaaatattgttggaatggaagaagaaaggaacagtaagaaagacaacagtaattttacctgccttgtggccattggaagattacagccatatattgttccacagaacagtggagagattaatgtgaaaccaactgaatttataacccggtttgcagtgaatggaaaatttgtctatgtagatcaaagggcaacagcgattttaggatatctgcctcaggaacttttgggaacttcttgttatgaatattttcatcaagatgaccacaataatttgactgacaagcacaaagcagttctacagagtaaggagaaaatacttacagattcctacaaattcagagcaaaagatggctcttttgtaactttaaaaagccaatggtttagtttcacaaatccttggacaaaagaactggaatatattgtatctgtcaacactttagttttgggacatagtgagcctggagaagcatcatttttaccttgtagctctcaatcatcagaagaatcctctagacagtcctgtatgagtgtacctggaatgtctactggaacagtacttggtgctggtagtattggaacagatattgcaaatgaaattctggatttacagaggttacagtcttcttcataccttgatgattcgagtccaacaggtttaatgaaagatactcatactgtaaactgcaggagtatgtcaaataaggagttgtttccaccaagtccttctgaaatgggggagctagaggctaccaggcaaaaccagagtactgttgctgtccacagccatgagccactcctcagtgatggtgcacagttggatttcgatgccctatgtgacaatgatgacacagccatggctgcatttatgaattacttagaagcagaggggggcctgggagaccctggggacttcagtgacatccagtggaccctctagc

SEQ ID NO: 109012 - DNA, 1959 bp, Homo sapiens
  Payload ID: 1414
  Gene Symbol: ARNTL2
  Gene Name: aryl hydrocarbon receptor nuclear translocator-like 2
  ENST ID: ENST00000457040
  CDS Start-End: 1-1766
ctcctgtggtttccagccgcgtgagtccagggacaagaccaacagctatggggtctttcagctcacacatgacagagtttccacgaaaacgcaaaggaagtgattcagacccatcccatcagaatccccttacctatcttctttcaacaaggatagaaatatcagcctccagtggcagcagagaagctcatagccaaactgaaaagcggaggagagataaaatgaataacctgattgaagaactgtctgcaatgatccctcagtgcaaccccatggcgcgtaaactggacaaacttacagttttaagaatggctgttcaacacttgagatctttaaaaggcttgacaaattcttatgtgggaagtaattatagaccatcatttcttcaggataatgagctcagacatttaatccttaagactgcagaaggcttcttatttgtggttggatgtgaaagaggaaaaattctcttcgtttctaagtcagtctccaaaatacttaattatgatcaggctagtttgactggacaaagcttatttgacttcttacatccaaaagatgttgccaaagtaaaggaacaactttcttcttttgatatttcaccaagagaaaagctaatagatgccaaaactggtttgcaagttcacagtaatctccacgctggaaggacacgtgtgtattctggctcaagacgatcttttttctgtcggataaagagttgtaaaatctctgtcaaagaagagcatggatgcttacccaactcaaagaagaaagagcacagaaaattctatactatccattgcactggttacttgagaagctggcctccaaatattgttggaatggaagaagaaaggaacagtaagaaagacaacagtaattttacctgccttgtggccattggaagattacagccatatattgttccacagaacagtggagagattaatgtgaaaccaactgaatttataacccggtttgcagtgaatggaaaatttgtctatgtagatcaaagggcaacagcgattttaggatatctgcctcaggaacttttgggaacttcttgttatgaatattttcatcaagatgaccacaataatttgactgacaagcacaaagcagttctacagagtaaggagaaaatacttacagattcctacaaattcagagcaaaagatggctcttttgtaactttaaaaagccaatggtttagtttcacaaatccttggacaaaagaactggaatatattgtatctgtcaacactttagttttgggacatagtgagcctggagaagcatcatttttaccttgtagctctcaatcatcagaagaatcctctagacagtcctgtatgagtgtacctggaatgtctactggaacagtacttggtgctggtagtattggaacagatattgcaaatgaaattctggatttacagaggttacagtcttcttcataccttgatgattcgagtccaacaggtttaatgaaagatactcatactgtaaactgcaggagtatgtcaaataaggagttgtttccaccaagtccttctgaaatgggggagctagaggctaccaggcaaaaccagagtactgttgctgtccacagccatgagccactcctcagtgatggtgcacagttggatttcgatgccctatgtgacaatgatgacacagccatggctgcatttatgaattacttagaagcagaggggggcctgggagaccctggggacttcagtgacatccagtggaccctctagcctttgatttttaactccaaaaatgagaaacattttaaagcatttcatttacgaaaaactgtctcaactattcttaagtactgtattgatattgtttgtatcttttattaatgttctaccactttttatagatttgcatcttcctgtcacagggatgtggggaaatacgttttcctcccaagagaaccaagtt

SEQ ID NO: 109013 - DNA, 1861 bp, Homo sapiens
  Payload ID: 1414
  Gene Symbol: ARNTL2
  Gene Name: aryl hydrocarbon receptor nuclear translocator-like 2
  Uniprot ID: Q8WYA1
  ENST ID: ENST00000546179
  CDS Start-End: 154-1776
gggctgcggtggcggccgccgcggcacccggcagggcccgccagtccccgcttccctgctccagagccgccgcctgggccggggcagggcgggcccggggctcctccatgctgccagccgcggggctgcggagccgaccaagtggctcctgcgatggcggcggaagaggaggctgcggcgggaggtgaggttgccggtggcgaggcgacggccccaggtaaagtgttgagagaggagaaccagtgcattgctcctgtggtttccagccgcgtgagtccagggacaagaccaacagctatggggtctttcagctcacacatgacagagtttccacgaaaacgcaaaggaagtgattcagacccatcccaagaagctcatagccaaactgaaaagcggaggagagataaaatgaataacctgattgaagaactgtctgcaatgatccctcagtgcaaccccatggcgcgtaaactggacaaacttacagttttaagaatggctgttcaacacttgagatctttaaaaggcttgacaaattcttatgtgggaagtaattatagaccatcatttcttcaggataatgagctcagacatttaatccttaagactgcagaaggcttcttatttgtggttggatgtgaaagaggaaaaattctcttcgtttctaagtcagtctccaaaatacttaattatgatcaggctagtttgactggacaaagcttatttgacttcttacatccaaaagatgttgccaaagtaaaggaacaactttcttcttttgatatttcaccaagagaaaagctaatagatgccaaaactggtttgcaagttcacagtaatctccacgctggaaggacacgtgtgtattctggctcaagacgatcttttttctgtcggataaagagttgtaaaatctctgtcaaagaagagcatggatgcttacccaactcaaagaagaaagagcacagaaaattctatactatccattgcactggttacttgagaagctggcctccaaatattgttggaatggaagaagaaaggaacagtaagaaagacaacagtaattttacctgccttgtggccattggaagattacagccatatattgttccacagaacagtggagagattaatgtgaaaccaactgaatttataacccggtttgcagtgaatggaaaatttgtctatgtagatcaaagggcaacagcgattttaggatatctgcctcaggaacttttgggaacttcttgttatgaatattttcatcaagatgaccacaataatttgactgacaagcacaaagcagttctacagagtaaggagaaaatacttacagattcctacaaattcagagcaaaagatggctcttttgtaactttaaaaagccaatggtttagtttcacaaatccttggacaaaagaactggaatatattgtatctgtcaacactttagttttgggacatagtgagcctggagaagcatcatttttaccttgtagctctcaatcatcagaagaatcctctagacagtcctgtatgagtgtacctggaatgtctactggaacagtacttggtgctggtagtattggaacagatattgcaaatgaaattctggatttacagaggttacagtcttcttcataccttgatgattcgagtccaacaggtttaatgaaagatactcatactgtaaactgcaggagtgtgatggtgcacagttggatttcgatgccctatgtgacaatgatgacacagccatggctgcatttatgaattacttagaagcagaggggggcctgggagaccctggggacttcagtgacatccagtggaccctctagcctttgatttttaactc

SEQ ID NO: 109014 - DNA, 6785 bp, Homo sapiens
  Payload ID: 1414
  Gene Symbol: ARNTL2
  Gene Name: aryl hydrocarbon receptor nuclear translocator-like 2
  Uniprot ID: Q8WYA1
  ENST ID: ENST00000544915
  CDS Start-End: 220-2028
ctccagtccgcatgctcagtagctgctgccggccgggctgcggggcggcgtcccgtgcgcgcctacgggctgcggtggcggccgccgcggcacccggcagggcccgccagtccccgcttccctgctccagagccgccgcctgggccggggcagggcgggcccggggctcctccatgctgccagccgcggggctgcggagccgaccaagtggctcctgcgatggcggcggaagaggaggctgcggcgggaggtaaagtgttgagagaggagaaccagtgcattgctcctgtggtttccagccgcgtgagtccagggacaagaccaacagctatggggtctttcagctcacacatgacagagtttccacgaaaacgcaaaggaagtgattcagacccatcccaagtggaagatggtgaacaccaagttaaaatgaaggccttcagagaagctcatagccaaactgaaaagcggaggagagataaaatgaataacctgattgaagaactgtctgcaatgatccctcagtgcaaccccatggcgcgtaaactggacaaacttacagttttaagaatggctgttcaacacttgagatctttaaaaggcttgacaaattcttatgtgggaagtaattatagaccatcatttcttcaggataatgagctcagacatttaatccttaagactgcagaaggcttcttatttgtggttggatgtgaaagaggaaaaattctcttcgtttctaagtcagtctccaaaatacttaattatgatcaggctagtttgactggacaaagcttatttgacttcttacatccaaaagatgttgccaaagtaaaggaacaactttcttcttttgatatttcaccaagagaaaagctaatagatgccaaaactggtttgcaagttcacagtaatctccacgctggaaggacacgtgtgtattctggctcaagacgatcttttttctgtcggataaagagttgtaaaatctctgtcaaagaagagcatggatgcttacccaactcaaagaagaaagagcacagaaaattctatactatccattgcactggttacttgagaagctggcctccaaatattgttggaatggaagaagaaaggaacagtaagaaagacaacagtaattttacctgccttgtggccattggaagattacagccatatattgttccacagaacagtggagagattaatgtgaaaccaactgaatttataacccggtttgcagtgaatggaaaatttgtctatgtagatcaaagggcaacagcgattttaggatatctgcctcaggaacttttgggaacttcttgttatgaatattttcatcaagatgaccacaataatttgactgacaagcacaaagcagttctacagagtaaggagaaaatacttacagattcctacaaattcagagcaaaagatggctcttttgtaactttaaaaagccaatggtttagtttcacaaatccttggacaaaagaactggaatatattgtatctgtcaacactttagttttgggacatagtgagcctggagaagcatcatttttaccttgtagctctcaatcatcagaagaatcctctagacagtcctgtatgagtgtacctggaatgtctactggaacagtacttggtgctggtagtattggaacagatattgcaaatgaaattctggatttacagaggttacagtcttcttcataccttgatgattcgagtccaacaggtttaatgaaagatactcatactgtaaactgcaggagtatgtcaaataaggagttgtttccaccaagtccttctgaaatgggggagctagaggctaccaggcaaaaccagagtactgttgctgtccacagccatgagccactcctcagtgatggtgcacagttggatttcgatgccctatgtgacaatgatgacacagccatggctgcatttatgaattacttagaagcagaggggggcctgggagaccctggggacttcagtgacatccagtggaccctctagcctttgatttttaactccaaaaatgagaaacattttaaagcatttcatttacgaaaaactgtctcaactattcttaagtactgtattgatattgtttgtatcttttattaatgttctaccactttttatagatttgcatcttcctgtcacagggatgtggggaaatacgttttcctcccaagagaaccaagtttattatagactcctttattcagtgaaatggcttataatccactagttgccatatttttgctaaaatatttctaaccaagaatactacttacatattgttttggctttgttttatttttgatgcagttttttttagttgaggtaatgtaatatattgatgttttcctttgtgtctaagattcatttataatagtaggtttgtataatttggaacattttccattccttgcgaatttccttaattgaggatagggcttacacactttaagaaaacagtgagtacttgaacatttaaagggacagtgcaatttatagtcataatcacattgaatactgtatttgatctttggagacttaggcaagcacagagctgggatatttatgctcagttgagcactttaagatgaattttaagtgagatgatttcttgcttaaaactcagaaagtcaaaagagtttcagctttccttacagaaaaggaaggatcttgggccctagatcttggggattaacctctgcatataagatttactcttaataggccagacgtggtggctcacgcctgtaatcccagtactttgggaggctgagacgggcagatcacttgaggtcaggagttcaagaccagcctggccaatatggtgaaaccccgtttctactaaaaatacaaaaaaaattacccaggcactcactcttgaggtaactaaccaactcccacgataatgacagtccattcatgagcgcaaaggcctcatgacctaatggcacacacctgtaatcccaactgcttgggaggctgaggcgagaggattgcttgaacctgggaggcagaggttgcagtgagccgagatcgcaccactgcactccagtctgggcaacagagtgagacttcatctcaaaaaaagtaaaaaaaaagatttaatataatcactgaagatctctattatagatagattaggtttttgacattggaaacatacttagggatagatttgtcctaaaggaaaaaagtaggcccgggcagattaaatgtcttgtgtaaagtcacacattaaattcagtcacacattaaattcatagagttttaaatgtttaatgtatataaaccagtttctttatacacatttgggaaaacattggtctcacagattaaatgattaactaactgacccaggaactagttgtagctttctaagtaattaggcaattacagttattgcctgtaaccaaaggtaataaaacaaaatgacaagtacatgtttaaaattatgaggcaatgagaaataatttaaaaaccaattttctagttataatttaaaatttggagagcatttttaacagtaattaatccagaggtggctcaaattgagtataagaattaagattatttaaaatactgcatgtctaccttctcggggatcatactttataacactttctgcttcagtagctcttcatagcttgccaagtatgctcccatattttctctctcgtgcctcgcaaatgaaagtcagataggctgggaactcatggggcagccctcagacttcaatgtgggcttcaaatccagtttcctgttctatatggtgctacatctttccagaaaatttccctcagagcccctcgccaaaacaaagcattattttgaccctgcatgctatttctttagctgtaggtgatagattagaacttctgtcagacatgttaatgacaaacataccaacagacaataaccaaaagcaaatgtttccttcaagtgtgaaatgtgcaggggcttcgtgggcaaggatgtattggcacactgtcctcttgaactgatagtgtcccagcaatgttggagggttggcaccattcctggtccgacacttgaggacctgagagacatcaggtttagaatgagccaaagaaatcctacaagatggggagaattggtgtgcagcagcctaagtgttatagttaagtctaaagaagtatgaaagatcccctgtgttctctaaattgagcagaggggcctgcctaccaatatcactttttaggggactgaaccattgcaggttagacttggcttccaaagagtctgcctaagccaggggtggcagggtaggccatcatagctggatggcctcaaaagcagatgggggcagacttgccctcgtgatgccaggatttgagaggcagagtttctagagggagaccagtgctgcctctcacagtggcagttttttctctttgcaagaggaggggctgttcaattccatagaccagtgggcagatagccagttgaatactctgtgcatggtttgatcctttattagttcgctctaatatttttctgtagatccttttgtcctggactcaaaatctaatccatgcattgtatgataccgtagctctcctaaggtttgtgtttccttcaaaatgttttagttttcttcaactaaatttgatttttgctgttagaagtgacatatttttatggtatacactatgttccttttttctactgcgagtcaattttttgaattttcgtgagaaagaatatatctacaaattgcacgaaagtatcataaaaacagtactctagacttttcttttcttttctttttttttttttttttttttttgagatggagtctcgctctatcgcccaggctggagtgcagtggcgcgatcttggctcactgccatctctgcctcctgggttcacgccattctgcctcagcctccagagcagctgggaccacaggcgcccgccaccacacctggctaattttgctttgtattttcagtagagacggggtttcaccatgttagccaggatggtctcgatctcctgacctcgtgatccgcccacttcggcctcccaaagtgctgggattacaggcatgagccactgcgcccggcctactctacactttttttaaccctaagaattaccactacagtaatgtagtggagtgggaagagtgcctggaatcagaagaccctgttgaggctgaatttagctgtatgacctcatgcaagccatttaaactctgtgcctcagcgtcctcatttttaaaaggaggtttgatctctatgtttacttccagctctgattctgggattctaatccacaggacttgggtgttagggtggaacctagaactgtgctgtccagtgcagtagccactagccacatgtggctactgagcacttgcaatgtggctagtacaaagtgagatgtgctatcaatgtaagatacataccagattttgaagactagtattaccaaaagaatgtaaaatatcacattaataattttatattaattacatgttcaaatgatattttggatatactgaattaaaacattaaaattagttctacttgtatctttttacttttttaatgtggctagaagaaaataaaattatacatgtggctcagattatatttctattggacagcgctgctctagaacattatattaagtggttattattgaagtagaccaaagtttataccataaggatatttttccttaaataccatgtttgaagaacaattatttattgatccttgaatctgtaagatcaaataacaagtctctatccatgttaccaaatttaaacttttgaaaataataaactttaaaatatcagatgtgttattacaggatgatacttggaatcaagtgaaatgagttatatggtcatcactaaatttagaaatctattgtgaaacaaagacaaacaggaaagtacagaatagagacttttagtaaataaatggaatttaaaagaaagtgtttatttacagtgtcacgacagaaaaggatgtctttgttgtcatagtctttgagggatctccgtaaaatctggggcacaggtacaagaaatagccaatatttagttcccagaccatgtttagtagtgtccagtttcagatcatgctgccaagaggtatctccccctcaggtgggtcatcactgagccctggaattggagactcatacttgcccagcacaatgttacgggcagacaggccgacatctatgattagctagaagccataaagaaaagctgctaagtggccactaggtgccacttttctgtttttgtaatgctttcattagcagatcttttttttccaagctccatggggcctatgagaggcatttatgatttttgtgcctacaataagtcagcctgtctggtgtgagttgttttatgagaaatgctttccaagggaggtctaggaagatcctgacacataagaactttggcttagagagctttccaggtgtagtgccaataaaaactgacctggaaagaaaacctgcccagcacggaacatgctttctgaactcacttgagagtgtatggtgtatgtcacttctcatatattcttgagtttagatttgtcttttatacaatttttagctcttttccagttcacttgtgctcgtctgtatattggtatttttaaatttttgtggtaaataatgaaaagagtgaaattatattttataattactcatttgtagtttttttttttaatttaataaacttcctccaaaaagtg

SEQ ID NO: 109015 - DNA, 1720 bp, Homo sapiens
  Payload ID: 1414
  Gene Symbol: ARNTL2
  Gene Name: aryl hydrocarbon receptor nuclear translocator-like 2
  Uniprot ID: Q8WYA1
  ENST ID: ENST00000542388
  CDS Start-End: 7-1662
acagctatggggtctttcagctcacacatgacagagtttccacgaaaacgcaaaggaagtgattcagacccatcccaagaagctcatagccaaactgaaaagcggaggagagataaaatgaataacctgattgaagaactgtctgcaatgatccctcagtgcaaccccatggcgcgtaaactggacaaacttacagttttaagaatggctgttcaacacttgagatctttaaaaggcttgacaaattcttatgtgggaagtaattatagaccatcatttcttcaggataatgagctcagacatttaatccttaagactgcagaaggcttcttatttgtggttggatgtgaaagaggaaaaattctcttcgtttctaagtcagtctccaaaatacttaattatgatcaggctagtttgactggacaaagcttatttgacttcttacatccaaaagatgttgccaaagtaaaggaacaactttcttcttttgatatttcaccaagagaaaagctaatagatgccaaaactggtttgcaagttcacagtaatctccacgctggaaggacacgtgtgtattctggctcaagacgatcttttttctgtcggataaagagttgtaaaatctctgtcaaagaagagcatggatgcttacccaactcaaagaagaaagagcacagaaaattctatactatccattgcactggttacttgagaagctggcctccaaatattgttggaatggaagaagaaaggaacagtaagaaagacaacagtaattttacctgccttgtggccattggaagattacagccatatattgttccacagaacagtggagagattaatgtgaaaccaactgaatttataacccggtttgcagtgaatggaaaatttgtctatgtagatcaaagggcaacagcgattttaggatatctgcctcaggaacttttgggaacttcttgttatgaatattttcatcaagatgaccacaataatttgactgacaagcacaaagcagttctacagagtaaggagaaaatacttacagattcctacaaattcagagcaaaagatggctcttttgtaactttaaaaagccaatggtttagtttcacaaatccttggacaaaagaactggaatatattgtatctgtcaacactttagttttgggacatagtgagcctggagaagcatcatttttaccttgtagctctcaatcatcagaagaatcctctagacagtcctgtatgagtgtacctggaatgtctactggaacagtacttggtgctggtagtattggaacagatattgcaaatgaaattctggatttacagaggttacagtcttcttcataccttgatgattcgagtccaacaggtttaatgaaagatactcatactgtaaactgcaggagtatgtcaaataaggagttgtttccaccaagtccttctgaaatgggggagctagaggctaccaggcaaaaccagagtactgttgctgtccacagccatgagccactcctcagtgatggtgcacagttggatttcgatgccctatgtgacaatgatgacacagccatggctgcatttatgaattacttagaagcagaggggggcctgggagaccctggggacttcagtgacatccagtggaccctctagcctttgatttttaactccaaaaatgagaaacattttaaagcatttcatttacgaaaaa

SEQ ID NO: 109016 - DNA, 1642 bp, Homo sapiens
  Payload ID: 1415
  Gene Symbol: AADAC
  Gene Name: arylacetamide deacetylase
  Uniprot ID: P22760
  ENST ID: ENST00000232892
  CDS Start-End: 127-1326
gagcaactctgttttcaaagcttttgggtggagctgaagcacactgcttattaaagtacactattcaggcatatcatgtaggtttactttctgtgtttctagagaccaagaagcgggacgttcaccatgggaagaaaatcgctgtaccttctgattgtggggatcctcatagcatattatatttatacgcctctcccagataacgttgaggagccatggagaatgatgtggataaacgcacatctgaaaactatacaaaatttggctacatttgtggagctcctgggacttcaccattttatggattcctttaaggttgtcgggagctttgatgaagtcccaccaacctcagatgaaaatgtcactgtgactgagacaaaattcaacaacattcttgttcgggtatatgtgccaaagagaaagtctgaagcactaagaagggggttgttttacatccatggtggaggctggtgcgtgggaagtgctgctctaagtggttatgacttgctgtcaagatggacagcagacagacttgatgctgtcgtcgtatcaaccaactacagattagcacctaagtatcatttcccaattcaatttgaagatgtatataatgccttaaggtggttcttacgtaaaaaagttcttgcaaaatatggtgtgaaccctgagagaatcggtatttctggagatagtgcaggagggaatttagctgcagcagtgactcaacagctccttgatgacccagatgtcaagatcaaactcaagatccagtctttaatttatcctgcccttcagcctcttgatgtagatttaccgtcatatcaagaaaattcaaattttctatttctatccaaatcactcatggtcagattctggagtgaatattttaccactgatagatcacttgaaaaagccatgctttccagacaacatgtacctgtggaatcaagtcatctcttcaaatttgttaattggagttccctgctccctgagaggtttataaaaggacatgtttataacaatccaaattatggcagttctgagctggctaaaaaatatccagggttcctagatgtgagggcagcccctttgttggctgatgacaacaaattacgtggcttacccctgacctatgtcatcacctgtcaatatgatctcttaagagatgatggactcatgtatgtcacccgacttcgcaacactggggttcaggtgactcataaccatgttgaggatggattccatggagcattttcatttctgggacttaaaattagtcacagacttataaatcagtatattgagtggctaaaggaaaatctatagtaaaacatgtagctataacatattttaaaaataaaatctgaaaacctcagaaaatttgcattagaaattggtctttcttagaatggtctagttaagttccacatgtagcataattcttaaataggcacttttctgttttttttttcttactgtgggatttcatttcaattttctacattgtctatctgctttttctgagattttccttcttacactgttaatcttattttaaaaaatattacattcttgtatactttatttttgtgagttggctactatttacgatgcaagagaataaatgtgagcaaatattgcc

SEQ ID NO: 109017 - DNA, 719 bp, Homo sapiens
  Payload ID: 1415
  Gene Symbol: AADAC
  Gene Name: arylacetamide deacetylase
  ENST ID: ENST00000488869
  CDS Start-End: 91-705
aagcacactgcttattaaagtacactattcaggcatatcatgtaggtttactttctgtgtttctagagaccaagaagcgggacgttcaccatgggaagaaaatcgctgtaccttctgattgtggggatcctcatagcatattatatttatacgcctctcccagataacgttgaggagccatggagaatgatgtggataaacgcacatctgaaaactatacaaaatttggctacatttgtggagctcctgggacttcaccattttatggattcctttaaggttgtcgggagctttgatgaagtcccaccaacctcagatgaaaatgtcactgtgactgagacaaaattcaacaacattcttgttcgggtatatgtgccaaagagaaagtctgaagcactaagaagggggttgttttacatccatggtggaggctggtgcgtgggaagtgctgctctaagtggttatgacttgctgtcaagatggacagcagacagacttgatgctgtcgtcgtatcaaccaactacagattagcacctaagtatcatttcccaattcaatttgaagatgtatataatgccttaaggtggttcttacgtaaaaaagttcttgcaaaatatggtgtgaaccctgagagaatcggtatttctggagatagtgcaggagggaatttagctgcagcagtgactcaacaggtatgttcataatttctatgcttttt

SEQ ID NO: 109018 - DNA, 1487 bp, Homo sapiens
  Payload ID: 1416
  Gene Symbol: AADACL2
  Gene Name: arylacetamide deacetylase-like 2
  Uniprot ID: Q6P093
  ENST ID: ENST00000356517
  CDS Start-End: 110-1315
atatcacctgagagagttcccaagtctacaattgctctactagttactattcagtgtttgtgaaaaattttaatctcagtactgtgaagaagctggaaaaagggatattatggggctaaaagctctctgtttggggctgctttgtgttctttttgtctctcatttttacacacccatgccagacaacattgaagaaagctggaaaataatggccttggatgccatcgctaaaacttgtacatttacggctatgtgttttgaaaatatgcgtattatgagatatgaagagtttatatccatgatattcaggctggattatacccaaccactttcagatgaatacatcacagtgactgatacaacatttgttgacattccagtacgattgtacttgccaaaaagaaagtcagaaacccgaaggcgagctgtgatatattttcatggtggtggtttttgttttggaagttccaaacagagggcttttgacttcctgaatagatggacggcaaacacgcttgatgctgttgttgtaggcgtggactataggctggctcctcaacaccactttcctgctcagtttgaagatggccttgctgcagtcaaattttttcttttggaaaaaattcttacaaaatatggagtggatcccacccgaatctgcattgcgggagacagttctgggggcaatttagcaacagcggtcactcaacaggtgcagaatgatgctgaaataaaacataaaatcaagatgcaagtcttactttaccctggcttacagataacagattcttatttgccatctcaccgagaaaatgagcatggtatagttttgaccagggatgtagccataaaactcgtgagcttatatttcaccaaggatgaagcacttccctgggcaatgagaagaaaccaacacatgcctctggagtcaagacatctgtttaagtttgttaactggagtattcttcttcctgagaagtatagaaaagactatgtatatactgaaccaattcttggaggacttagttattcattgccaggacttacagacagcagagcattacccttgttggccaatgattctcagttacagaatttgccactaacctatattcttacttgtcaacatgatctcttaagagatgatggacttatgtatgttacaagacttcgaaatgttggagtccaagttgttcatgaacatattgaggatggaattcatggagctttatcattcatgacttcaccattttatttacgtctaggtcttaggataagagatatgtatgtaagttggctggataagaatttataaatatgtgatgtgtatgtatagcccttacatagtggattgtaatttgtgatattttgtggttttggagcaaagaacaatgtcatttgagttatctaaatctacatttgcaacatttgtagcagttaatgtgtgtccttgaagagttattaaattttctgacttgcagaccctg

SEQ ID NO: 109019 - DNA, 4848 bp, Homo sapiens
  Payload ID: 1416
  Gene Symbol: AADACL2
  Gene Name: arylacetamide deacetylase-like 2
  ENST ID: ENST00000445270
  CDS Start-End: 121-282
ttaagatgatcatatcacctgagagagttcccaagtctacaattgctctactagttactattcagtgtttgtgaaaaattttaatctcagtactgtgaagaagctggaaaaagggatattatggggctaaaagctctctgtttggggctgctttgtgttctttttgtctctcatttttacacacccatgccagacaacattgaagaaagctggaaaataatggccttggatgccatcgctaaaacttgtacatttacgaacagagggcttttgacttcctgaatagatggacggcaaacacgcttgatgctgttgttgtaggcgtggactataggctggctcctcaacaccactttcctgctcagtttgaagatggccttgctgcagtcaaattttttcttttggaaaaaattcttacaaaatatggagtggatcccacccgaatctgcattgcgggagacagttctgggggcaatttagcaacagcggtcactcaacaggtgcagaatgatgctgaaataaaacataaaatcaagatgcaagtcttactttaccctggcttacagataacagattcttatttgccatctcaccgagaaaatgagcatggtatagttttgaccagggatgtagccataaaactcgtgagcttatatttcaccaaggatgaagcacttccctgggcaatgagaagaaaccaacacatgcctctggagtcaagacatctgtttaagtttgttaactggagtattcttcttcctgagaagtatagaaaagactatgtatatactgaaccaattcttggaggacttagttattcattgccaggacttacagacagcagagcattacccttgttggccaatgattctcagttacagaatttgccactaacctatattcttacttgtcaacatgatctcttaagagatgatggacttatgtatgttacaagacttcgaaatgttggagtccaagttgttcatgaacatattgaggatggaattcatggagctttatcattcatgacttcaccattttatttacgtctaggtcttaggataagagatatgtatgtaagttggctggataagaatttataaatatgtgatgtgtatgtatagcccttacatagtggattgtaatttgtgatattttgtggttttggagcaaagaacaatgtcatttgagttatctaaatctacatttgcaacatttgtagcagttaatgtgtgtccttgaagagttattaaattttctgacttgcagaccctgaatatgtaaaatgtatgtaatcctgcctattttctccttacttataatttattataattatgttggttctaataagaaccaatgcttattaaagttgagaaataagagtggttattggcaaattaagcaagatactttccagataggcacagaaattgttgtagtgagtgggaagaggaaaaaacatggaacaaacttgctgctaaaaatatatggaaaccactggactaaataaaccctaaggaccctatattagtttcctgtgactattgtagcaaattactacaaattcagtcgctttaaacaacagatatttattcttttacagttctggggtcctaaagcatgaaattagtattaactaggcccaaaccaagtcacaggcaagagacatgactcccttggagactctctagaaggtgctctttgcctcttttaacctctggtggctgccagtattctttgactattcttagatcagtttaatcttgaaggccagcatcttccaatctctttctgcttcatcttcacattgccttcttctctgcctgtgtctaatctccctatgggcttctcttagaaaaacacatgtgtttacatttaggagggtccacctgaatagtctaggataatctctgcatctcacgatcctcaatttaattgtatttgcagatttccccacccttttctatataaagtaaccttcagagattaggatgtagttatcttttgggaggccatttttaaaaatattttttaaaggaggcagcagatcaatattataattcaagaatctgatctaaatatgcattcaataatgaagaacatttgagtatggactagaaaagcttctccaaaaaactttcaaatatatcatctcaaattacctaaagaataaatcacttctgtagcccttttgttgagtggaatcataaacaaaaaactgaaaatttattgctatgaaaacagatccatggtacaatgttataaattttgagtattaagcatagtcagttgaatccaactaagaagttaaaaatgtagtaagaaatgtgtatatgtatgagtatgtgcatgtgtgtgggaaaaatctaccatccaattgacccaaaaacaacttactcagttgggaccagacatttttctcaattctccatgattcagaaggcaattaagaattacaatttcaacagtccacaaacaaaataagatttttttaatgtagagagaaattaattatgttcaaagagccctttttctttcactcaatttcagtaccccaaagctaaaaacgcaaacatgactatgacaaatgaaaataagtatcatgggaatctgtttttttcctctgagaaataaaatctaaatggagatttgatactatatgctatactacatacactaagaatattgtatttttcataattctgatttaatctcctgtaaacttgatatattttaaaatttgtaatttgtttttcatgatactgaatctggttccagttctttttcatcatttaatatactggctacccgttctaattaggaaaacaagtcctagaaatctcttcattttgacagcaagtgctgatttgtaagaaaatcattaaaaatgcagctctctaggaagcacattttgttgattgtcctattgtctgaacattttcacagtgattcctgactaaaaatccttttaattttgtaagcactacactagtgtgtcatgtcactagtatgtactttcaagcctttaaacagaaaggatggctcacagctagataataactaagtttgttttcgttttgaaaaagtttgtatcttgcagagcagaaaagcacttctttttttgctacataagtatgtggtagaaatgtatgctaaggtaggccagtcaatccttttttatttattttgtaaatttggtcccagaatatttctggaaggaaccacaggtagactagcttccattgcagtcccttacctcactaacttcttttgtggctttatccaggcactgttactgtttgtatgctaaagggttcatttcactgggtcttactttcaaagtttgttccattttgtgtggtggcatgagcattgtgatcaagccattaagtttggaaacaactgaatgaaagtcgtctgttataatgtattttactttatttttaaatttcattttaaattgacaataattgtacatattcatgggatacatagtgacgtttcaatacatatcatgtatagtgattatatcagggtaatcggcacatcatctcaaacatttatcatttctttgtgttgggaatttcaatatcttttttttagctgtttgagattatgtaatatattattgttaactatagtcatcctacagtggtatagaaactacctagctgtaatgatgtatcttttaacaaatctaatttatttcttgacagtataggggaagacttgattacaccccatggcattacagctaaaaattccaacgttttcagtctctttgtagctatgttatccagacattgatttgtatttacatctcatcttcctttctaagagaaacagtgatgcagaacctgagagtcaaatttaatattctctaggtaccaaggcaagggtttatgttacagtttgtgtactagtccaagtcccaagttgtgacgatacagctccataacctacctttataccacccagggaaagtatacagaagaaattcttgacttcatctatccgaatttctacaagtcatctgttatttttctgataatctgcctgtgtctcctggaaacataaggtgtaggtttctgacacatatatctaacatgtaaagaagtaacaatttccaaaatacctccaaacagcgccacatcctaaaggaaatttctaggtttttctgctgaaatatccattccagcattgtgtttgtttgctagagctgctataacaaagtatcacaaactgagtgccttaaataaacaaaaggaatttattactttgtggttcagaaggctagaagttggagatcaaggtgtcatcacaccatggtccctctgaaggcaccaaggatggatctgtttcaggactcctggcctgtagcagcataactccaatcttcacatgatattctcccgttgtatgtgttcttccccaattttccctttttataaagatagcagtcagattagattagggcctatcctaataatttcattttaacctgactgtctttgtaaagaccctatctgcaaataaaatcacatgtaaagtattggggcttaggactccaacatatagatatgttttatatatatggtgagatatatatatatttttttatatatggtgagatatatatttatatatggtgagatatatatatatatggtgagatatatatttatatatatggtgagatatatacatattgtgatatatatatatatatatatatatatatatatatatatgaatttggtggaacacaaaagaacacctagcaagtatcatatgttccaatttcttaaaagtaaataaaggccttgtgccattggtggtgttctgaaa

SEQ ID NO: 109020 - DNA, 1487 bp, Homo sapiens; identical to SEQ ID NO: 109018
  Payload ID: 1416
  Gene Symbol: AADACL2
  Gene Name: arylacetamide deacetylase-like 2
  Uniprot ID: Q6P093
  ENST ID: ENST00000570799
  CDS Start-End: 110-1315

SEQ ID NO: 109021 - DNA, 3007 bp, Homo sapiens
  Payload ID: 1416
  Gene Symbol: AADACL2
  Gene Name: arylacetamide deacetylase-like 2
  ENST ID: ENST00000576369
  CDS Start-End: 121-282
ttaagatgatcatatcacctgagagagttcccaagtctacaattgctctactagttactattcagtgtttgtgaaaaattttaatctcagtactgtgaagaagctggaaaaagggatattatggggctaaaagctctctgtttggggctgctttgtgttctttttgtctctcatttttacacacccatgccagacaacattgaagaaagctggaaaataatggccttggatgccatcgctaaaacttgtacatttacgaacagagggcttttgacttcctgaatagatggacggcaaacacgcttgatgctgttgttgtaggcgtggactataggctggctcctcaacaccactttcctgctcagtttgaagatggccttgctgcagtcaaattttttcttttggaaaaaattcttacaaaatatggagtggatcccacccgaatctgcattgcgggagacagttctgggggcaatttagcaacagcggtcactcaacaggtgcagaatgatgctgaaataaaacataaaatcaagatgcaagtcttactttaccctggcttacagataacagattcttatttgccatctcaccgagaaaatgagcatggtatagttttgaccagggatgtagccataaaactcgtgagcttatatttcaccaaggatgaagcacttccctgggcaatgagaagaaaccaacacatgcctctggagtcaagacatctgtttaagtttgttaactggagtattcttcttcctgagaagtatagaaaagactatgtatatactgaaccaattcttggaggacttagttattcattgccaggacttacagacagcagagcattacccttgttggccaatgattctcagttacagaatttgccactaacctatattcttacttgtcaacatgatctcttaagagatgatggacttatgtatgttacaagacttcgaaatgttggagtccaagttgttcatgaacatattgaggatggaattcatggagctttatcattcatgacttcaccattttatttacgtctaggtcttaggataagagatatgtatgtaagttggctggataagaatttataaatatgtgatgtgtatgtatagcccttacatagtggattgtaatttgtgatattttgtggttttggagcaaagaacaatgtcatttgagttatctaaatctacatttgcaacatttgtagcagttaatgtgtgtccttgaagagttattaaattttctgacttgcagaccctgaatatgtaaaatgtatgtaatcctgcctattttctccttacttataatttattataattatgttggttctaataagaaccaatgcttattaaagttgagaaataagagtggttattggcaaattaagcaagatactttccagataggcacagaaattgttgtagtgagtgggaagaggaaaaaacatggaacaaacttgctgctaaaaatatatggaaaccactggactaaataaaccctaaggaccctatattagtttcctgtgactattgtagcaaattactacaaattcagtcgctttaaacaacagatatttattcttttacagttctggggtcctaaagcatgaaattagtattaactaggcccaaaccaagtcacaggcaagagacatgactcccttggagactctctagaaggtgctctttgcctcttttaacctctggtggctgccagtattctttgactattcttagatcagtttaatcttgaaggccagcatcttccaatctctttctgcttcatcttcacattgccttcttctctgcctgtgtctaatctccctatgggcttctcttagaaaaacacatgtgtttacatttaggagggtccacctgaatagtctaggataatctctgcatctcacgatcctcaatttaattgtatttgcagatttccccacccttttctatataaagtaaccttcagagattaggatgtagttatcttttgggaggccatttttaaaaatattttttaaaggaggcagcagatcaatattataattcaagaatctgatctaaatatgcattcaataatgaagaacatttgagtatggactagaaaagcttctccaaaaaactttcaaatatatcatctcaaattacctaaagaataaatcacttctgtagcccttttgttgagtggaatcataaacaaaaaactgaaaatttattgctatgaaaacagatccatggtacaatgttataaattttgagtattaagcatagtcagttgaatccaactaagaagttaaaaatgtagtaagaaatgtgtatatgtatgagtatgtgcatgtgtgtgggaaaaatctaccatccaattgacccaaaaacaacttactcagttgggaccagacatttttctcaattctccatgattcagaaggcaattaagaattacaatttcaacagtccacaaacaaaataagatttttttaatgtagagagaaattaattatgttcaaagagccctttttctttcactcaatttcagtaccccaaagctaaaaacgcaaacatgactatgacaaatgaaaataagtatcatgggaatctgtttttttcctctgagaaataaaatctaaatggagatttgatactatatgctatactacatacactaagaatattgtatttttcataattctgatttaatctcctgtaaacttgatatattttaaaatttgtaatttgtttttcatgatactgaatctggttccagttctttttcatcatttaatatactggctacccgttctaattaggaaaacaagtcctagaaatctcttcattttgacagcaagtgctgatttgtaagaaaatcattaaaaatgcagctctctaggaagcacattttgttgattgtcctattgtctgaacattttcacagtgattcctgactaaaaatccttttaattttgtaagcactacactagtgtgtcatgtcacta

SEQ ID NO: 109022 - DNA, 3662 bp, Homo sapiens
  Payload ID: 1417
  Gene Symbol: AADACL3
  Gene Name: arylacetamide deacetylase-like 3
  Uniprot ID: Q5VUY0
  ENST ID: ENST00000359318
  CDS Start-End: 35-1258
gcttcctctcagcccgctctgagctggaagcagcatgtgggacctggccctgatcttcctcgcagcagcctgcgtgttctcactaggggtcactctgtgggtcatttgcagccattttttcactgtgcacatccctgcagcggttggccaccctgtgaaactgagagtcctccattgcatcttccagctgctgttgacttgggggatgatatttgagaagctcagaatctgttctatgccccaatttttctgtttcatgcaagatctgcctccgctaaagtatgaccccgatgttgtggtcacggatttccgctttgggacaatccctgtgaagctgtaccaacccaaggcatccacctgcaccctgaagcctggcatcgtgtactaccacggtggcgggggcgtcatggggagtttgaaaacccaccatggcatatgctctcgtttgtgcaaggagagtgactccgtggttctggcagttggttaccgcaagttacctaagcataagtttccagtgccagtaagagactgcttggtggccaccatccacttcctgaagtccctggatgcatatggagtggatccagcccgggttgtggtctgcggtgacagtttcggaggggcaatagccgcagtggtttgtcaacaacttgtggacaggccagatctgccccggatccgggctcagatcctgatctatgccattctccaagccctggatttacaaaccccttcgtttcaacagaggaaaaacatcccactgctcacctggagtttcatctgctactttttttttcaaaacctggatttcagctcctcctggcaagaggtcatcatgaaaggtgcccatttgcctgctgaagtctgggaaaagtacagaaagtggttgggcccagaaaacatccctgagaggtttaaggagaggggttaccaactgaagccccatgagcccatgaatgaagctgcttacttggaagtaagtgttgtcctggatgtgatgtgctcgcccctgattgcagaagatgacatagtgtctcagctcccggaaacctgcatcgtgagctgtgagtatgatgctctccgggacaattcactgttgtacaagaaaaggctggaagacctgggagtgcccgtgacctggcaccatatggaggatggtttccatggagtgctcaggaccattgacatgagcttcttgcactttccctgctccatgagaattctgagtgcattagttcaatttgtaaagggactgtgaccatctttcttctctgctggtactgcggtgtggattccactggcatccagcctcccacagggctctctgttgctgatttaggtggtgcatagtggggctagggagggggtagaggttgctgtcacctttctggtccaggttctagaaccacacaatgcatgctcctgatgtccagaggacgtggtagaaaagacaggtttggaggtgggagtgtggctgtctctattctctgttgggaaaacctgggctgacaatattcagtggccatttgtgggagtgaatcagccggtaagagctgttctcagcctccctaaggggcagttcaggctcccagattgatccagactgtgtgtgactttcgtccatttgacttgactttggaatagcacaagggcatcatgtacttcacgaggctttcccaatgtggctcagaggcaggagctctgatgctctgggctgctgtgaggtggtggtggtggtagagaaactggcttcacccacctactcttctgtgaacagtagtgacttttcccgctgtttctcagcctctgggatcagagtcttcactgtctgggctggaaactttaagatagaatggatagagcttccacagtggttggcatctagtggtggatgaagacagcctgcagctgcccgacttggggagctctggagctcctggaatcaaagcctgtcttccaaccagaagccccaaggcaatgttctaagaatttgagaagagaagttgggagggaagtggggtcctgagttagagacccatgaaggctgagtctaaccagataaccctgtccacagtgcaaagtcaagacagccaaaggaacagaagatgtatttgtgaaaactatttcttttttaagacatggaaccaactcaaattggcctctattagaaagacaatagattggcttaggtagggatgcatgctaggcatacatcaggcaaggtttgatccaggaactcacacagtgccatcagctgtcctgtcttctctgctctgctcttctctcctctgtgttaatgccaccttctcctcttcatacggtggcactgagcagcttcatgcctaccttcctccagggtcaagttcattatcatggacttgcctcatgctcagcagtcccagaaaaaagcctaattgcaacttgatggctttgttggctttctgagcaatgtgtccagttgccacagtgaagggaatggaataatctaactcaccattcccaagtcctatgccatcctgagagtggggggtggagtcaattcaccttggtgcttggactaagcatgaggtggtgagtgacaacgttcctaattgaagggtagggtaaatggttgttgggtggacaccaacacttattctactacagaagctaaattgaaccctcaggcagggtacgtgaaagtggcaagagatgtcaagaccactgggcaagttggccagttgttccttaggaatgaaaattcttttgaaaggaatggccagggtcctctgctggccccacttggtcttctggaggctctgatcttggttggttagtggtctttacaggccaaggtcaaggccattgcacaaaaaaccctgtgcatgcccttaacttgctttcagttgaatatttgggctgaactatgaggcagagaggaatcccattgggtggctccttgctgcattcgcagttgaccagcatggggtttgttggagaaataggaaccatcccctgaaaacacacactatggtagccactcaactgttgaaaggcactggagtccaatgggtgaggccgcctctgagacaagcctctgagttgaggctgggagaggctccctccttggagtgttgctttttttgtttcacccctgcctctggagatgggtagaggaacatgagctgaccttctgggaagtgaggttggtgaggagttgctgaggcactgcagggccatgcccagtagagaggaatgtataacattttaagaggctgagagcaccccttgttgggcgcatgcccatggcagcttccttctgccgatcatgggagaaatcaagcactttcacctaatggctagatgattgattttgggatgaaattctccactcctctcctttaccacatcaccactatccttcctgcaatacatccacgagactcactgagtggaaaagggataggaatgaatgttcacccagggccagctacatgctaggcactgtactggaccatttaaatttgccacctcttatgttcctcacattaatcttacagagtaggtacagacatacctatggatattgcagattcagttccagaccacagcaataaagcaagtcacatgaattttttgctttccttagtgcatgtaaaagttacatttccactatattatag

SEQ ID NO: 109023 - DNA, 1575 bp, Homo sapiens
  Payload ID: 1418
  Gene Symbol: AADACL4
  Gene Name: arylacetamide deacetylase-like 4
  Uniprot ID: Q5VUY2
  ENST ID: ENST00000376221
  CDS Start-End: 1-1224
atggctgtcccctggctagtgctactcttggcattgcccatctttttcctgggggtctttgtctgggctgtctttgagcacttcctcaccacggatatccctgctaccttgcagcatcctgccaagttgagattcctgcattgcatattcctctacctggtcactttggggaatatatttgagaagctgggaatttgctccatgcccaaatttattcgttttttacatgatagcgtgagaattaaaaaggaccctgaacttgtggtgaccgacctgcgttttgggacgatacccgtgaggctgttccagccgaaggcagcatcctccagaccccggcgaggcatcatcttctaccatggaggggccacagtatttgggagcctggattgttaccatggcctgtgcaattatctggcccgggagactgaatctgtacttctgatgattgggtaccgcaagcttcctgaccaccattcccctgcccttttccaagactgcatgaatgcctccattcacttcctgaaggccctggaaacctatggggtggacccctccagggttgtggtctgtggagaaagcgtcggaggtgcagcggtggccgccatcacccaggccttggtgggcagatcagatcttccccggatccgggctcaggttctgatttatccagttgtccaggcattctgtttgcagttgccatcctttcagcagaaccaaaatgtcccattactttcccggaagttcatggtgacttctctgtgtaactatctggccattgacctctcctggcgtgacgccatcttgaacggcacttgtgtacccccagacgtctggaggaagtacgagaagtggctcagccctgacaacatccccaagaaatttaagaacagaggctaccaaccctggtctcccggcccttttaatgaagctgcctatctagaagccaaacatatgctggatgtagaaaattcacccctgatagcagatgatgaggtcatcgctcagcttcctgaggccttcctggtgagctgtgagaatgacatactccgtgatgacagcttgctctataagaagcgcttggaggaccagggggtccgcgtgacatggtaccacctgtatgatggttttcacggatccattatcttttttgataagaaggctctctctttcccatgttccctgaagattgtgaatgctgtagtcagttatataaagggcatatgatagtaaccctggggccccgaggaggaaggggcaagtatggactctaccagaaaccgggtgctttagtgagttctattttattgactaaagaggtgctacatcaatgcttggggcagctgggaagggtgagaagtaagctaacagtcttgcttagtattcaagaaaatccaaactgtgtctgtttccttccagcactaacaatgtccattgctggatctagcgacattctctaacattcccatttaggtgaaataaatatcaaaaggagaaaaaaatgcctttaaaaatttctcaaagccccaacatataagatctgtgcagaataaatgccaacaactggtcataccgtca

SEQ ID NO: 109024 - DNA, 1700 bp, Homo sapiens
  Payload ID: 1419
  Gene Symbol: AFMID
  Gene Name: arylformamidase
  Uniprot ID: Q63HM1
  ENST ID: ENST00000327898
  CDS Start-End: 10-936
gtagacgccatgatggatgtgtctggtgtgggtttcccaagcaaggttccttggaagaagatgtctgcagaggagctggagaatcagtactgtcccagccgatgggttgtccgactgggagcagaggaagccttgaggacctactcacagataggaattgaagccaccacaagggcccgggccaccaggaagagcctgctgcatgtcccctatggagacggcgaaggggagaaagtggacatttacttccccgacgagtcgtctgaagccttgcctttcttcctgttctttcacggaggatactggcagagcggaagtaaggatgagtctgccttcatggtccacccgctgacggcacagggagtggccgtggtaatagtggcttacggcatcgcccccaaaggcaccctggaccacatggtagaccaggtgacccgcagcgttgcgtttgtccagaagcggtatccaagcaacaagggaatttacctgtgtggacactcagccggggcccacctggctgccatgatgctcctggccgactggaccaagcatggggtcacgcccaacctcagaggctttttcctggtgagtggggtctttgacctggagcccatcgtgtatacttcacagaacgttgctctccagctgaccctggaggacgctcagaggaatagcccccagctgaaggtggcccaggcacagccggtggaccccacctgccgtgtgctggtggtcgtgggccagttcgactcccccgaattccaccgacagtcctgggagttttaccaggtactcccagtgcagaccctgtgtcaaggagagtggaaagcctcatttgaagagctccacgatgtggaccactttgaaattgttgagaatctgacccagaaggacaacgtgctcacccagattatcttgaaaacaatcttccagtagttctgacgatacttggagcctggtccacgtgcatcccaccttgggaagcctctccaaagagctttcggagctgacactgacagcttcagtttcccccagcacccaggagagccttgctgtgtctgtctgcccggcaagagtccattctcactgctgggacactcatgaaaatctccacgtcctccctcttcccagcctggatggagctccagggctggggaacgtccgcaagtcaatgctcagagatgcccggagctgcctcttagactcgtctggcccatctacctgctgacagagcatgacaaagatgacgctcaaaagtaatgccattacttcttttttttttttttttttttttttttttgagatggagtcttactctgtcacccaggctggagtgcagtggcgtgatcttggctcactgcaacctccacctcccgggttcaagcaattctcctgcctcagcctcctgagcagctgggactacaggcgcctgccatcatgcctggctaatttttgtatttttagtagagacggggtttcaacatattggccaggctggtctcaaactcctaaccttgtgattcgcccgccttggcctcccaaagtgctgggattccaggcgtgagccactgcgcccggccagaatggcattatatttaaatagttcataaagaagcacaaaagaatattatttcataacatgtaaaaattatataaaacgtaaatttccatgttgataaataaagttgtattggaacacg

SEQ ID NO: 109025 - DNA, 1730 bp, Homo sapiens
  Payload ID: 1419
  Gene Symbol: AFMID
  Gene Name: arylformamidase
  Uniprot ID: Q63HM1
  ENST ID: ENST00000409257
  CDS Start-End: 55-966
cggggctctggccatataaacagagggacgcacgcccatgcggctgtagacgccatgatggatgtgtctggtgtgggtttcccaagcaaggttccttggaagaagatgtctgcagaggagctggagaatcagtactgtcccagccgatgggttgtccgactgggagcagaggaagccttgaggacctactcacagataggaattgaagccaccacaagggcccgggccaccaggaagagcctgctgcatgtcccctatggagacggcgaaggggagaaagtggacatttacttccccgacgagtcgtctgaagccttgcctttcttcctgttctttcacggaggatactggcagagcggaagtaaggatgagtctgccttcatggtccacccgctgacggcacagggagtggccgtggtaatagtggcttacggcatcgcccccaaaggcaccctggaccacatggtagaccaggtgacccgcagcgttgcgtttgtccagaagcggtatccaagcaacaagggaatttacctgtgtggacactcagccggggcccacctggctgccatgatgctcctggccgactggaccaagcatggggtcacgcccaacctcagaggctttttcctggtgagtggggtctttgacctggagcccatcgtgtatacttcacagaacgttgctctccagctgaccctggaggacgctcagaggaatagcccccagctgaaggtggcccaggcacagccggtggaccccacctgccgtgtgctggtggtcgtgggccagttcgactcccccgaattccaccgacagtcctgggagttttaccagaccctgtgtcaaggagagtggaaagcctcatttgaagagctccacgatgtggaccactttgaaattgttgagaatctgacccagaaggacaacgtgctcacccagattatcttgaaaacaatcttccagtagttctgacgatacttggagcctggtccacgtgcatcccaccttgggaagcctctccaaagagctttcggagctgacactgacagcttcagtttcccccagcacccaggagagccttgctgtgtctgtctgcccggcaagagtccattctcactgctgggacactcatgaaaatctccacgtcctccctcttcccagcctggatggagctccagggctggggaacgtccgcaagtcaatgctcagagatgcccggagctgcctcttagactcgtctggcccatctacctgctgacagagcatgacaaagatgacgctcaaaagtaatgccattacttcttttttttttttttttttttttttttttgagatggagtcttactctgtcacccaggctggagtgcagtggcgtgatcttggctcactgcaacctccacctcccgggttcaagcaattctcctgcctcagcctcctgagcagctgggactacaggcgcctgccatcatgcctggctaatttttgtatttttagtagagacggggtttcaacatattggccaggctggtctcaaactcctaaccttgtgattcgcccgccttggcctcccaaagtgctgggattccaggcgtgagccactgcgcccggccagaatggcattatatttaaatagttcataaagaagcacaaaagaatattatttcataacatgtaaaaattatataaaacgtaaatttccatgttgataaataaagttgtattggaacacg

SEQ ID NO: 109026 - DNA, 647 bp, Homo sapiens
  Payload ID: 1419
  Gene Symbol: AFMID
  Gene Name: arylformamidase
  ENST ID: ENST00000588800
  CDS Start-End: 10-291
gtagacgccatgatggatgtgtctggtgtgggtttcccaagcaaggttccttggaagaagatgtctgcagaggagctggagaatcagtactgtcccagccgatgggttgtccgactgggagcagaggaagccttgaggacctactcacagataggaattgaagccttgcctttcttcctgttctttcacggaggatactggcagagcggaagaccctgtgtcaaggagagtggaaagcctcatttgaagagctccacgatgtggaccactttgaaattgttgagaatctgacccagaaggacaacgtgctcacccagattatcttgaaaacaatcttccagtagttctgacgatacttggagcctggtccacgtgcatcccaccttgggaagcctctccaaagagctttcggagctgacactgacagcttcagtttcccccagcacccaggagagccttgctgtgtctgtctgcccggcaagagtccattctcactgctgggacactcatgaaaatctccacgtcctccctcttcccagcctggatggagctccagggctggggaacgtccgcaagtcaatgctcagagatgcccggagctgcctcttagactcgtctggcccatctacctgctgacagagcatgac

SEQ ID NO: 109027 - DNA, 778 bp, Homo sapiens
  Payload ID: 1419
  Gene Symbol: AFMID
  Gene Name: arylformamidase
  ENST ID: ENST00000588199
  CDS Start-End: 10-345
gtagacgccatgatggatgtgtctggtgtgggtttcccaagcaaggttccttggaagaagatgtctgcagaggagctggagaatcagtactgtcccagccgatgggttgtccgactgggagcagaggaagccttgaggacctactcacagataggaattgaagccaccacaagggcccgggccaccaggaagagcctgctgcatgtcccctatggagacggcgaaggggagaaagtggacatttacttccccgacgagtcgtctgaagccttgcctttcttcctgttctttcacggaggatactggcagagcggaaggctttttcctggtgagtggggtctttgacctggagcccatcgtgtatacttcacagaacgttgctctccagctgaccctaccctgtgtcaaggagagtggaaagcctcatttgaagagctccacgatgtggaccactttgaaattgttgagaatctgacccagaaggacaacgtgctcacccagattatcttgaaaacaatcttccagtagttctgacgatacttggagcctggtccacgtgcatcccaccttgggaagcctctccaaagagctttcggagctgacactgacagcttcagtttcccccagcacccaggagagccttgctgtgtctgtctgcccggcaagagtccattctcactgctgggacactcatgaaaatctccacgtcctccctcttcccagcctggatggagctccagggctggggaacgtccgcaagtcaatgctcagagatgcc

SEQ ID NO: 109028 - DNA, 550 bp, Homo sapiens
  Payload ID: 1419
  Gene Symbol: AFMID
  Gene Name: arylformamidase
  ENST ID: ENST00000586731
  CDS Start-End: 22-135
agcaaggttccttggaagaagatgtctgcagaggagctggagaatcagtactgtcccagccgatgggttgtccgactgggagcagaggaagccttgaggacctactcacagataggaattgaagtccatttataggcttgagaactcctgtgtgaattaaatcacgaccttctgatgaagccactccgatgagcctgtgaggcacattgtcttcacactgtgctggggcagggttgttggcaaacccccatggatggcagccggcaatggcctcacagtgacaaatgcgtctgccttttgacccagaattctacccctgagagtgcgtcctacagatgcttgcaagtggtatggtaatggatgtacaaagctattcacagcaggggtgtttgtggtagcatggcctgggagacagcccagatggctttcagcaaaggattggtggcaggtctgcagccctggggcttatcagacaccaaccctgctggcaccttgatcttggacttccagtttgcagaactgtgagaaaataaaatttccattaagtttc

SEQ ID NO: 109029 - DNA, 631 bp, Homo sapiens
  Payload ID: 1419
  Gene Symbol: AFMID
  Gene Name: arylformamidase
  ENST ID: ENST00000591256
  CDS Start-End: 14-631
ggctgtagacgccatgatggatgtgtctggtgtgggtttcccaagcaaggttccttggaagaagatgtctgcagaggagctggagaatcagtactgtcccagccgatgggttgtccgactgggagcagaggaagccttgaggacctactcacagataggaattgaagccaccacaagggcccgggccaccaggaagagcctgctgcatgtcccctatggagacggcgaaggggagaaagtggacatttacttccccgacgagtcgtctgaagccttgcctttcttcctgttctttcacggaggatactggcagagcggaagtaaggatgagtctgccttcatggtccacccgctgacggcacagggagtggccgtggtaatagtggcttacggcatcgcccccaaaggcaccctggaccacatggtagaccaggtgacccgcagcgttgcgtttgtccagaagcggtatccaagcaacaagtgggtgttgccagtagattttcttcctgttggacctcagtgggtgggaggacagtgcaatcagtacctaggatacagccaagctgcccctctggcctgtggagcagaaagcaaattgggactcttcgaagggggcctgatgttgtgggga

SEQ ID NO: 109030 - DNA, 569 bp, Homo sapiens
  Payload ID: 1419
  Gene Symbol: AFMID
  Gene Name: arylformamidase
  ENST ID: ENST00000586542
  CDS Start-End: 8-569
agacgccatgatggatgtgtctggtgtgggtttcccaagcaaggttccttggaagaagatgtctgcagaggagctggagaatcagtactgtcccagccgatgggttgtccgactgggagcagaggaagccttgaggacctactcacagataggaattgaagccaccacaagggcccgggccaccaggaagagcctgctgcatgtcccctatggagacggcgaaggggagaaagtggacatttacttccccgacgagtcgtctgaagccttgcctttcttcctgttctttcacggaggatactggcagagcggaaggcaccctggaccacatggtagaccaggtgacccgcagcgttgcgtttgtccagaagcggtatccaagcaacaagtgggtgttgccagtagattttcttcctgttggacctcagtgggtgggaggacagtgcaatcagtacctaggatacagccaagctgcccctctggcctgtggagcagaaagcaaattgggactcttcgaagggggcctgatgttgtggggaaactgcgtgcaaatccagctctctgctctg

SEQ ID NO: 109031 - DNA, 578 bp, Homo sapiens
  Payload ID: 1419
  Gene Symbol: AFMID
  Gene Name: arylformamidase
  ENST ID: ENST00000589256
  CDS Start-End: 10-183
gtagacgccatgatggatgtgtctggtgtgggtttcccaagcaaggttccttggaagaagatgtctgcagaggagctggagaatcagtactgtcccagccgatgggttgtccgactgggagcagaggaagccttgaggacctactcacagataggaattgaaggcttgagaactcctgtgtgaattaaatcacgaccttctgatgaagccactccgatgagcctgtgaggcacattgtcttcacactgtgctggggcagggttgttggcaaacccccatggatggcagccggcaatggcctcacagtgacaaatgcgtctgccttttgacccagaattctacccctgagagtgcgtcctacagatgcttgcaagtggtatggtaatggatgtacaaagctattcacagcaggggtgtttgtggtagcatggcctgggagacagcccagatggctttcagcaaaggattggtggcaggtctgcagccctggggcttatcagacaccaaccctgctggcaccttgatcttggacttccagtttgcagaactgtgagaaaataaaatttccattaagtttc

SEQ ID NO: 109032 - DNA, 582 bp, Homo sapiens
  Payload ID: 1419
  Gene Symbol: AFMID
  Gene Name: arylformamidase
  ENST ID: ENST00000591952
  CDS Start-End: 10-264
gtagacgccatgatggatgtgtctggtgtgggtttcccaagcaaggttccttggaagaagatgtctgcagaggagctggagaatcagtactgtcccagccgatgggttgtccgactgggagcagaggaagccttgaggacctactcacagataggaattgaagattatcttgaaaacaatcttccagtagttctgacgatacttggagcctggtccacgtgcatcccaccttgggaagcctctccaaagagctttcggagctgacactgacagcttcagtttcccccagcacccaggagagccttgctgtgtctgtctgcccggcaagagtccattctcactgctgggacactcatgaaaatctccacgtcctccctcttcccagcctggatggagctccagggctggggaacgtccgcaagtcaatgctcagagatgcccggagctgcctcttagactcgtctggcccatctacctgctgacagagcatgacaaagatgacgctcaaaagtaatgccattacttcttttttttttttttttttttttttttttgagatggagtcttactctgtcacccagg

SEQ ID NO: 109033 - DNA, 577 bp, Homo sapiens
  Payload ID: 1419
  Gene Symbol: AFMID
  Gene Name: arylformamidase
  ENST ID: ENST00000589107
  CDS Start-End: 10-192
gtagacgccatgatggatgtgtctggtgtgggtttcccaagcaaggttccttggaagaagatgtctgcagaggagctggagaatcagtactgtcccagccgatgggttgtccgactgggagcagaggaagccttgaggacctactcacagataggaattgaagaaatctggacttgggaacctgtaaactagtgaagtcttaaggtccatttccatctctaccctgtatctgcaaagtgctgtaccacgatctgaacacctggtaatgcatccgtgctgggatggggagcaggccccgaggaggaagtgtagccaccacaagggcccgggccaccaggaagagcctgctgcatgtcccctatggagacggcgaaggggagaaagtggacatttacttccccgacgagtcgtctgaagccttgcctttcttcctgttctttcacggaggatactggcagagcggaagtaaggatgagtctgccttcatggtccacccgctgacggcacagggagtggccgtggtaatagtggcttacggcatcgcccccaaaggcaccctggaccacatggtagacca

SEQ ID NO: 109034 - DNA, 6558 bp, Homo sapiens
  Payload ID: 1420
  Gene Symbol: ARNT2
  Gene Name: aryl-hydrocarbon receptor nuclear translocator 2
  Uniprot ID: Q9HBZ2
  ENST ID: ENST00000303329
  CDS Start-End: 166-2319
cggccgcggcggcggggagagcggagggagcgccgcccgcccgcgccgtcctttgtgtggcggcggcggcgcctgggcctgaccgggtccccggggctgagcgccgggctccgcgccgcccctcccgcgcccctgccaagcgggcgcctatcctctccgagcaagatggcaaccccggcggcggtcaaccctccggaaatggcttcagacatacctggatctgtgacgttgcccgttgcccccatggcggccaccggacaggtgaggatggcgggggccatgcctgcccgtggaggaaagcggcgttccggaatggacttcgatgatgaagatggtgaaggccccagtaaattttcaagagagaatcatagtgaaatcgaaaggcgcagacggaacaagatgactcagtacatcacggagctctccgacatggtccccacatgcagcgcactggctcggaagccagacaagctcaccatcctccgcatggccgtctcgcacatgaagtccatgaggggtacagggaacaagtccaccgatggcgcgtacaagccttccttcctcacagagcaggaactgaagcatctcatccttgaagcagctgatggatttctgtttgtggtggctgctgagacagggcgagtgatttatgtgtctgactccgtcacccctgttctgaaccagccccagtcagagtggtttgggagcacactgtatgaacaggtgcatcctgatgacgtggagaagctgagagagcaactgtgcacctcagaaaactcaatgacaggccggatcttggacctgaagactgggacggtcaagaaagaagggcagcagtcatccatgaggatgtgcatgggctcgcggcggtctttcatctgcaggatgaggtgtggaaatgctcctttggaccaccttcctctaaacagaataaccaccatgaggaaaaggttcaggaatggccttggccctgtgaaagaaggagaagcccaatatgctgtggtccactgtacaggatacatcaaggcctggccaccagcaggaatgaccatacctgaagaagacgctgatgtgggacaaggcagtaaatattgcctcgtggcaattgggagactccaggtgaccagctctcctgtatgcatggacatgaatgggatgtcggtgcccacagagttcttatcccggcataactccgatggaatcatcacatttgtggatccaagatgtatcagtgtgattggctaccaaccccaggatcttctgggaaaggacattttggaattctgccaccctgaggatcaaagccatctgcgtgagagcttccagcaggtggttaagctgaaaggccaagtcctgtcggtcatgtatcgatttcgcaccaagaaccgggagtggatgttgatccgcaccagcagcttcacattccagaatccctattctgatgagattgagtacatcatctgcaccaacaccaacgtcaagcaacttcagcaacagcaggcagaattggaagtgcaccagagagatggattgtcatcgtatgacttatcccaggtccccgtccccaacctaccagccggtgttcatgaggccgggaagtccgtggaaaaggcggatgcaatcttctcccaggaaagagatcctcggtttgctgaaatgtttgcaggaattagtgcatcggagaagaagatgatgagctcagcctctgcagcaggaacccagcagatctactcccaaggaagcccatttccctctggacactccgggaaggccttcagctcttcagtggttcatgtgcctggagtgaatgatattcagtcctcttcttccacgggccagaacatgtcccaaatctcccggcagctaaaccagagtcaggtggcatggacagggagtcgtccgccctttccgggacagcaaatcccatctcagtccagcaagactcagtcatctccctttgggattggaacgagccacacctacccggcagacccctcttcctacagccccctctccagcccagctacctcctcgccaagtgggaatgcctactccagtcttgccaacaggactccagggttcgctgaaagtggacaaagtagcgggcagttccaagggcggccctcggaagtctggtcgcagtggcaaagccagcaccatggccagcagagcggtgagcagcactcccaccagcagcccggtcagactgaagtgttccaggacatgctgcccatgccaggagatccaacccaggggactggcaactataacatcgaagactttgccgacctgggcatgtttccaccgttttctgagtagctgcggccagagtgaggctcctgctgtacagtgccacccatactgtgatgtcgatgcccatgtgaatgaggcccaccctcgccctgcttgccctgccgcaggccccccaccagaagccatctcccccgctgtgtgtccccaggcgcatcattgctccactctcccctgcagccgcggctgctcggccactgaccaggggccctggcagacattaggggatcagttgtatttattgtattttatctgtgtgtgctcaggaggtgagcctagtgggtccttaagtttggttgtgaataatctcttgatagacaatttatacccatgaaagttcagccaatgcccagagtgaccaagcagcaccagcaggcctgcccaggatgctgaaagcagatttcttcttgatttcacttctgatggatgcatggggctctgggggaatgctgggaaaatgggcaagcagagtgcacagccctcgttctgccagctggagccaagaagcacagagacacagaggcgcctgcccctcagctccgctggtctgtctgtgcatccactgtgccgtgggacatatgtaatttgtgcagtgtgacatggacttgctgtcctaatggatgtgttgtgccttgtgtctgtcatgtgtggccagcgtgattgtatagaatccagagtatgtagagagccaaaatgtgtggccctgtccccaagctcagcaccaccggccatgaccagaggttgctcggcccagggtctgggagctgggctaacaggctgacacttcggcagggtcaccaggaggcacagctaggggcatgctcacatgggtaggtcagttctttggtccaagcctctggtgcagattcaagctcctcctcttagaggaagcagctccttcctcccacaggagccccaagggagcactcaccctcctcccaattggatctgaatagctgtgttcctgatcccacataagcatgtctcatccttgccccactggtgagaggaggaccttgtgcctgcccagagcctgcaggacagcacgccttgaggtcagaggcctggcccttctttacagatgtagatagcagggtaggacgcccaggccttctcacatgggcaccatgaaacactttcttccaggccacctgagccttcgttcttcagcccgactggaggaacagcagctctgggaggcacagagtgcaggtctcaggggcagaagacatgggttccagttctggttctgccacacacccaccggccttgaatttctctggtggtctcaagacaagaacaagagctgactctagaatcttctgcctggctgacctctgagcccatgatccctggcttgctgtgcttctcttggatttgaggagagtttatgaatccatccccctgttttcagggacctctgccttctcccacaccccttacactagtgaggactccttcggcctcttgtgtttccttccttttgtgaccattacgccccctccctgtttcttatcaccagcccatcagcccactgactcccatatggtagaaaaggtaccgtggctgctgcagggcacatggagggacctaccctctgggaaagcccttgtgtccctcccagagtccttcaggtaggccctcgcagatgctgcttgctcagaaacaacccgtgcatccctgcccatggattctgcaggacctagaagagtggcattggttctaggaacctgagagtggagtgaggccagcatgcaggaaggagtttggagagagtgtttgctgtgatccattgaaagctccacattaaaccccagccctgtctggccagggagatccatgtgctcaatgttgctgggggacctacaaaagtcaaacattgctcagtaaaatgcctttggctggtcgccagctgtgcatgactgcagttcctagactctaacttaaccccaactttgcagtttctagagctttttgtctgtaatggtgattgggtctccactgtagatgcatgcagtgttcactccaacctcagaggctttcttgcttctggggaaatggcaggtggttgaaaccctgcacatcctcccagggccagccccagaatgggcctttctctgcctgccctgcccttggggccacctctgcctccagcaggcttgagcttgccccaggccttgggcataattatttccccccaaaaaaggcacaaaaataggttttggatcaaagaagtgtttctcagtgaaatgaaaacagtctttttatagcctttagcttgtgagtttggaagtttggggggtcttatgtttgttttgcctcttctgtttcttggaggagagttgaggcttttcttaggtgcatacacagacccaggtgaacacgctgactgtgaacctgccctgtatccggagctgtgctgggcactgaggggatgcaacaaaattaggagaggatccttgctcccaacgtctacttctcctacctcaacaggggtccagggtgcagtgaactcagttcttggcccttgggtgaggattcatggatgaatgaaagctagacctgatggggaggcattatgactaaataggcccagcctccttcccttccagctctgtcctaggagcataggcgggaaatctgagtagagtctgactgcagtttttgcttatgatttgtaaaagccgtcatggggtcaataagaaaataggggtgatggagggggagaagcccaggactgggagaatcgcacatgccccaggggttttcaccaaggattttcaagacaaactggagtaagaattaaagccccagaggatttaattatcctggtttgcaaaagagcctcccatgccagtaccgcccagccttggaggccggaatgctcatggcccctgtggtctgcttgtccttcagcccatgcccagcagatacctctctgactggagacgggctcaaagctggattagaaaggggagaggcacttgtgactttgtttgactctgtgactcacttcctcgctcacaccttgtttgaactactggactttcaactggctttccttaggtcaggcaagcagacagctccccactgaagaggtctgtacagtgacaacccgggccggcagcaaggacacagatgcagccacagtaaggctccatcaggactgggtcagtgatggcaacaggatggccaaggatggctctagaacactctgtccatgcgtcactccccccagttttatttttagctttggcttcagggagtgacagccatcacaaatagccacattctgctctactctccaacataccagattctacactgttgttatttcatgagacgtgaatgttgcagagagtggggggattctggttgttaaggaacttacactggggagctttactcttccgtgtcaacaatgtgactacatgttctccagattagccacacatgcaaacatcagtgtccttctagctttagccgagaaagaaaccagtcccagggaatgaatggtggtctccccactcccggcagcactttaggcagcccataagctatgcgagaatgtgaacgctcaccttgctccgtcacggttctgacctaccacataaacaggaagaagccagtgaccggaacagctctaggaataacaagtcagaatagaagtgtcctttatattaccagaaaatatgggcttggcctaagtcgctgtctcctaacctgccggggtcattccccaccaaacaccccatactaaggagccatgagccacctggacattcaccttttctttgaccatctggagtctggggcaacttaaggaggcaccacacagtggtgcaggcacatttccaagcgtaggtgtccctggcttttgtggccaaagctagtgttatggtcaacaacaggccagggtctgtggggcactgaccttgaaagtggcaaaatggaggtttcacaggctgtgcgggagcaggacggcttgcttcatctaacaatctcagtttcctttaaaaaaagaaagaaaggaaaagatttcataagcaggtgtcagtggacagtttaagtacttaaccatttctctttcttcttatggatgtgaactgtgctgtggataaatcatttgtatttcttgaatgttctctatgactaacagttattaagtcggttgtgtatatgtgtaactaatgtaactgccttttaaaatttcattacaataaaaatgactttgctctgaacaacaaa

SEQ ID NO: 109035 - DNA, 585 bp, Homo sapiens
  Payload ID: 1420
  Gene Symbol: ARNT2
  Gene Name: aryl-hydrocarbon receptor nuclear translocator 2
  ENST ID: ENST00000525103
  CDS Start-End: 196-585
gacattttctcagcagaatacaaatgcagctacatttcctcccagaggtttctgacatttcttctacacggataacagattctcctaagaaggtgttggtcacaaggaagaaagatctttgtttaatccctctgaaaaggccggatcttggacctgaagactgggacggtcaagaaagaagggcagcagtcatccatgaggatgtgcatgggctcgcggcggtctttcatctgcaggatgaggtgtggaaatgctcctttggaccaccttcctctaaacagaataaccaccatgaggaaaaggttcaggaatggccttggccctgtgaaagaaggagaagcccaatatgctgtggtccactgtacaggatacatcaaggcctggccaccagcaggaatgaccatacctgaagaagacgctgatgtgggacaaggcagtaaatattgcctcgtggcaattgggagactccaggtgaccagctctcctgtatgcatggacatgaatgggatgtcggtgcccacagagttcttatcccggcataactccgatggaatcatcacatttgtggatccaagatgtatcagt

SEQ ID NO: 109036 - DNA, 6690 bp, Homo sapiens
  Payload ID: 1420
  Gene Symbol: ARNT2
  Gene Name: aryl-hydrocarbon receptor nuclear translocator 2
  Uniprot ID: Q9HBZ2
  ENST ID: ENST00000533983
  CDS Start-End: 340-2460
atctgtgatgacattttctcagcagaatacaaatgcagctacatttcctcccagaggtttctgacatttcttctacacggataacagattctcctaagaaggtgttggtcacaaggaagaaagatctttgtttaatccctctgaaaagtgtaggaggatcaggtgaccaaggttttttagaattttccctttttgggatctgacgccgacacactattttgaggcagtgacatcatctctttcctctggcgtgccctccttgcggctccatcattcaggccttgtcatctctcacctggactgctgtgaccttcattcattcccaggagaagtccagaaatggcttcagacatacctggatctgtgacgttgcccgttgcccccatggcggccaccggacaggtgaggatggcgggggccatgcctgcccgtggaggaaagcggcgttccggaatggacttcgatgatgaagatggtgaaggccccagtaaattttcaagagagaatcatagtgaaatcgaaaggcgcagacggaacaagatgactcagtacatcacggagctctccgacatggtccccacatgcagcgcactggctcggaagccagacaagctcaccatcctccgcatggccgtctcgcacatgaagtccatgaggggtacagggaacaagtccaccgatggcgcgtacaagccttccttcctcacagagcaggaactgaagcatctcatccttgaagcagctgatggatttctgtttgtggtggctgctgagacagggcgagtgatttatgtgtctgactccgtcacccctgttctgaaccagccccagtcagagtggtttgggagcacactgtatgaacaggtgcatcctgatgacgtggagaagctgagagagcaactgtgcacctcagaaaactcaatgacaggccggatcttggacctgaagactgggacggtcaagaaagaagggcagcagtcatccatgaggatgtgcatgggctcgcggcggtctttcatctgcaggatgaggtgtggaaatgctcctttggaccaccttcctctaaacagaataaccaccatgaggaaaaggttcaggaatggccttggccctgtgaaagaaggagaagcccaatatgctgtggtccactgtacaggatacatcaaggcctggccaccagcaggaatgaccatacctgaagaagacgctgatgtgggacaaggcagtaaatattgcctcgtggcaattgggagactccaggtgaccagctctcctgtatgcatggacatgaatgggatgtcggtgcccacagagttcttatcccggcataactccgatggaatcatcacatttgtggatccaagatgtatcagtgtgattggctaccaaccccaggatcttctgggaaaggacattttggaattctgccaccctgaggatcaaagccatctgcgtgagagcttccagcaggtggttaagctgaaaggccaagtcctgtcggtcatgtatcgatttcgcaccaagaaccgggagtggatgttgatccgcaccagcagcttcacattccagaatccctattctgatgagattgagtacatcatctgcaccaacaccaacgtcaagcaacttcagcaacagcaggcagaattggaagtgcaccagagagatggattgtcatcgtatgacttatcccaggtccccgtccccaacctaccagccggtgttcatgaggccgggaagtccgtggaaaaggcggatgcaatcttctcccaggaaagagatcctcggtttgctgaaatgtttgcaggaattagtgcatcggagaagaagatgatgagctcagcctctgcagcaggaacccagcagatctactcccaaggaagcccatttccctctggacactccgggaaggccttcagctcttcagtggttcatgtgcctggagtgaatgatattcagtcctcttcttccacgggccagaacatgtcccaaatctcccggcagctaaaccagagtcaggtggcatggacagggagtcgtccgccctttccgggacagcaaatcccatctcagtccagcaagactcagtcatctccctttgggattggaacgagccacacctacccggcagacccctcttcctacagccccctctccagcccagctacctcctcgccaagtgggaatgcctactccagtcttgccaacaggactccagggttcgctgaaagtggacaaagtagcgggcagttccaagggcggccctcggaagtctggtcgcagtggcaaagccagcaccatggccagcagagcggtgagcagcactcccaccagcagcccggtcagactgaagtgttccaggacatgctgcccatgccaggagatccaacccaggggactggcaactataacatcgaagactttgccgacctgggcatgtttccaccgttttctgagtagctgcggccagagtgaggctcctgctgtacagtgccacccatactgtgatgtcgatgcccatgtgaatgaggcccaccctcgccctgcttgccctgccgcaggccccccaccagaagccatctcccccgctgtgtgtccccaggcgcatcattgctccactctcccctgcagccgcggctgctcggccactgaccaggggccctggcagacattaggggatcagttgtatttattgtattttatctgtgtgtgctcaggaggtgagcctagtgggtccttaagtttggttgtgaataatctcttgatagacaatttatacccatgaaagttcagccaatgcccagagtgaccaagcagcaccagcaggcctgcccaggatgctgaaagcagatttcttcttgatttcacttctgatggatgcatggggctctgggggaatgctgggaaaatgggcaagcagagtgcacagccctcgttctgccagctggagccaagaagcacagagacacagaggcgcctgcccctcagctccgctggtctgtctgtgcatccactgtgccgtgggacatatgtaatttgtgcagtgtgacatggacttgctgtcctaatggatgtgttgtgccttgtgtctgtcatgtgtggccagcgtgattgtatagaatccagagtatgtagagagccaaaatgtgtggccctgtccccaagctcagcaccaccggccatgaccagaggttgctcggcccagggtctgggagctgggctaacaggctgacacttcggcagggtcaccaggaggcacagctaggggcatgctcacatgggtaggtcagttctttggtccaagcctctggtgcagattcaagctcctcctcttagaggaagcagctccttcctcccacaggagccccaagggagcactcaccctcctcccaattggatctgaatagctgtgttcctgatcccacataagcatgtctcatccttgccccactggtgagaggaggaccttgtgcctgcccagagcctgcaggacagcacgccttgaggtcagaggcctggcccttctttacagatgtagatagcagggtaggacgcccaggccttctcacatgggcaccatgaaacactttcttccaggccacctgagccttcgttcttcagcccgactggaggaacagcagctctgggaggcacagagtgcaggtctcaggggcagaagacatgggttccagttctggttctgccacacacccaccggccttgaatttctctggtggtctcaagacaagaacaagagctgactctagaatcttctgcctggctgacctctgagcccatgatccctggcttgctgtgcttctcttggatttgaggagagtttatgaatccatccccctgttttcagggacctctgccttctcccacaccccttacactagtgaggactccttcggcctcttgtgtttccttccttttgtgaccattacgccccctccctgtttcttatcaccagcccatcagcccactgactcccatatggtagaaaaggtaccgtggctgctgcagggcacatggagggacctaccctctgggaaagcccttgtgtccctcccagagtccttcaggtaggccctcgcagatgctgcttgctcagaaacaacccgtgcatccctgcccatggattctgcaggacctagaagagtggcattggttctaggaacctgagagtggagtgaggccagcatgcaggaaggagtttggagagagtgtttgctgtgatccattgaaagctccacattaaaccccagccctgtctggccagggagatccatgtgctcaatgttgctgggggacctacaaaagtcaaacattgctcagtaaaatgcctttggctggtcgccagctgtgcatgactgcagttcctagactctaacttaaccccaactttgcagtttctagagctttttgtctgtaatggtgattgggtctccactgtagatgcatgcagtgttcactccaacctcagaggctttcttgcttctggggaaatggcaggtggttgaaaccctgcacatcctcccagggccagccccagaatgggcctttctctgcctgccctgcccttggggccacctctgcctccagcaggcttgagcttgccccaggccttgggcataattatttccccccaaaaaaggcacaaaaataggttttggatcaaagaagtgtttctcagtgaaatgaaaacagtctttttatagcctttagcttgtgagtttggaagtttggggggtcttatgtttgttttgcctcttctgtttcttggaggagagttgaggcttttcttaggtgcatacacagacccaggtgaacacgctgactgtgaacctgccctgtatccggagctgtgctgggcactgaggggatgcaacaaaattaggagaggatccttgctcccaacgtctacttctcctacctcaacaggggtccagggtgcagtgaactcagttcttggcccttgggtgaggattcatggatgaatgaaagctagacctgatggggaggcattatgactaaataggcccagcctccttcccttccagctctgtcctaggagcataggcgggaaatctgagtagagtctgactgcagtttttgcttatgatttgtaaaagccgtcatggggtcaataagaaaataggggtgatggagggggagaagcccaggactgggagaatcgcacatgccccaggggttttcaccaaggattttcaagacaaactggagtaagaattaaagccccagaggatttaattatcctggtttgcaaaagagcctcccatgccagtaccgcccagccttggaggccggaatgctcatggcccctgtggtctgcttgtccttcagcccatgcccagcagatacctctctgactggagacgggctcaaagctggattagaaaggggagaggcacttgtgactttgtttgactctgtgactcacttcctcgctcacaccttgtttgaactactggactttcaactggctttccttaggtcaggcaagcagacagctccccactgaagaggtctgtacagtgacaacccgggccggcagcaaggacacagatgcagccacagtaaggctccatcaggactgggtcagtgatggcaacaggatggccaaggatggctctagaacactctgtccatgcgtcactccccccagttttatttttagctttggcttcagggagtgacagccatcacaaatagccacattctgctctactctccaacataccagattctacactgttgttatttcatgagacgtgaatgttgcagagagtggggggattctggttgttaaggaacttacactggggagctttactcttccgtgtcaacaatgtgactacatgttctccagattagccacacatgcaaacatcagtgtccttctagctttagccgagaaagaaaccagtcccagggaatgaatggtggtctccccactcccggcagcactttaggcagcccataagctatgcgagaatgtgaacgctcaccttgctccgtcacggttctgacctaccacataaacaggaagaagccagtgaccggaacagctctaggaataacaagtcagaatagaagtgtcctttatattaccagaaaatatgggcttggcctaagtcgctgtctcctaacctgccggggtcattccccaccaaacaccccatactaaggagccatgagccacctggacattcaccttttctttgaccatctggagtctggggcaacttaaggaggcaccacacagtggtgcaggcacatttccaagcgtaggtgtccctggcttttgtggccaaagctagtgttatggtcaacaacaggccagggtctgtggggcactgaccttgaaagtggcaaaatggaggtttcacaggctgtgcgggagcaggacggcttgcttcatctaacaatctcagtttcctttaaaaaaagaaagaaaggaaaagatttcataagcaggtgtcagtggacagtttaagtacttaaccatttctctttcttcttatggatgtgaactgtgctgtggataaatcatttgtatttcttgaatgttctctatgactaacagttattaagtcggttgtgtatatgtgtaactaatgtaactgccttttaaaatttcattacaataaaaatgactttgctctg

SEQ ID NO: 109037 - DNA, 2458 bp, Homo sapiens
  Payload ID: 1420
  Gene Symbol: ARNT2
  Gene Name: aryl-hydrocarbon receptor nuclear translocator 2
  Uniprot ID: Q9HBZ2
  ENST ID: ENST00000527771
  CDS Start-End: 143-2263
tgacattttctcagcagaatacaaatgcagctacatttcctcccagaggtttctgacatttcttctacacggataacagattctcctaagaaggtgttggtcacaaggaagaaagatctttgtttaatccctctgaaaagaaatggcttcagacatacctggatctgtgacgttgcccgttgcccccatggcggccaccggacaggtgaggatggcgggggccatgcctgcccgtggaggaaagcggcgttccggaatggacttcgatgatgaagatggtgaaggccccagtaaattttcaagagagaatcatagtgaaatcgaaaggcgcagacggaacaagatgactcagtacatcacggagctctccgacatggtccccacatgcagcgcactggctcggaagccagacaagctcaccatcctccgcatggccgtctcgcacatgaagtccatgaggggtacagggaacaagtccaccgatggcgcgtacaagccttccttcctcacagagcaggaactgaagcatctcatccttgaagcagctgatggatttctgtttgtggtggctgctgagacagggcgagtgatttatgtgtctgactccgtcacccctgttctgaaccagccccagtcagagtggtttgggagcacactgtatgaacaggtgcatcctgatgacgtggagaagctgagagagcaactgtgcacctcagaaaactcaatgacaggccggatcttggacctgaagactgggacggtcaagaaagaagggcagcagtcatccatgaggatgtgcatgggctcgcggcggtctttcatctgcaggatgaggtgtggaaatgctcctttggaccaccttcctctaaacagaataaccaccatgaggaaaaggttcaggaatggccttggccctgtgaaagaaggagaagcccaatatgctgtggtccactgtacaggatacatcaaggcctggccaccagcaggaatgaccatacctgaagaagacgctgatgtgggacaaggcagtaaatattgcctcgtggcaattgggagactccaggtgaccagctctcctgtatgcatggacatgaatgggatgtcggtgcccacagagttcttatcccggcataactccgatggaatcatcacatttgtggatccaagatgtatcagtgtgattggctaccaaccccaggatcttctgggaaaggacattttggaattctgccaccctgaggatcaaagccatctgcgtgagagcttccagcaggtggttaagctgaaaggccaagtcctgtcggtcatgtatcgatttcgcaccaagaaccgggagtggatgttgatccgcaccagcagcttcacattccagaatccctattctgatgagattgagtacatcatctgcaccaacaccaacgtcaagcaacttcagcaacagcaggcagaattggaagtgcaccagagagatggattgtcatcgtatgacttatcccaggtccccgtccccaacctaccagccggtgttcatgaggccgggaagtccgtggaaaaggcggatgcaatcttctcccaggaaagagatcctcggtttgctgaaatgtttgcaggaattagtgcatcggagaagaagatgatgagctcagcctctgcagcaggaacccagcagatctactcccaaggaagcccatttccctctggacactccgggaaggccttcagctcttcagtggttcatgtgcctggagtgaatgatattcagtcctcttcttccacgggccagaacatgtcccaaatctcccggcagctaaaccagagtcaggtggcatggacagggagtcgtccgccctttccgggacagcaaatcccatctcagtccagcaagactcagtcatctccctttgggattggaacgagccacacctacccggcagacccctcttcctacagccccctctccagcccagctacctcctcgccaagtgggaatgcctactccagtcttgccaacaggactccagggttcgctgaaagtggacaaagtagcgggcagttccaagggcggccctcggaagtctggtcgcagtggcaaagccagcaccatggccagcagagcggtgagcagcactcccaccagcagcccggtcagactgaagtgttccaggacatgctgcccatgccaggagatccaacccaggggactggcaactataacatcgaagactttgccgacctgggcatgtttccaccgttttctgagtagctgcggccagagtgaggctcctgctgtacagtgccacccatactgtgatgtcgatgcccatgtgaatgaggcccaccctcgccctgcttgccctgccgcaggccccccaccagaagccatctcccccgctgtgtgtccccaggcgcatcattgctccactctcccctgcagccgcggctgctcggccactgacca

SEQ ID NO: 109038 - DNA, 2932 bp, Homo sapiens
  Payload ID: 1420
  Gene Symbol: ARNT2
  Gene Name: aryl-hydrocarbon receptor nuclear translocator 2
  ENST ID: ENST00000622346
  CDS Start-End: 116-2266
ctttgtgtggcggcggcggcgcctgggcctgaccgggtccccggggctgagcgccgggctccgcgccgcccctcccgcgcccctgccaagcgggcgcctatcctctccgagcaagatggcaaccccggcggcggtcaaccctccggaaatggcttcagacatacctggatctgtgacgttgcccgttgcccccatggcggccaccggacaggtgaggatggcgggggccatgcctgcccgtggaggaaagcggcgttccggaatggacttcgatgatgaagatggtgaaggccccagtaaattttcaagagagaatcatagtgaaatcgaaaggcgcagacggaacaagatgactcagtacatcacggagctctccgacatggtccccacatgcagcgcactggctcggaagccagacaagctcaccatcctccgcatggccgtctcgcacatgaagtccatgaggggtacagggaacaagtccaccgatggcgcgtacaagccttccttcctcacagagcaggaactgaagcatctcatccttgaagcagctgatggatttctgtttgtggtggctgctgagacagggcgagtgatttatgtgtctgactccgtcacccctgttctgaaccagccccagtcagagtggtttgggagcacactgtatgaacaggtgcatcctgatgacgtggagaagctgagagagcaactgtgcacctcagaaaactcaatgacaggccggatcttggacctgaagactgggacggtcaagaaagaagggcagcagtcatccatgaggatgtgcatgggctcgcggcggtctttcatctgcaggatgaggtgtggaaatgctcctttggaccaccttcctctaaacagaataaccaccatgaggaaaaggttcaggaatggccttggccctgtgaaagaaggagaagcccaatatgctgtggtccactgtacaggatacatcaaggcctggccaccagcaggaatgaccatacctgaagaagacgctgatgtgggacaaggcagtaaatattgcctcgtggcaattgggagactccaggtgaccagctctcctgtatgcatggacatgaatgggatgtcggtgcccacagagttcttatcccggcataactccgatggaatcatcacatttgtggatccaagatgtatcagtgtgattggctaccaaccccaggatcttctgggaaaggacattttggaattctgccaccctgaggatcaaagccatctgcgtgagagcttccagcaggtggttaagctgaaaggccaagtcctgtcggtcatgtatcgatttcgcaccaagaaccgggagtggatgttgatccgcaccagcagcttcacattccagaatccctattctgatgagattgagtacatcatctgcaccaacaccaacgtcaagcaacttcagcaacagcaggcagaattggaagtgcaccagagagatggattgtcatcgtatgacttatcccaggtccccgtccccaacctaccagccggtgttcatgaggccgggaagtccgtggaaaaggcggatgcaatcttctcccaggaaagagatcctcggtttgctgaaatgtttgcaggaattagtgcatcggagaagaagatgatgagctcagcctctgcagcaggaacccagcagatctactcccaaggaagcccatttccctctggacactccgggaaggccttcagctcttcagtggttcatgtgcctggagtgaatgatattcagtcctcttcttccacgggccagaacatgtcccaaatctcccggcagctaaaccagagtcaggtggcatggacagggagtcgtccgccctttccgggacagcaaatcccatctcagtccagcaagactcagtcatctccctttgggattggaacgagccacacctacccggcagacccctcttcctacagccccctctccagcccagctacctcctcgccaagtgggaatgcctactccagtcttgccaacaggactccagggttcgctgaaagtggacaaagtagcgggcagttccaagggcggccctcggaagtctggtcgcagtggcaaagccagcaccatggccagcagagcggtgagcagcactcccaccagcagcccggtcagactgaagtgttccaggacatgctgcccatgccaggagatccaaggaatgaatggtggtctccccactcccggcagcactttaggcagcccataagctatgcgagaatgtgaacgctcaccttgctccgtcacggttctgacctaccacataaacaggaagaagccagtgaccggaacagctctaggaataacaagtcagaatagaagtgtcctttatattaccagaaaatatgggcttggcctaagtcgctgtctcctaacctgccggggtcattccccaccaaacaccccatactaaggagccatgagccacctggacattcaccttttctttgaccatctggagtctggggcaacttaaggaggcaccacacagtggtgcaggcacatttccaagcgtaggtgtccctggcttttgtggccaaagctagtgttatggtcaacaacaggccagggtctgtggggcactgaccttgaaagtggcaaaatggaggtttcacaggctgtgcgggagcaggacggcttgcttcatctaacaatctcagtttcctttaaaaaaagaaagaaaggaaaagatttcataagcaggtgtcagtggacagtttaagtacttaaccatttctctttcttcttatggatgtgaactgtgctgtggataaatcatttgtatttcttgaatgttctctatgactaacagttattaagtcggttgtgtatatgtgtaactaatgtaactgccttttaaaatttcattacaataaaaatgactttgctctg

SEQ ID NO: 109039 - DNA, 6409 bp, Homo sapiens
  Payload ID: 1420
  Gene Symbol: ARNT2
  Gene Name: aryl-hydrocarbon receptor nuclear translocator 2
  ENST ID: ENST00000610490
  CDS Start-End: 27-1727
gcgggcgcctatcctctccgagcaagatggcaaccccggcggcggtcaaccctccggaaatggcttcagacatacctggatctgtgacgttgcccgttgcccccatggcggccaccggacaggtgaggatggcgggggccatgcctgcccgtggaggaaagcggcgttccggaatggacttcgatgatgaagatggtgaaggccccagtaaattttcaagagagaatcatagtgaaatcgaaaggcgcagacggaacaagatgactcagtacatcacggagctctccgacatggtccccacatgcagcgcactggctcggaagccagacaagctcaccatcctccgcatggccgtctcgcacatgaagtccatgaggggtacagggaacaagtccaccgatggcgcgtacaagccttccttcctcacagagcaggaactgaagcatctcatccttgaagcagctgatggatttctgtttgtggtggctgctgagacagggcgagtgatttatgtgtctgactccgtcacccctgttctgaaccagccccagtcagagtggtttgggagcacactgtatgaacaggtgcatcctgatgacgtggagaagctgagagagcaactgtgcacctcagaaaactcaatgacaggccggatcttggacctgaagactgggacggtcaagaaagaagggcagcagtcatccatgaggatgtgcatgggctcgcggcggtctttcatctgcaggatgaggtgtggaaatgctcctttggaccaccttcctctaaacagaataaccaccatgaggaaaaggttcaggaatggccttggccctgtgaaagaaggagaagcccaatatgctgtggtccactgtacaggatacatcaaggcctggccaccagcaggaatgaccatacctgaagaagacgctgatgtgggacaaggcagtaaatattgcctcgtggcaattgggagactccaggtgaccagctctcctgtatgcatggacatgaatgggatgtcggtgcccacagagttcttatcccggcataactccgatggaatcatcacatttgtggatccaagatgtatcagtgtgattggctaccaaccccaggatcttctgggaaaggacattttggaattctgccaccctgaggatcaaagccatctgcgtgagagcttccagcaggtggttaagctgaaaggccaagtcctgtcggtcatgtatcgatttcgcaccaagaaccgggagtggatgttgatccgcaccagcagcttcacattccagaatccctattctgatgagattgagtacatcatctgcaccaacaccaacgtcaagcaacttcagcaacagcaggcagaattggaagtgcaccagagagatggattgtcatcgtatgacttatcccaggtccccgtccccaacctaccagccggtgttcatgaggccgggaagtccgtggaaaaggcggatgcaatcttctcccaggaaagagatcctcggtttgctgaaatgtttgcaggaattagtgcatcggagaagaagatgatgagctcagcctctgcagcaggaacccagcagatctactcccaaggaagcccatttccctctggacactccgggaaggccttcagctcttcagtggttcatgtgcctggagtgaatgatattcagtcctcttcttccacgggccagaacatgtcccaaatctccggcagctaaaccagagtcaggtggcatggacagggagtcgtccgccctttccgggacagcaaatcccatctcagtccagcaagactcagtcatctccctttgggattggaacgagccacacctacccggcagacccctcttcctacagccccctctccagcccagctacctcctcgccaagtgggaatgcctactccagtcttgccaacaggactccagggttcgctgaaagtggacaaagtagcgggcagttccaagggcggccctcggaagtctggtcgcagtggcaaagccagcaccatggccagcagagcggtgagcagcactcccaccagcagcccggtcagactgaagtgttccaggacatgctgcccatgccaggagatccaacccaggggactggcaactataacatcgaagactttgccgacctgggcatgtttccaccgttttctgagtagctgcggccagagtgaggctcctgctgtacagtgccacccatactgtgatgtcgatgcccatgtgaatgaggcccaccctcgccctgcttgccctgccgcaggccccccaccagaagccatctcccccgctgtgtgtccccaggcgcatcattgctccactctcccctgcagccgcggctgctcggccactgaccaggggccctggcagacattaggggatcagttgtatttattgtattttatctgtgtgtgctcaggaggtgagcctagtgggtccttaagtttggttgtgaataatctcttgatagacaatttatacccatgaaagttcagccaatgcccagagtgaccaagcagcaccagcaggcctgcccaggatgctgaaagcagatttcttcttgatttcacttctgatggatgcatggggctctgggggaatgctgggaaaatgggcaagcagagtgcacagccctcgttctgccagctggagccaagaagcacagagacacagaggcgcctgcccctcagctccgctggtctgtctgtgcatccactgtgccgtgggacatatgtaatttgtgcagtgtgacatggacttgctgtcctaatggatgtgttgtgccttgtgtctgtcatgtgtggccagcgtgattgtatagaatccagagtatgtagagagccaaaatgtgtggccctgtccccaagctcagcaccaccggccatgaccagaggttgctcggcccagggtctgggagctgggctaacaggctgacacttcggcagggtcaccaggaggcacagctaggggcatgctcacatgggtaggtcagttctttggtccaagcctctggtgcagattcaagctcctcctcttagaggaagcagctccttcctcccacaggagccccaagggagcactcaccctcctcccaattggatctgaatagctgtgttcctgatcccacataagcatgtctcatccttgccccactggtgagaggaggaccttgtgcctgcccagagcctgcaggacagcacgccttgaggtcagaggcctggcccttctttacagatgtagatagcagggtaggacgcccaggccttctcacatgggcaccatgaaacactttcttccaggccacctgagccttcgttcttcagcccgactggaggaacagcagctctgggaggcacagagtgcaggtctcaggggcagaagacatgggttccagttctggttctgccacacacccaccggccttgaatttctctggtggtctcaagacaagaacaagagctgactctagaatcttctgcctggctgacctctgagcccatgatccctggcttgctgtgcttctcttggatttgaggagagtttatgaatccatccccctgttttcagggacctctgccttctcccacaccccttacactagtgaggactccttcggcctcttgtgtttccttccttttgtgaccattacgccccctccctgtttcttatcaccagcccatcagcccactgactcccatatggtagaaaaggtaccgtggctgctgcagggcacatggagggacctaccctctgggaaagcccttgtgtccctcccagagtccttcaggtaggccctcgcagatgctgcttgctcagaaacaacccgtgcatccctgcccatggattctgcaggacctagaagagtggcattggttctaggaacctgagagtggagtgaggccagcatgcaggaaggagtttggagagagtgtttgctgtgatccattgaaagctccacattaaaccccagccctgtctggccagggagatccatgtgctcaatgttgctgggggacctacaaaagtcaaacattgctcagtaaaatgcctttggctggtcgccagctgtgcatgactgcagttcctagactctaacttaaccccaactttgcagtttctagagctttttgtctgtaatggtgattgggtctccactgtagatgcatgcagtgttcactccaacctcagaggctttcttgcttctggggaaatggcaggtggttgaaaccctgcacatcctcccagggccagccccagaatgggcctttctctgcctgccctgcccttggggccacctctgcctccagcaggcttgagcttgccccaggccttgggcataattatttccccccaaaaaaggcacaaaaataggttttggatcaaagaagtgtttctcagtgaaatgaaaacagtctttttatagcctttagcttgtgagtttggaagtttggggggtcttatgtttgttttgcctcttctgtttcttggaggagagttgaggcttttcttaggtgcatacacagacccaggtgaacacgctgactgtgaacctgccctgtatccggagctgtgctgggcactgaggggatgcaacaaaattaggagaggatccttgctcccaacgtctacttctcctacctcaacaggggtccagggtgcagtgaactcagttcttggcccttgggtgaggattcatggatgaatgaaagctagacctgatggggaggcattatgactaaataggcccagcctccttcccttccagctctgtcctaggagcataggcgggaaatctgagtagagtctgactgcagtttttgcttatgatttgtaaaagccgtcatggggtcaataagaaaataggggtgatggagggggagaagcccaggactgggagaatcgcacatgccccaggggttttcaccaaggattttcaagacaaactggagtaagaattaaagccccagaggatttaattatcctggtttgcaaaagagcctcccatgccagtaccgcccagccttggaggccggaatgctcatggcccctgtggtctgcttgtccttcagcccatgcccagcagatacctctctgactggagacgggctcaaagctggattagaaaggggagaggcacttgtgactttgtttgactctgtgactcacttcctcgctcacaccttgtttgaactactggactttcaactggctttccttaggtcaggcaagcagacagctccccactgaagaggtctgtacagtgacaacccgggccggcagcaaggacacagatgcagccacagtaaggctccatcaggactgggtcagtgatggcaacaggatggccaaggatggctctagaacactctgtccatgcgtcactccccccagttttatttttagctttggcttcagggagtgacagccatcacaaatagccacattctgctctactctccaacataccagattctacactgttgttatttcatgagacgtgaatgttgcagagagtggggggattctggttgttaaggaacttacactggggagctttactcttccgtgtcaacaatgtgactacatgttctccagattagccacacatgcaaacatcagtgtccttctagctttagccgagaaagaaaccagtcccagggaatgaatggtggtctccccactcccggcagcactttaggcagcccataagctatgcgagaatgtgaacgctcaccttgctccgtcacggttctgacctaccacataaacaggaagaagccagtgaccggaacagctctaggaataacaagtcagaatagaagtgtcctttatattaccagaaaatatgggcttggcctaagtcgctgtctcctaacctgccggggtcattccccaccaaacaccccatactaaggagccatgagccacctggacattcaccttttctttgaccatctggagtctggggcaacttaaggaggcaccacacagtggtgcaggcacatttccaagcgtaggtgtccctggcttttgtggccaaagctagtgttatggtcaacaacaggccagggtctgtggggcactgaccttgaaagtggcaaaatggaggtttcacaggctgtgcgggagcaggacggcttgcttcatctaacaatctcagtttcctttaaaaaaagaaagaaaggaaaagatttcataagcaggtgtcagtggacagtttaagtacttaaccatttctctttcttcttatggatgtgaactgtgctgtggataaatcatttgtatttcttgaatgttctctatgactaacagttattaagtcggttgtgtatatgtgtaactaatgtaactgccttttaaaatttcattacaataaaaatgactttgctctg

SEQ ID NO: 109040 - DNA, 5661 bp, Homo sapiens
  Payload ID: 1421
  Gene Symbol: AHRR
  Gene Name: aryl-hydrocarbon receptor repressor
  Uniprot ID: A9YTQ3
  ENST ID: ENST00000316418
  CDS Start-End: 45-2204
ggcacgtggactccctttaatccagtgactgtcaggtcgatcatatgccgaggacgatgatcccgccgggggagtgcacgtacgcgggccggaagcggaggaggcccctgcagaaacagaggcccgccgtgggggcagagaagtccaacccctccaagcgacaccgggaccgcctcaacgccgagttggaccacctggccagcctgctgccgttcccgcctgacatcatctccaagctggacaagctttctgtcctgcgcctcagtgtcagttacctccgggtgaagagcttcttccaagtcgtgcaggagcagagctcacggcagcctgcggccggcgccccctcgcccggagacagctgtcctcttgcagggtctgccgtgctggagggaaggctgctgttggagtctcttaatggctttgctctggtcgtgagtgcagaagggacgatattttatgcatcagcaacgatcgtggactatctgggcttccatcagacggatgtaatgcaccagaacatttatgactacatccacgtggacgaccgccaggacttctgccggcagctccactgggccatggaccctccccaggtggtgtttgggcagcccccgcccttggagacaggagatgatgctatcctggggaggctgctcagggcccaggagtggggcacaggcacgcccaccgagtactcggccttcctgacccgctgcttcatctgccgtgtgcgctgcctgctggacagcacctcgggcttcctggcccgggggtcacaggcttggcagctgcggctctgctgtcccgagccactcatgacgatgcagtttcaaggaaaactaaaattcctgtttggacagaagaagaaggcgccgtcaggagccatgctcccgccgcggctgtcgctgttctgcattgcggcacccgttctcctcccctccgcagcggagatgaaaatgaggagcgcgctcctgagggcaaaacccagagcagacaccgcagccaccgcggatgcaaaagtaaaagccaccaccagtctgtgcgaatcggaactgcatggaaaacccaattactcagcaggaaggagcagcagagagagcggcgttttggtgctcagggaacagactgacgctggccgatgggcacaggttcccgccagggccccatgcctgtgcctccggggtggccctgaccttgtccttgaccccaaggggggctcaggggacagggaggaggagcagcacaggatgctgagcagggcctctggagtgacagggcggagggagactccaggacccacaaagcccctgccctggacagcgggaaagcacagtgaggatggtgccaggccgaggctgcagcccagcaagaatgacccgccctccctgcgccccatgccccgcggctcctgcctgccctgcccgtgtgtccagggcactttcaggaactcgcccatctctcacccgccgagcccgtcccccagtgcctactccagccggaccagcagacccatgcgggatgtcggtgaggaccaggtgcaccctcccctctgccactttccccagaggagcctgcagcaccagctccctcagcctggagctcagcgttttgccacgaggggctatcccatggaggacatgaagctgcaaggtgtaccgatgcctccgggggacctgtgtggtccgacgctgctgctagatgtgtccatcaagatggagaaggactctgggtgtgagggtgctgcagacggctgtgtgcccagccaggtgtggctgggggccagtgacaggagccacccagccaccttccctaccaggatgcacctgaaaacagagccagactctcggcaacaggtgtacatctcgcacctggggcacggcgtgcggggggctcagccccatgggagggccactgctgggcgcagcagggagctgacccctttccaccctgcacactgtgcctgcctggagcccacagacggccttccccagtcggagcctccccaccagctctgtgcacggggccgaggtgaacagtcctgcacctgcagagctgctgaggccgcccctgtggtcaagcgggagcccttggactcaccccagtgggctactcacagccagggaatggtgcccgggatgttgcccaaaagtgccttggccacgctggtcccgccccaagcttcggggtgcacattcctgccatagcgcagtgaccaccatccaagctcagatctgtgtgtctacgctcagatgcgtcggtggctgggctgccctgctcctggtcaggccggagcccgtcctaagacacacgctttgcagagctgtgcatgcgcagtctgctagtgtgtgtgtgcagcatacgcaggagcctatcctgaattttgtaaaatatcccaacagttcttaaatgaaaactggccttaagtctattcaagcatgacagcatttctctttgaggaattaaaatctttaggaaagtgatcatggctggacagcttcatgccccagaggcagcgagcacccgtcccatggctgccaagtccacagtcggggatgaagcagtcgggtgatgctcccaagtccgcagtcggggatgaagcggtcgggtgatgctcccaagtccgcagtcggggatgaagcggtcgggtgacacacctagctcagccctcccaggccacctgcagctcccagcctgtgctgtgcaggcagggtcagcccatcgccacagtgcactgtagaggccagcacacggcaaattagaaatacaacacgcggagaaaggggtccgtgagcccactcatagaggaatctagaacgttccaggcagcagaggctggcagcgtgggtcccacactgccccacaccgtgcggcaggtgctccatggcgccatgacagagtctgaggccagacctggactggaattgacagcataacccctgttccttctggacatctcccgagttctcagtgggtctctgcggacggttcttcctaatctgcctcttggtacatcacgtaatacagagttcacagactccgggtttggaagtacagagaaacacacaacgtagagagaagacacaggaaactgcgctgcctgtgggggtttctctctggctggctgtacagttcactcaaatgagggttcccattgccatcctaggagaataattagggacaagacagacaagtattaatagcattaaaacagttgtaaaggcgatattttctgagagtaggaaatttggatacaaaagcataagtcagaaagtgaaggtcaccaatccaccaacccgagaacctacagctgatggtgcatttcaggcttcttccacggtctggcctggaaccccacccggctggtgcaggcatcagatcagggtgtagaagtcaccccaagcaagaggaagccaggcagtgaggccctggggtgtggctgcagctgggcccacctgtgcgggggtgggaaggccccatcctcagggagagggcatcggcgccctgacgtcagctccactgggagtggcaggagctgtgggagcccatgggtgagggacccaccaccccgctgcactgtgcattgtgcctcccgtgtggacgccctctctgttgttggcccgcgggtgagggacccaccacccctagggacccaccaccccgccgcactgtgcattctgcctcctgtgtggacgccctctctgttgtcagtggctttgaggtgtcagtgcttacttagatgctggtttaatgctggacccatttgttaaacgcaccttcactttgtcaaaacccaggtttggttggcaggactgggtcttctgcccaatgccaggtgcctgcgcctctcagtggcctggttcttggacagtttgcccccatgtggcagggatagggataaggatctcctctcagtactggaagagaacagccaaccatctgagcccagagtcacagatccatcgtggccccctatgacccccaagccctaccgagggggcactcactctctgcttagccagggggcgtctttcaaaaggtgacctccatgctgtgctgtcgtgggtgtgagacgtgctcatggccttccactgccatctctcccttatctgatgcctaaagtcacgatggggacagagctacccaggggccagccatggggtgaccagccacctgagggtcagtcacctgtggagagcaggcacctgtgaagaccaggcacctgaggactggcgcctacttcccactttggccctacactggcacagagcccctctttattcatttctcatgctgagcatggcacacttctggcctctgggcatttatggatttaagaccaggatggtatttcagaagcttcccacttccttcctattctaaccgagtgcccagctcctttgctgatcatggaaagacccttaataattaggcctgcaggccaggcgcagtggctcatgcctataatcccagcactttaggaggtcaaggtaggaggatcgcttaagcccaggagttcaagaccagcctgggcaacacaggaagaatgtgtctctacaaaaaataattaaaaatcagatctgctgtatccctgaaaaagtctcaatcaacatgcatgttccactcttggagttccctgttctgagggccagccacgtcctgtgtcctggagcttagccctcagcagctcccttcagcctgggcgccgcctgggtcccaaacgtggcagctgctcttccagtctcggggccgaggagggcagggagctcagtgactgagagtcttgtgtatcacatgtcttgagtgtcctggagccaacggctgtcactgggaaaaacaccaggccccaaagatcgaatcagagacgtggctgcgtgtttgcgattgtagccaggcccttcagtgtcatcaaaggagcactggggcctccttaagcacagacggcagcccctgcccaggaggcttcttcaccacgtcctgccctgcagcctcccagacctttagatgcgcccctgcccaaggccctcctggtgacaggtgccagattgagtggtgggttgctgccaggcaggccacgctgtgttgacgctgcactcagcacgtgggtgttggctctgccggttttgtggtgtggggaccctacaggaggctgcggccctgagagcctgggatcagcgaggtgtccgacatcccttcctcaacggcaacaaaaactccccaagtcagcactttggttattttatagccacaaccctcttggaaaacagtggggaagactatggaacatagaaagtgtggatgtatcacttctctctaaaatgtcattgttagcactaattacaggttcatgtttttctgtgtatgtagcttttccctatatagctgaaaaagtattaaagtcaaatataaggtgggaatgggatggaagggaggagatcaatacaacttatatttttgcagtttctactggaagaaaaaagttttcaatacctagaccaacttgttgaatttttaaaacttatgcactataaatgcaactttctctactgctttctcagtgcctttaggaagctttcaaatttttttgtactgtggtttgtattaaatttgcaatattgatgtaaaatacatgacatgctagtacatgtttaacaaaaatttaaa

SEQ ID NO: 109041 - DNA, 2173 bp, Homo sapiens
  Payload ID: 1421
  Gene Symbol: AHRR
  Gene Name: aryl-hydrocarbon receptor repressor
  Uniprot ID: A9YTQ3
  ENST ID: ENST00000505113
  CDS Start-End: 45-2150
ggcacgtggactccctttaatccagtgactgtcaggtcgatcatatgccgaggacgatgatcccgccgggggagtgcacgtacgcgggccggaagcggaggaggcccctgcagaaacagaggcccgccgtgggggcagagaagtccaacccctccaagcgacaccgggaccgcctcaacgccgagttggaccacctggccagcctgctgccgttcccgcctgacatcatctccaagctggacaagctttctgtcctgcgcctcagtgtcagttacctccgggtgaagagcttcttccaagtcgtgcaggagcagagctcacggcagcctgcggccggcgccccctcgcccggagacagctgtcctcttgcagggtctgccgtgctggagggaaggctgctgttggagtctcttaatggctttgctctggtcgtgagtgcagaagggacgatattttatgcatcagcaacgatcgtggactatctgggcttccatcagacggatgtaatgcaccagaacatttatgactacatccacgtggacgaccgccaggacttctgccggcagctccactgggccatggaccctccccaggtggtgtttgggcagcccccgcccttggagacaggagatgatgctatcctggggaggctgctcagggcccaggagtggggcacaggcacgcccaccgagtactcggccttcctgacccgctgcttcatctgccgtgtgcgctgcctgctggacagcacctcgggcttcctgacgatgcagtttcaaggaaaactaaaattcctgtttggacagaagaagaaggcgccgtcaggagccatgctcccgccgcggctgtcgctgttctgcattgcggcacccgttctcctcccctccgcagcggagatgaaaatgaggagcgcgctcctgagggcaaaacccagagcagacaccgcagccaccgcggatgcaaaagtaaaagccaccaccagtctgtgcgaatcggaactgcatggaaaacccaattactcagcaggaaggagcagcagagagagcggcgttttggtgctcagggaacagactgacgctggccgatgggcacaggttcccgccagggccccatgcctgtgcctccggggtggccctgaccttgtccttgaccccaaggggggctcaggggacagggaggaggagcagcacaggatgctgagcagggcctctggagtgacagggcggagggagactccaggacccacaaagcccctgccctggacagcgggaaagcacagtgaggatggtgccaggccgaggctgcagcccagcaagaatgacccgccctccctgcgccccatgccccgcggctcctgcctgccctgcccgtgtgtccagggcactttcaggaactcgcccatctctcacccgccgagcccgtcccccagtgcctactccagccggaccagcagacccatgcgggatgtcggtgaggaccaggtgcaccctcccctctgccactttccccagaggagcctgcagcaccagctccctcagcctggagctcagcgttttgccacgaggggctatcccatggaggacatgaagctgcaaggtgtaccgatgcctccgggggacctgtgtggtccgacgctgctgctagatgtgtccatcaagatggagaaggactctgggtgtgagggtgctgcagacggctgtgtgcccagccaggtgtggctgggggccagtgacaggagccacccagccaccttccctaccaggatgcacctgaaaacagagccagactctcggcaacaggtgtacatctcgcacctggggcacggcgtgcggggggctcagccccatgggagggccactgctgggcgcagcagggagctgacccctttccaccctgcacactgtgcctgcctggagcccacagacggccttccccagtcggagcctccccaccagctctgtgcacggggccgaggtgaacagtcctgcacctgcagagctgctgaggccgcccctgtggtcaagcgggagcccttggactcaccccagtgggctactcacagccagggaatggtgcccgggatgttgcccaaaagtgccttggccacgctggtcccgccccaagcttcggggtgcacattcctgccatagcgcagtgaccaccatccaagctc

SEQ ID NO: 109042 - DNA, 1912 bp, Homo sapiens
  Payload ID: 1421
  Gene Symbol: AHRR
  Gene Name: aryl-hydrocarbon receptor repressor
  ENST ID: ENST00000512529
  CDS Start-End: 210-1853
gactccctttaatccagtgactgtcaggtcgatcatatgccgaggacgatgatcccgccgggggagtgcacgtacgcgggccggaagcggaggaggcccctgcagaaacatctcttaatggctttgctctggtcgtgagtgcagaagggacgatattttatgcatcagcaacgatcgtggactatctgggcttccatcagacggatgtaatgcaccagaacatttatgactacatccacgtggacgaccgccaggacttctgccggcagctccactgggccatggaccctccccaggtggtgtttgggcagcccccgcccttggagacaggagatgatgctatcctggggaggctgctcagggcccaggagtggggcacaggcacgcccaccgagtactcggccttcctgacccgctgcttcatctgccgtgtgcgctgcctgctggacagcacctcgggcttcctgacgatgcagtttcaaggaaaactaaaattcctgtttggacagaagaagaaggcgccgtcaggagccatgctcccgccgcggctgtcgctgttctgcattgcggcacccgttctcctcccctccgcagcggagatgaaaatgaggagcgcgctcctgagggcaaaacccagagcagacaccgcagccaccgcggatgcaaaagtaaaagccaccaccagtctgtgcgaatcggaactgcatggaaaacccaattactcagcaggaaggagcagcagagagagcggcgttttggtgctcagggaacagactgacgctggccgatgggcacaggttcccgccagggccccatgcctgtgcctccggggtggccctgaccttgtccttgaccccaaggggggctcaggggacagggaggaggagcagcacaggatgctgagcagggcctctggagtgacagggcggagggagactccaggacccacaaagcccctgccctggacagcgggaaagcacagtgaggatggtgccaggccgaggctgcagcccagcaagaatgacccgccctccctgcgccccatgccccgcggctcctgcctgccctgcccgtgtgtccagggcactttcaggaactcgcccatctctcacccgccgagcccgtcccccagtgcctactccagccggaccagcagacccatgcgggatgtcggtgaggaccaggtgcaccctcccctctgccactttccccagaggagcctgcagcaccagctccctcagcctggagctcagcgttttgccacgaggggctatcccatggaggacatgaagctgcaaggtgtaccgatgcctccgggggacctgtgtggtccgacgctgctgctagatgtgtccatcaagatggagaaggactctgggtgtgagggtgctgcagacggctgtgtgcccagccaggtgtggctgggggccagtgacaggagccacccagccaccttccctaccaggatgcacctgaaaacagagccagactctcggcaacaggtgtacatctcgcacctggggcacggcgtgcggggggctcagccccatgggagggccactgctgggcgcagcagggagctgacccctttccaccctgcacactgtgcctgcctggagcccacagacggccttccccagtcggagcctccccaccagctctgtgcacggggccgaggtgaacagtcctgcacctgcagagctgctgaggccgcccctgtggtcaagcgggagcccttggactcaccccagtgggctactcacagccagggaatggtgcccgggatgttgcccaaaagtgccttggccacgctggtcccgccccaagcttcggggtgcacattcctgccatagcgcagtgaccaccatccaagctcagatctgtgtgtctacgctcagatgcgtcggtggct

SEQ ID NO: 109043 - DNA, 646 bp, Homo sapiens
  Payload ID: 1421
  Gene Symbol: AHRR
  Gene Name: aryl-hydrocarbon receptor repressor
  ENST ID: ENST00000511487
  CDS Start-End: 1-646
ctcctcccctccgcagcggagatgaaaatgaggagcgcgctcctgagggcaaaacccagagcagacaccgcagccaccgcggatgcaaaggacagggaggaggagcagcacaggatgctgagcagggcctctggagtgacagggcggagggagactccaggacccacaaagcccctgccctggacagcgggaaagcacagtgaggatggtgccaggccgaggctgcagcccagcaagaatgacccgccctccctgcgccccatgccccgcggctcctgcctgccctgcccgtgtgtccagggcactttcaggaactcgcccatctctcacccgccgagcccgtcccccagtgcctactccagccggaccagcagacccatgcgggatgtcggtgaggaccaggtgcaccctcccctctgccactttccccagaggagcctgcagcaccagctccctcagcctggagctcagcgttttgccacgaggggctatcccatggaggacatgaagctgcaaggtgtaccgatgcctccgggggacctgtgtggtccgacgctgctgctagatgtgtccatcaagatggagaaggactctgggtgtgagggtgctgcagacggctgtgtgcccagccaggtgtggctggggg

SEQ ID NO: 109044 - DNA, 2350 bp, Homo sapiens
  Payload ID: 1421
  Gene Symbol: AHRR
  Gene Name: aryl-hydrocarbon receptor repressor
  ENST ID: ENST00000506456
  CDS Start-End: 401-2074
acgcacacgcagccacccacccacacaggcgcacatacgctggcaccgctgaacagccaaaatatacacgatggttcttcttatggttcaggaggtggaaagttgaaaccatagcaagaaacgtggcctatccaccgcagcgactaaaagataaagagggaaaaggacaaacattggccagaaggtgcagcggctggagcgttcgcgccttaactggaagaggagccgccccgcctgggaggccgctctggcgcccggctggtgccgggcaggaggcccttgcggacccagcggcctcctcgtcggcaacgcccaccccgcggttcagccacggagcggatgccgtgtgcaggcacggaacgggcgaggctgttgcgctgcaggtgcccccacggtcgcgatgcggggcagggggatgccgacggatgtaatgcaccagaacatttatgactacatccacgtggacgaccgccaggacttctgccggcagctccactgggccatggaccctccccaggtggtgtttgggcagcccccgcccttggagacaggagatgatgctatcctggggaggctgctcagggcccaggagtggggcacaggcacgcccaccgagtactcggccttcctgacccgctgcttcatctgccgtgtgcgctgcctgctggacagcacctcgggcttcctgacgatgcagtttcaaggaaaactaaaattcctgtttggacagaagaagaaggcgccgtcaggagccatgctcccgccgcggctgtcgctgttctgcattgcggcacccgttctcctcccctccgcagcggagatgaaaatgaggagcgcgctcctgagggcaaaacccagagcagacaccgcagccaccgcggatgcaaaagtaaaagccaccaccagtctgtgcgaatcggaactgcatggaaaacccaattactcagcaggaaggagcagcagagagagcggcgttttggtgctcagggaacagactgacgctggccgatgggcacaggttcccgccagggccccatgcctgtgcctccggggtggccctgaccttgtccttgaccccaaggggggctcaggggacagggaggaggagcagcacaggatgctgagcagggcctctggagtgacagggcggagggagactccaggacccacaaagcccctgccctggacagcgggaaagcacagtgaggatggtgccaggccgaggctgcagcccagcaagaatgacccgccctccctgcgccccatgccccgcggctcctgcctgccctgcccgtgtgtccagggcactttcaggaactcgcccatctctcacccgccgagcccgtcccccagtgcctactccagccggaccagcagacccatgcgggatgtcggtgaggaccaggtgcaccctcccctctgccactttccccagaggagcctgcagcaccagctccctcagcctggagctcagcgttttgccacgaggggctatcccatggaggacatgaagctgcaaggtgtaccgatgcctccgggggacctgtgtggtccgacgctgctgctagatgtgtccatcaagatggagaaggactctgggtgtgagggtgctgcagacggctgtgtgcccagccaggtgtggctgggggccagtgacaggagccacccagccaccttccctaccaggatgcacctgaaaacagagccagactctcggcaacaggtgtacatctcgcacctggggcacggcgtgcggggggctcagccccatgggagggccactgctgggcgcagcagggagctgacccctttccaccctgcacactgtgcctgcctggagcccacagacggccttccccagtcggagcctccccaccagctctgtgcacggggccgaggtgaacagtcctgcacctgcagagctgctgaggccgcccctgtggtcaagcgggagcccttggactcaccccagtgggctactcacagccagggaatggtgcccgggatgttgcccaaaagtgccttggccacgctggtcccgccccaagcttcggggtgcacattcctgccatagcgcagtgaccaccatccaagctcagatctgtgtgtctacgctcagatgcgtcggtggctgggctgccctgctcctggtcaggccggagcccgtcctaagacacacgctttgcagagctgtgcatgcgcagtctgctagtgtgtgtgtgcagcatacgcaggagcctatcctgaattttgtaaaatatcccaacagttcttaaatgaaaactggccttaagtctattcaagcatgacagcatttctctttgaggaattaaaatctttaggaaagtga

SEQ ID NO: 109045 - DNA, 576 bp, Homo sapiens
  Payload ID: 1421
  Gene Symbol: AHRR
  Gene Name: aryl-hydrocarbon receptor repressor
  ENST ID: ENST00000510400
  CDS Start-End: 104-576
gtgtgcgcgcgttctccaaacgccacccccacggggcctcacagccgccccggcctggcaaccgtcacccattttacgaacgaggacatcaaggccgaggacgatgatcccgccgggggagtgcacgtacgcgggccggaagcggaggaggcccctgcagaaacagaggcccgccgtgggggcagagaagtccaacccctccaagcgacaccgggaccgcctcaacgccgagttggaccacctggccagcctgctgccgttcccgcctgacatcatctccaagctggacaagctttctgtcctgcgcctcagtgtcagttacctccgggtgaagagcttcttccaagtcgtgcaggagcagagctcacggcagcctgcggccggcgccccctcgcccggagacagctgtcctcttgcagggtctgccgtgctggagggaaggctgctgttggagtctcttaatggctttgctctggtcgtgagtgcagaagggacgatattttatgcatcagcaacgatcgtggactatctgggcttccatcagacggatgtaatgcaccagaacatttatgacta

SEQ ID NO: 109046 - DNA, 435 bp, Homo sapiens
  Payload ID: 1421
  Gene Symbol: AHRR
  Gene Name: aryl-hydrocarbon receptor repressor
  ENST ID: ENST00000504625
  CDS Start-End: 192-435
ccttggctgcgccccgccccgcccgttcctggcttcctcgatggcttcctcctcaggacgccggtctcccgccacggcgccctgagccaggctccagagcaggcggcttctctgggggaggccgggacccgcctgacaccgaggggaggcccaggcgtgacccggccccggtggctcctcggccgaggacgatgatcccgccgggggagtgcacgtacgcgggccggaagcggaggaggcccctgcagaaacagaggcccgccgtgggggcagagaagtccaacccctccaagcgacaccgggaccgcctcaacgccgagttggaccacctggccagcctgctgccgttcccgcctgacatcatctccaagctggacaagctttctgtcctgcgcctcagtgtcagttacctccgggtgaagagcttcttccaag

SEQ ID NO: 109047 - DNA, 462 bp, Homo sapiens
  Payload ID: 1421
  Gene Symbol: AHRR
  Gene Name: aryl-hydrocarbon receptor repressor
  ENST ID: ENST00000515206
  CDS Start-End: 34-453
attttacgaacgaggacatcaaggccgaggacgatgatcccgccgggggagtgcacgtacgcgggccggaagcggaggaggcccctgcagaaacagaggcccgccgtgggggcagagaagtccaacccctccaagcgacaccgggaccgcctcaacgccgagttggaccacctggccagcctgctgccgttcccgcctgacatcatctccaagctggacaagctttctgtcctgcgcctcagtgtcagttacctccgggtgaagagcttcttccaaggacaggggttggcagtggcagatgccgaagatgtggatgaccacacgggcgaacgaaggcccatgtcgttcaggaggccccgagcattggacacccaggccctgagacgtactcagttcggtctgcatctgttgatggtgaatattgcaggactgatagccactgaccgcctgtagtgatgtgtg

SEQ ID NO: 109048 - DNA, 563 bp, Homo sapiens
  Payload ID: 1421
  Gene Symbol: AHRR
  Gene Name: aryl-hydrocarbon receptor repressor
  ENST ID: ENST00000514523
  CDS Start-End: 527-563
tcctggccagggcgcgctgccccgcgggtgtgcctgagcctccgcgccccgcaggccctgggccgaggacgatgatcccgccgggggagtgcacgtacgcgggccggaagcggaggaggcccctgcagaaacagtaaagaggcccgccgtgggggcagagaagtccaacccctccaagcgacaccgggaccgcctcaacgccgagttggaccacctggccagcctgctgccgttcccgcctgacatcatctccaagctggacaagctttctgtcctgcgcctcagtgtcagttacctccgggtgaagagcttcttccaagtcgtgcaggagcagagctcacggcagcctgcggccggcgccccctcgcccggagacagctgtcctcttgcagggtctgccgtgctggagggaaggctgctgttggagtctcttaatggctttgctctggtcgtgagtgcagaagggacgatattttatgcatcagcaacgatcgtggactatctgggcttccatcagacggatgtaatgcaccagaacatttatgactacatccacgtggacg

SEQ ID NO: 109049 - DNA, 2050 bp, Homo sapiens
  Payload ID: 1422
  Gene Symbol: ARSA
  Gene Name: arylsulfatase A
  ENST ID: ENST00000216124
  CDS Start-End: 394-1923
acaggtcacggggcggggccgaggcggaagcgcccgcagcccggtaccggctcctcctgggctccctctagcgccttccccccggcccgactccgctggtcagcgccaagtgacttacgcccccgaccctgagcccggaccgctaggcgaggaggatcagatctccgctcgagaatctgaaggtgccctggtcctggaggagttccgtcccagcccgcggtctcccggtactgtcgggccccggccctctggagcttcaggaggcggccgtcagggtcggggagtatttgggtccggggtctcagggaagggcggcgcctgggtctgcggtatcggaaagagcctgctggagccaagtagccctccctctcttgggacagacccctcggtcccatgtccatgggggcaccgcggtccctcctcctggccctggctgctggcctggccgttgcccgtccgcccaacatcgtgctgatctttgccgacgacctcggctatggggacctgggctgctatgggcaccccagctctaccactcccaacctggaccagctggcggcgggagggctgcggttcacagacttctacgtgcctgtgtctctgtgcacaccctctagggccgccctcctgaccggccggctcccggttcggatgggcatgtaccctggcgtcctggtgcccagctcccgggggggcctgcccctggaggaggtgaccgtggccgaagtcctggctgcccgaggctacctcacaggaatggccggcaagtggcaccttggggtggggcctgagggggccttcctgcccccccatcagggcttccatcgatttctaggcatcccgtactcccacgaccagggcccctgccagaacctgacctgcttcccgccggccactccttgcgacggtggctgtgaccagggcctggtccccatcccactgttggccaacctgtccgtggaggcgcagcccccctggctgcccggactagaggcccgctacatggctttcgcccatgacctcatggccgacgcccagcgccaggatcgccccttcttcctgtactatgcctctcaccacacccactaccctcagttcagtgggcagagctttgcagagcgttcaggccgcgggccatttggggactccctgatggagctggatgcagctgtggggaccctgatgacagccataggggacctggggctgcttgaagagacgctggtcatcttcactgcagacaatggacctgagaccatgcgtatgtcccgaggcggctgctccggtctcttgcggtgtggaaagggaacgacctacgagggcggtgtccgagagcctgccttggccttctggccaggtcatatcgctcccggcgtgacccacgagctggccagctccctggacctgctgcctaccctggcagccctggctggggccccactgcccaatgtcaccttggatggctttgacctcagccccctgctgctgggcacaggcaagagccctcggcagtctctcttcttctacccgtcctacccagacgaggtccgtggggtttttgctgtgcggactggaaagtacaaggctcacttcttcacccagggctctgcccacagtgataccactgcagaccctgcctgccacgcctccagctctctgactgctcatgagcccccgctgctctatgacctgtccaaggaccctggtgagaactacaacctgctggggggtgtggccggggccaccccagaggtgctgcaagccctgaaacagcttcagctgctcaaggcccagttagacgcagctgtgaccttcggccccagccaggtggcccggggcgaggaccccgccctgcagatctgctgtcatcctggctgcaccccccgcccagcttgctgccattgcccagatccccatgcctgagggcccctcggctggcctgggcatgtgatggctcctcactgggagcctgtgggggaggctcaggtgtctggagggggtttgtgcctgataacgtaataacaccagtggagacttgcagatgtgacaa

SEQ ID NO: 109050 - DNA, 1895 bp, Homo sapiens
  Payload ID: 1422
  Gene Symbol: ARSA
  Gene Name: arylsulfatase A
  ENST ID: ENST00000356098
  CDS Start-End: 239-1768
aggtcacggggcggggccgaggcggaagcgcccgcagcccggtaccggctcctcctgggctccctctagcgccttccccccggcccgactccgctggtcagcgccaagtgacttacgcccccgaccctgagcccggaccgctaggcgaggaggatcagatctccgctcgagaatctgaaggtgccctggtcctggaggagttccgtcccagcccgcggtctcccgacccctcggtcccatgtccatgggggcaccgcggtccctcctcctggccctggctgctggcctggccgttgcccgtccgcccaacatcgtgctgatctttgccgacgacctcggctatggggacctgggctgctatgggcaccccagctctaccactcccaacctggaccagctggcggcgggagggctgcggttcacagacttctacgtgcctgtgtctctgtgcacaccctctagggccgccctcctgaccggccggctcccggttcggatgggcatgtaccctggcgtcctggtgcccagctcccgggggggcctgcccctggaggaggtgaccgtggccgaagtcctggctgcccgaggctacctcacaggaatggccggcaagtggcaccttggggtggggcctgagggggccttcctgcccccccatcagggcttccatcgatttctaggcatcccgtactcccacgaccagggcccctgccagaacctgacctgcttcccgccggccactccttgcgacggtggctgtgaccagggcctggtccccatcccactgttggccaacctgtccgtggaggcgcagcccccctggctgcccggactagaggcccgctacatggctttcgcccatgacctcatggccgacgcccagcgccaggatcgccccttcttcctgtactatgcctctcaccacacccactaccctcagttcagtgggcagagctttgcagagcgttcaggccgcgggccatttggggactccctgatggagctggatgcagctgtggggaccctgatgacagccataggggacctggggctgcttgaagagacgctggtcatcttcactgcagacaatggacctgagaccatgcgtatgtcccgaggcggctgctccggtctcttgcggtgtggaaagggaacgacctacgagggcggtgtccgagagcctgccttggccttctggccaggtcatatcgctcccggcgtgacccacgagctggccagctccctggacctgctgcctaccctggcagccctggctggggccccactgcccaatgtcaccttggatggctttgacctcagccccctgctgctgggcacaggcaagagccctcggcagtctctcttcttctacccgtcctacccagacgaggtccgtggggtttttgctgtgcggactggaaagtacaaggctcacttcttcacccagggctctgcccacagtgataccactgcagaccctgcctgccacgcctccagctctctgactgctcatgagcccccgctgctctatgacctgtccaaggaccctggtgagaactacaacctgctggggggtgtggccggggccaccccagaggtgctgcaagccctgaaacagcttcagctgctcaaggcccagttagacgcagctgtgaccttcggccccagccaggtggcccggggcgaggaccccgccctgcagatctgctgtcatcctggctgcaccccccgcccagcttgctgccattgcccagatccccatgcctgagggcccctcggctggcctgggcatgtgatggctcctcactgggagcctgtgggggaggctcaggtgtctggagggggtttgtgcctgataacgtaataacaccagtggagacttgcagatgtgacaa

SEQ ID NO: 109051 - DNA, 1824 bp, Homo sapiens
  Payload ID: 1422
  Gene Symbol: ARSA
  Gene Name: arylsulfatase A
  ENST ID: ENST00000395619
  CDS Start-End: 183-1712
cggggccgaggcggaagcgcccgcagcccggtaccggctcctcctgggctccctctagcgccttccccccggcccgactccgctggtcagcgccaagtgacttacgcccccgaccctgagcccggaccgctaggcgaggaggatcagatctccgctcgagaatctgaagacccctcggtcccatgtccatgggggcaccgcggtccctcctcctggccctggctgctggcctggccgttgcccgtccgcccaacatcgtgctgatctttgccgacgacctcggctatggggacctgggctgctatgggcaccccagctctaccactcccaacctggaccagctggcggcgggagggctgcggttcacagacttctacgtgcctgtgtctctgtgcacaccctctagggccgccctcctgaccggccggctcccggttcggatgggcatgtaccctggcgtcctggtgcccagctcccgggggggcctgcccctggaggaggtgaccgtggccgaagtcctggctgcccgaggctacctcacaggaatggccggcaagtggcaccttggggtggggcctgagggggccttcctgcccccccatcagggcttccatcgatttctaggcatcccgtactcccacgaccagggcccctgccagaacctgacctgcttcccgccggccactccttgcgacggtggctgtgaccagggcctggtccccatcccactgttggccaacctgtccgtggaggcgcagcccccctggctgcccggactagaggcccgctacatggctttcgcccatgacctcatggccgacgcccagcgccaggatcgccccttcttcctgtactatgcctctcaccacacccactaccctcagttcagtgggcagagctttgcagagcgttcaggccgcgggccatttggggactccctgatggagctggatgcagctgtggggaccctgatgacagccataggggacctggggctgcttgaagagacgctggtcatcttcactgcagacaatggacctgagaccatgcgtatgtcccgaggcggctgctccggtctcttgcggtgtggaaagggaacgacctacgagggcggtgtccgagagcctgccttggccttctggccaggtcatatcgctcccggcgtgacccacgagctggccagctccctggacctgctgcctaccctggcagccctggctggggccccactgcccaatgtcaccttggatggctttgacctcagccccctgctgctgggcacaggcaagagccctcggcagtctctcttcttctacccgtcctacccagacgaggtccgtggggtttttgctgtgcggactggaaagtacaaggctcacttcttcacccagggctctgcccacagtgataccactgcagaccctgcctgccacgcctccagctctctgactgctcatgagcccccgctgctctatgacctgtccaaggaccctggtgagaactacaacctgctggggggtgtggccggggccaccccagaggtgctgcaagccctgaaacagcttcagctgctcaaggcccagttagacgcagctgtgaccttcggccccagccaggtggcccggggcgaggaccccgccctgcagatctgctgtcatcctggctgcaccccccgcccagcttgctgccattgcccagatccccatgcctgagggcccctcggctggcctgggcatgtgatggctcctcactgggagcctgtgggggaggctcaggtgtctggagggggtttgtgcctgataacgtaataacaccagtggagac

SEQ ID NO: 109052 - DNA, 1918 bp, Homo sapiens
  Payload ID: 1422
  Gene Symbol: ARSA
  Gene Name: arylsulfatase A
  ENST ID: ENST00000395621
  CDS Start-End: 272-1801
gccgaggcggaagcgcccgcagcccggtaccggctcctcctgggctccctctagcgccttccccccggcccgactccgctggtcagcgccaagtgacttacgcccccgaccctgagcccggaccgctaggcgaggaggatcagatctccgctcgagaatctgaaggtgccctggtcctggaggagttccgtcccagcccgcggtctcccggtactgtcgggccccggccctctggagcttcaggaggcggccgtcaggacccctcggtcccatgtccatgggggcaccgcggtccctcctcctggccctggctgctggcctggccgttgcccgtccgcccaacatcgtgctgatctttgccgacgacctcggctatggggacctgggctgctatgggcaccccagctctaccactcccaacctggaccagctggcggcgggagggctgcggttcacagacttctacgtgcctgtgtctctgtgcacaccctctagggccgccctcctgaccggccggctcccggttcggatgggcatgtaccctggcgtcctggtgcccagctcccgggggggcctgcccctggaggaggtgaccgtggccgaagtcctggctgcccgaggctacctcacaggaatggccggcaagtggcaccttggggtggggcctgagggggccttcctgcccccccatcagggcttccatcgatttctaggcatcccgtactcccacgaccagggcccctgccagaacctgacctgcttcccgccggccactccttgcgacggtggctgtgaccagggcctggtccccatcccactgttggccaacctgtccgtggaggcgcagcccccctggctgcccggactagaggcccgctacatggctttcgcccatgacctcatggccgacgcccagcgccaggatcgccccttcttcctgtactatgcctctcaccacacccactaccctcagttcagtgggcagagctttgcagagcgttcaggccgcgggccatttggggactccctgatggagctggatgcagctgtggggaccctgatgacagccataggggacctggggctgcttgaagagacgctggtcatcttcactgcagacaatggacctgagaccatgcgtatgtcccgaggcggctgctccggtctcttgcggtgtggaaagggaacgacctacgagggcggtgtccgagagcctgccttggccttctggccaggtcatatcgctcccggcgtgacccacgagctggccagctccctggacctgctgcctaccctggcagccctggctggggccccactgcccaatgtcaccttggatggctttgacctcagccccctgctgctgggcacaggcaagagccctcggcagtctctcttcttctacccgtcctacccagacgaggtccgtggggtttttgctgtgcggactggaaagtacaaggctcacttcttcacccagggctctgcccacagtgataccactgcagaccctgcctgccacgcctccagctctctgactgctcatgagcccccgctgctctatgacctgtccaaggaccctggtgagaactacaacctgctggggggtgtggccggggccaccccagaggtgctgcaagccctgaaacagcttcagctgctcaaggcccagttagacgcagctgtgaccttcggccccagccaggtggcccggggcgaggaccccgccctgcagatctgctgtcatcctggctgcaccccccgcccagcttgctgccattgcccagatccccatgcctgagggcccctcggctggcctgggcatgtgatggctcctcactgggagcctgtgggggaggctcaggtgtctggagggggtttgtgcctgataacgtaataacaccagtggagacttgca

SEQ ID NO: 109053 - DNA, 1650 bp, Homo sapiens
  Payload ID: 1422
  Gene Symbol: ARSA
  Gene Name: arylsulfatase A
  Uniprot ID: P15289
  ENST ID: ENST00000453344
  CDS Start-End: 263-1534
cacaggtcacggggcggggccgaggcggaagcgcccgcagcccggtaccggctcctcctgggctccctctagcgccttccccccggcccgactccgctggtcagcgccaagtgacttacgcccccgaccctgagcccggaccgctaggcgaggaggatcagatctccgctcgagaatctgaaggtgccctggtcctggaggagttccgtcccagcccgcggtctcccgggccgccctcctgaccggccggctcccggttcggatgggcatgtaccctggcgtcctggtgcccagctcccgggggggcctgcccctggaggaggtgaccgtggccgaagtcctggctgcccgaggctacctcacaggaatggccggcaagtggcaccttggggtggggcctgagggggccttcctgcccccccatcagggcttccatcgatttctaggcatcccgtactcccacgaccagggcccctgccagaacctgacctgcttcccgccggccactccttgcgacggtggctgtgaccagggcctggtccccatcccactgttggccaacctgtccgtggaggcgcagcccccctggctgcccggactagaggcccgctacatggctttcgcccatgacctcatggccgacgcccagcgccaggatcgccccttcttcctgtactatgcctctcaccacacccactaccctcagttcagtgggcagagctttgcagagcgttcaggccgcgggccatttggggactccctgatggagctggatgcagctgtggggaccctgatgacagccataggggacctggggctgcttgaagagacgctggtcatcttcactgcagacaatggacctgagaccatgcgtatgtcccgaggcggctgctccggtctcttgcggtgtggaaagggaacgacctacgagggcggtgtccgagagcctgccttggccttctggccaggtcatatcgctcccggcgtgacccacgagctggccagctccctggacctgctgcctaccctggcagccctggctggggccccactgcccaatgtcaccttggatggctttgacctcagccccctgctgctgggcacaggcaagagccctcggcagtctctcttcttctacccgtcctacccagacgaggtccgtggggtttttgctgtgcggactggaaagtacaaggctcacttcttcacccagggctctgcccacagtgataccactgcagaccctgcctgccacgcctccagctctctgactgctcatgagcccccgctgctctatgacctgtccaaggaccctggtgagaactacaacctgctggggggtgtggccggggccaccccagaggtgctgcaagccctgaaacagcttcagctgctcaaggcccagttagacgcagctgtgaccttcggccccagccaggtggcccggggcgaggaccccgccctgcagatctgctgtcatcctggctgcaccccccgcccagcttgctgccattgcccagatccccatgcctgagggcccctcggctggcctgggcatgtgatggctcctcactgggagcctgtgggggaggctcaggtgtctggagggggtttgtgcctgataacgtaataacaccagtggagacttgc

SEQ ID NO: 109054 - DNA, 576 bp, Homo sapiens
  Payload ID: 1422
  Gene Symbol: ARSA
  Gene Name: arylsulfatase A
  ENST ID: ENST00000608497
  CDS Start-End: 1-209
acccgtcctacccagacgaggtccgtggggtttttgctgtgcggactggaaagtacaaggctcacttcttcacccagggctctgcccacagtgataccactgcagaccctgcctgccacgcctccagctctctgactgctcatgagcccccgctgctctatgacctgtccaaggaccctgacggagtctcgctctgtcgcccaggctagagtgcagtggtaccatctccgctcactgcaacctccgcctcccgggttccagggattctcctgcctcagcctccctagtagctggaactacagtgctgggcaaaggtcccttgatcttggagttgcagcctctttctctccaaggagggcggtgaccagcctgagccagtcaatccagtgattggttcaggagtagcctgtgaccaggagtcctggtagtgaacgactggggcagccctgggggtgaggaccttgcgcagccgtcacaggccctgattggacactgggcagctgctaacccagtgtctccagctgcctacctggagagctccaagcgtaagaaaataaaccctgcctgttgaagcca

SEQ ID NO: 109055 - DNA, 5327 bp, Homo sapiens
  Payload ID: 1423
  Gene Symbol: ARSB
  Gene Name: arylsulfatase B
  Uniprot ID: P15848
  ENST ID: ENST00000264914
  CDS Start-End: 538-2139
ctgccacaggctgggctcttgtgctagaaatgacttgctagctagacatcatggttcaggatctgagtcagaggtttaaccatttataagcttttttcttatgaaaaattggcactaattataatgtctaactgtcagagttgttgcaggctttacaggagacgcgggctgtgaagatgctttgtaaattgtgaagcgttattaaagaacacatcttttttttttaggaaaccacagtgcaaatttaattgccggggaagataacgggccttggtgccctccaagcgtcagctgagtttccaagaagccgggcagcgggcgcccgcgggttcgtctctggctcctcctccgccacagcagccgggggcccgggtcggaggcggcgggggccgagcgcccggcctcgcaagcccacggcccgctgggggtgccgtcccgcgccggggcggagcaggccccggcagcccagttcctcattctatcagcggtacaaggggctggtggcgccacaggcgctgggaccgcgggcggacaaggatgggtccgcgcggcgcggcgagcttgccccgaggccccggacctcggcggctgctcctccccgtcgtcctcccgctgctgctgctgctgttgttggcgccgccgggctcgggcgccggggccagccggccgccccacctggtcttcttgctggcagacgacctaggctggaacgacgtcggcttccacggctcccgcatccgcacgccgcacctggacgcgctggcggccggcggggtgctcctggacaactactacacgcagccgctgtgcacgccgtcgcggagccagctgctcactggccgctaccagatccgtacaggtttacagcaccaaataatctggccctgtcagcccagctgtgttcctctggatgaaaaactcctgccccagctcctaaaagaagcaggttatactacccatatggtcggaaaatggcacctgggaatgtaccggaaagaatgccttccaacccgccgaggatttgatacctactttggatatctcctgggtagtgaagattattattcccatgaacgctgtacattaattgacgctctgaatgtcacacgatgtgctcttgattttcgagatggcgaagaagttgcaacaggatataaaaatatgtattcaacaaacatattcaccaaaagggctatagccctcataactaaccatccaccagagaagcctctgtttctctaccttgctctccagtctgtgcatgagccccttcaggtccctgaggaatacttgaagccatatgactttatccaagacaagaacaggcatcactatgcaggaatggtgtcccttatggatgaagcagtaggaaatgtcactgcagctttaaaaagcagtgggctctggaacaacacggtgttcatcttttctacagataacggagggcagactttggcagggggtaataactggccccttcgaggaagaaaatggagcctgtgggaaggaggcgtccgaggggtgggctttgtggcaagccccttgctgaagcagaagggcgtgaagaaccgggagctcatccacatctctgactggctgccaacactcgtgaagctggccaggggacacaccaatggcacaaagcctctggatggcttcgacgtgtggaaaaccatcagtgaaggaagcccatcccccagaattgagctgctgcataatattgacccgaacttcgtggactcttcaccgtgtcccaggaacagcatggctccagcaaaggatgactcttctcttccagaatattcagcctttaacacatctgtccatgctgcaattagacatggaaattggaaactcctcacgggctacccaggctgtggttactggttccctccaccgtctcaatacaatgtttctgagataccctcatcagacccaccaaccaagaccctctggctctttgatattgatcgggaccctgaagaaagacatgacctgtccagagaatatcctcacatcgtcacaaagctcctgtcccgcctacagttctaccataaacactcagtccccgtgtacttccctgcacaggacccccgctgtgatcccaaggccactggggtgtggggcccttggatgtaggatttcagggaggctagaaaacctttcaattggaagttggacctcaggccttttctcacgactcttgtctcatttgttatcccaacctgggttcacttggcccttctcttgctcttaaaccacaccgaggtgtctaatttcaacccctaatgcatttaagaagctgataaaatctgcaacactcctgctgttggctggagcatgtgtctagaggtgggggtggctgggtttatccccctttcctaagccttgggacagctgggaacttaacttgaaataggaagttctcactgaatcctggaggctggaacagctggctcttttagactcacaagtcagacgttcgattcccctctgccaatagccagttttattggagtgaatcacatttcttacgcaaatgaagggagcagacagtgattaatggttctgttggccaaggcttctccctgtcggtgaaggatcatgttcaggcactccaagtgaaccacccctcttggttcaccccttactcacttatctcatcacagagcataaggcccattttgttgttcaggtcaacagcaaaatgcctgcaccatgactgtggcttttaaaataaagaaatgtgtttttatcgtaatttatttccccccagccattgctcactctgtctagacttcctgccacttccaattcttctgtggcttttcctgcctttccttttgacctcagtagtcctatccctgggaaggccactttgcttctctacctgagcacccctgatttctggaacgctgctgagccctgccttacttttgcccctagggctgaagctagaggcctccccgtaataggcggtggagttgctctgtgaggatgttcatggtagacactaagagggctgggtgggagatgcttggctctgtggcatctgttcagcgaggcttttcctatattgcatggagttagtcattgtgattgtagctttatttcataatatattaagacttgcactgctatttactagcagtgagaagaaacctcaggaaaggatatgaaaaagcaagtggccagtgtctgggatactgggccttggtaaagcagaggagggcacacccacagtcctcttattctctgttttactgcttgttttgaggttctggggtctggcaaagaggatgcagtttgacacctgcagccctttctcaatcccactaatgtcttactaatgtggaacagtccatattagctccagagagtgtcaaacccagagaaatgtgtgcaaaaatgatactcttttctgcattagccccaccattgtgttcaccaatgcttggaacactgcctgaaggcactcattttttaatttttattttatttttaattttttatatctttatgagacgatctcactctgtcaccaggttggagtacagtggtacaatcacaactcaccgtagcctcaaactcctgggctcaagtgattctcccacctcaggcacccaaatagctggaactacaggcatataccgccacacccagctaattttattttttgaaaagacaaggttccctatgttgcccagctggtcttaaactcctgggctccagcaattatcccagcttgggctccaaaagtgctgggattacaggcatgagtcaccatgcctggcctcattttttaaaacaaatgaataaatggacaaatgagtaaatgagaaagtctcacaccatgaaagatgctagtccaatgagctgaatacagaggtaatataaatgtcttccagctgttgcttttctgttctcaagctgcccctcctggggtaggagcataatctacatcactgggcagtcacaggacactctatagcaaggttgtagcgtcctctccagtggggggagaaaaggaactgtgcctaccaaaggtactctcttgtcagcaatttccatttctatactttatgggacactagaaactaaaagcaacaaataatctgatataagtccttgtatagtcatccttcaattcagtagcaatattttctggtcactactaacctgtattgtattaaaatgagactattggaaggaaatggtgctaaaactaataacatctcttaccaacctttacccaactcctgggttggcaaacagctgaccaaactgccatcacctcccacttggaagtgtatggccgacagcatgaaatagctgagcccagatgttccttctgcatcctccgaatcccagggctgggtgtaggtagccgttggaggccatcgctacagggcacctatctgttatcgctgctgtcctcccaacagctgtctccagttctagttccttggttttcaggcacagtgggggatgttctgcacccagtggacttcaaaagagttttgaagacttaattttttgtaaaacaagtacttgagattttggtttatccataatagaatgtatttcattagattctctgattctatataagaatgtgaaaagattgatatattgttgttagaaataatgttatttctttccaattttttttttttttttttttgagatggagtctcgctctgtcacccaggctggagtgcagtggtgtgatctcggctcactgcagcctctaactcccaggttcaagctattctcctgcctcagcctcccaagtagctggattacaggcatacaccaccacgcctggctatgttttgtatttttcgtagagatagggtttcaccatgttggccaggctggtctcaaactcctgacctcaagtgatccacccacttcagcttcccaaagcactgggattacaggtgtgagccactgtgcccggcaaatttttttacctttacagaaggttttgcttatttaattgtgagctcatttttctttgttacttttgtccccccagatttgggggacaaaataaaattaatcttttaaaatgtgtcagccatatgtatggggcttccatttggggtgaggagaaagttctggaactagatagtggtcatggttatacaacatcataaatgcaattactgccactgaattgtatgttttaaagtggttaaaatgttaagttttatgttttattacaatttttaaatgtgtcaaccaactttatagtacataaattatatctcagtaaagctgttaaataaataaatatagtaaaaattttagaactaaaaaaa

SEQ ID NO: 109056 - DNA, 2316 bp, Homo sapiens
  Payload ID: 1423
  Gene Symbol: ARSB
  Gene Name: arylsulfatase B
  Uniprot ID: P15848
  ENST ID: ENST00000396151
  CDS Start-End: 500-1741
agatatttcaggctaactagatactgtgtgcttcttagtgtcactgcttagtgggggagccagctctgagtggggtcatatccggacaagcgaatgagctatttattcaatgaccacgcaacactccaaatcctcccagggcaacttgaaagtaaccgcaccttccaaagggcaccgtgcaatcagactgaaaccacagtgcaaatttaattgccggggaagataacgggccttggtgccctccaagcgtcagctgagtttccaagaagccgggcagcgggcgcccgcgggttcgtctctggctcctcctccgccacagcagccgggggcccgggtcggaggcggcgggggccgagcgcccggcctcgcaagcccacggcccgctgggggtgccgtcccgcgccggggcggagcaggccccggcagcccagttcctcattctatcagcggtacaaggggctggtggcgccacaggcgctgggaccgcgggcggacaaggatgggtccgcgcggcgcggcgagcttgccccgaggccccggacctcggcggctgctcctccccgtcgtcctcccgctgctgctgctgctgttgttggcgccgccgggctcgggcgccggggccagccggccgccccacctggtcttcttgctggcagacgacctaggctggaacgacgtcggcttccacggctcccgcatccgcacgccgcacctggacgcgctggcggccggcggggtgctcctggacaactactacacgcagccgctgtgcacgccgtcgcggagccagctgctcactggccgctaccagatccgtacaggtttacagcaccaaataatctggccctgtcagcccagctgtgttcctctggatgaaaaactcctgccccagctcctaaaagaagcaggttatactacccatatggtcggaaaatggcacctgggaatgtaccggaaagaatgccttccaacccgccgaggatttgatacctactttggatatctcctgggtagtgaagattattattcccatgaacgctgtacattaattgacgctctgaatgtcacacgatgtgctcttgattttcgagatggcgaagaagttgcaacaggatataaaaatatgtattcaacaaacatattcaccaaaagggctatagccctcataactaaccatccaccagagaagcctctgtttctctaccttgctctccagtctgtgcatgagccccttcaggtccctgaggaatacttgaagccatatgactttatccaagacaagaacaggcatcactatgcaggaatggtgtcccttatggatgaagcagtaggaaatgtcactgcagctttaaaaagcagtgggctctggaacaacacggtgttcatcttttctacagataacggagggcagactttggcagggggtaataactggccccttcgaggaagaaaatggagcctgtgggaaggaggcgtccgaggggtgggctttgtggcaagccccttgctgaagcagaagggcgtgaagaaccgggagctcatccacatctctgactggctgccaacactcgtgaagctggccaggggacacaccaatggcacaaagcctctggatggcttcgacgtgtggaaaaccatcagtgaaggaagcccatcccccagaattgagctgctgcataatattgacccgaacttcgtggactcttcaccgtactggcctgagtgctcgctgctgttgtagctaccaccaactttctactgaagatgataacccagggcataagaaatgacttcagacccaaggttctgaaagggcccctcaaggcctcgggtggctcctgcagaagtggcagaagaggcgggaactaggaacctggcatcataggaaaagtgccttctccaagaaagaaggggccccaggaggctgtcttacttagatcaaccataaactaccacagatgggtcatttcttatattatttcaaaatatctttgaagatgagaattcatttgtgtccttcatagaccaaagttctttgtgttaccttttcccaaaagtaaattcctttccctttattcattccttgtggaaataaaatgcaagccctttatacttgtcttacagtaatatggcacatgtagcttacttttgagcatcccagtgaataatgtttggaacttttcttattacctaatagcatatagagaagagtgaagtcagctaaaaacagaaattttgaaaagccatcttcaggaaaatgtaggcccagatgctttcctccaccttttttgacaggctgccacatacagtttcaca

SEQ ID NO: 109057 - DNA, 573 bp, Homo sapiens
  Payload ID: 1423
  Gene Symbol: ARSB
  Gene Name: arylsulfatase B
  ENST ID: ENST00000521117
  CDS Start-End: 437-573
ataaatgaatgtgaaaggctatttagacctctgccttttcaccgtcctcccacctgccacaggctgggctcttgtgctagaaatgacttgctagctagacatcatggttcaggatctgagtcagaggaaaccacagtgcaaatttaattgccggggaagataacgggccttggtgccctccaagcgtcagctgagtttccaagaagccgggcagcgggcgcccgcgggttcgtctctggctcctcctccgccacagcagccgggggcccgggtcggaggcggcgggggccgagcgcccggcctcgcaagcccacggcccgctgggggtgccgtcccgcgccggggcggagcaggccccggcagcccagttcctcattctatcagcggtacaaggggctggtggcgccacaggcgctgggaccgcgggcggacaaggatgggtccgcgcggcgcggcgagcttgccccgaggccccggacctcggcggctgctcctccccgtcgtcctcccgctgctgctgctgctgttgttggcgccgccgggctcgggcgccggggccagccggccgcccca

SEQ ID NO: 109058 - DNA, 1772 bp, Homo sapiens
  Payload ID: 1423
  Gene Symbol: ARSB
  Gene Name: arylsulfatase B
  Uniprot ID: P15848
  ENST ID: ENST00000565165
  CDS Start-End: 500-1741
agatatttcaggctaactagatactgtgtgcttcttagtgtcactgcttagtgggggagccagctctgagtggggtcatatccggacaagcgaatgagctatttattcaatgaccacgcaacactccaaatcctcccagggcaacttgaaagtaaccgcaccttccaaagggcaccgtgcaatcagactgaaaccacagtgcaaatttaattgccggggaagataacgggccttggtgccctccaagcgtcagctgagtttccaagaagccgggcagcgggcgcccgcgggttcgtctctggctcctcctccgccacagcagccgggggcccgggtcggaggcggcgggggccgagcgcccggcctcgcaagcccacggcccgctgggggtgccgtcccgcgccggggcggagcaggccccggcagcccagttcctcattctatcagcggtacaaggggctggtggcgccacaggcgctgggaccgcgggcggacaaggatgggtccgcgcggcgcggcgagcttgccccgaggccccggacctcggcggctgctcctccccgtcgtcctcccgctgctgctgctgctgttgttggcgccgccgggctcgggcgccggggccagccggccgccccacctggtcttcttgctggcagacgacctaggctggaacgacgtcggcttccacggctcccgcatccgcacgccgcacctggacgcgctggcggccggcggggtgctcctggacaactactacacgcagccgctgtgcacgccgtcgcggagccagctgctcactggccgctaccagatccgtacaggtttacagcaccaaataatctggccctgtcagcccagctgtgttcctctggatgaaaaactcctgccccagctcctaaaagaagcaggttatactacccatatggtcggaaaatggcacctgggaatgtaccggaaagaatgccttccaacccgccgaggatttgatacctactttggatatctcctgggtagtgaagattattattcccatgaacgctgtacattaattgacgctctgaatgtcacacgatgtgctcttgattttcgagatggcgaagaagttgcaacaggatataaaaatatgtattcaacaaacatattcaccaaaagggctatagccctcataactaaccatccaccagagaagcctctgtttctctaccttgctctccagtctgtgcatgagccccttcaggtccctgaggaatacttgaagccatatgactttatccaagacaagaacaggcatcactatgcaggaatggtgtcccttatggatgaagcagtaggaaatgtcactgcagctttaaaaagcagtgggctctggaacaacacggtgttcatcttttctacagataacggagggcagactttggcagggggtaataactggccccttcgaggaagaaaatggagcctgtgggaaggaggcgtccgaggggtgggctttgtggcaagccccttgctgaagcagaagggcgtgaagaaccgggagctcatccacatctctgactggctgccaacactcgtgaagctggccaggggacacaccaatggcacaaagcctctggatggcttcgacgtgtggaaaaccatcagtgaaggaagcccatcccccagaattgagctgctgcataatattgacccgaacttcgtggactcttcaccgtactggcctgagtgctcgctgctgttgtagctaccaccaactttctactgaagatgataac

SEQ ID NO: 109059 - DNA, 5159 bp, Homo sapiens
  Payload ID: 1424
  Gene Symbol: ARSD
  Gene Name: arylsulfatase D
  Uniprot ID: P51689
  ENST ID: ENST00000381154
  CDS Start-End: 77-1858
ggaagccttggcactagcggcgcccgggcgcggagtgcgcagggcaaggtcctgcgctctgggccagcgctcggccatgcgatccgccgcgcggaggggacgcgccgcgcccgccgccagggactctttgccggtgctactgtttttatgcttgcttctgaagacgtgtgaacctaaaactgcaaatgcctttaaaccaaatatcctactgatcatggcggatgatctaggcactggggatctcggttgctacgggaacaatacactgagaacgccgaatattgaccagcttgcagaggaaggtgtgaggctcactcagcacctggcggccgccccgctctgcaccccaagccgagctgcattcctcacagggagacattccttcagatcaggcatggacgccagcaatggataccgggcccttcagtggaacgcaggctcaggtggactccctgagaacgaaaccacttttgcaagaatcttgcagcagcatggctatgcaaccggcctcataggaaaatggcaccagggtgtgaattgtgcatcccgcggggatcactgccaccaccccctgaaccacggatttgactatttctacggcatgcccttcacgctcacaaacgactgtgacccaggcaggccccccgaagtggacgccgccctgagggcgcagctctggggttacacccagttcctggcgctggggattctcaccctggctgccggccagacctgcggtttcttctctgtctccgcgagagcagtcaccggcatggccggcgtgggctgcctgtttttcatctcttggtactcctccttcgggtttgtgcgacgctggaactgtatcctgatgagaaaccatgacgtcacggagcaacccatggttctggagaaaacagcgagtcttatgctaaaggaagctgtttcctatattgaaagacacaagcatgggccatttctcctcttcctttctttgctgcatgtgcacattccccttgtgaccacgagtgcattcctggggaaaagtcagcatggcttatatggtgataatgtggaggagatggactggctcataggtaaggttcttaatgccatcgaagacaatggtttaaagaactcaacattcacgtatttcacctctgaccatggaggacatttagaggcaagagatggacacagccagttagggggatggaacggaatttacaaaggtgggaagggcatgggaggatgggaaggtgggatccgcgtgcccgggatcttccactggccgggggtgctcccggccggccgagtgattggagagcccacgagcctgatggacgtgttccctactgtggtccagctggtgggtggcgaggtgccccaggacagggtgattgatggccacagcctggtacccttgctgcagggagctgaggcacgctcggcacatgagttcctgtttcattactgtgggcagcatcttcacgcagcacgctggcaccagaaggacagtggaagcgtctggaaggttcattacacgaccccgcagttccaccccgagggagcgggggcctgctacggccgaggcgtctgcccatgctccggggagggcgtgacccatcacagaccccctttgctctttgacctctccagggacccctccgaggcacggcccctgacccccgactccgagcccctgtaccacgccgtgatagcaagggtaggtgccgcggtgtcggagcatcggcagaccctgagtcctgtgccccagcagttttccatgagcaacatcctgtggaagccgtggctgcagccgtgctgcggacatttcccgttctgttcatgccacgaggatggggatggcaccccctgaatgccaggactgtgagagaggatccaggagagcctgactgcgttgcaaacaaaattctccaagcttggttctatcttcagcttccctttttgcaaggaacatgccctggactgagagtgggtccccactttctttctttctttctttcttttttgagacagagtgtcgctctgtccctcaggctggaatgcaatggcacgatctctgctcactgcaacctccgcctcccgggttcaagcgattttcctgcctcagcctcctgagtacccaggattacaggcaccaggcacctgccaccatgcctagctaatttttgtagttttagtagagacagggtttcaccatgttgcccaggctggtctcgcactcctgacctcaagtcatccacctgcctcagcctcccaaagtgctgggattacaggcacgagccactgcgcccatgtagggtttccctttcctgatttgtgaaataagactgtcccagtaggcacccactgatgcctcctcttcctcttctaaatctcagggttcgtcattgtgccaatgcccgatgttttcacccctccgtcttaaagcattgttgcaatttcatcacctagatgacataacagccttacaaaaggacagggaggagtgtctgttcctactctcacatagcggaggaaagttagagcctctcagtctctgtttatgaggactcattaatctcaaataattgatgcatttttcatacattagggtctctgtccatgtgtcttcctgatattgttatagaaatggcttcaggctgctggtaacagatgctgcggaaaaagaatgccttaaacaaagccaggcacggtgactcacacctgtaatcccagcactttgggaggctaaggtgggaggatcacttgagcctaggagttagacacctacccagcctgagcaacacagtgagacctcatctctacaaaaaacaaataattagctagatgtcgtggcgcacagctgtagtctcagctacttaggaggctgaggcgggaggattatttgagcctgggaggtcaaaactgcaatgagctaagattgcactactgcactccgggctgggagacagagtaagaccctgccttaaaaaaaaaaaaaaaaaaatgccttaaagaaaataataagagaagggtgtgttctcttccaagtaatgagccgatcaaggggaagcaacccaaggctagcaggctcttttcaattcccagctctgccactcttagcatggcagagagttggcctcattatgccagtatggctgccacagtgtcagacatcacattccaggcagtggaaaggagaaagaaccaaagggcatccctttctcttgaagcagtccctgtgaggggggattatctggaagccccaacccaatttctgcttccaaccattatccatagaaacaactggaagttgagaagtgcagtcttttaggtgggcacctggctgccctgtatgaaaccagaattaggttggtcagcaggaaaacaagaaaacacttactgtgttgactgaggtttttgacgcatcgctttattgtcaaattaaacaactctatctcattctgcactgaaacacgtactaccattgcctataattggaaaatgatcctcagaggcacagaagatgccctgatggaaagtttgccccttgggcaaagagacagccatgggaaccttcagacatagagagagaaggtggcttttctccctacattcctcaaatagctaagatttggccagtgtgttttctaagtcaattctagtgtgtttcatcctcacctcttccctctgtggctttgatgatggaagtgtagtcctaacctactgcacagctgggaccccctgcccctagatcccaatactggggatgggaggaccttgcactattcccctcagtccatctatcgaggtctttgcaggaagcatactgggaattgaaacgagagcctaaatgacatctaagaaaggcagtgttcaataccaggtattaggtgaggatgggattctaaggacatcagtgggaggcagggagccaccttcagacctcagcatggaagcttccaagatccagaggaagaggcaacagcactgagagtcataggtagaagaatcatcacagccctgctaaccaggcagctgatgcccctctcccctggctccctgtgtccaaatcctacaggggcatctgttggctgaactcaacctgaagccaaagagaagatgagtggagagaggcaacatttatagagctcaggtttctagggctggagagggatctggagggacacacaggagacacctggcataaccaaaaaatgattaaaaaaaaaaaaaaaaagaaacatctatggagcatgggacacggggagtggaggcagctaaaagccatctcatctttcaccgtattcaacaagcccattataacaagtctttcacgctcaaccattcaaacaatcccaacaatcccagcctaagaatttcctggcatttgatgaaaatggctgtgggttttgctatctttaagctccctgggaagcaggatataagcccagggctggcaggctctttctagctacctgctcttgcacatagagtttgcctcatggttgcaagaaggctgccatagctccagatggcacatagacattccaggcagcaggaaaaaggaaggagcacttaaccgaaggaggtcagggagttggttagtctccacctgaagaagagagccatgaaccagcttcagttgactaacgggctcctgtgagtgcatctttggacttttctggaggttgaaatctagatgtggtatgtgtcttaaagcagccaccaactcctcccattaccttccaagtgagcccaactacacgatggagcctcttccctgcccttggatctgggctgagcctctgacttgcgttgaccaacagaatgcagtgaaagtgatgccgatactaccctccctgccctagacttgggatacctggcagctatattcttccattcctcaggacttgcaaaaacgggtctcagcatgccttcccagagccatgaggtgtttctttgcccattcattgatctgagaagtgagtgtaaggagtttaaatcaacctctgttctgtgctagttaaggtaataaagttgctgcagtccagggggtaggtacctgtggacggctctgcgaataggacagttgcatttcttgggaatcaagtgcatccctaggctggcagtgcagcagaaatactgaataaaatgtgacaaatctccctgga

SEQ ID NO: 109060 - DNA, 580 bp, Homo sapiens
  Payload ID: 1424
  Gene Symbol: ARSD
  Gene Name: arylsulfatase D
  ENST ID: ENST00000458014
  CDS Start-End: 1-480
ccgggggtgctcccggccggccgagtgattggagagcccacgagcctgatggacgtgttccctactgtggtccagctggtgggtggcgaggtgccccaggacagggtgattgatggccacagcctggtacccttgctgcagggagctgaggcacgctcggcacatgagttcctgtttcattactgtgggcagcatcttcacgcagcacgctggcaccagaaggacagtggaagcgtctggaaggttcattacacgaccccgcagttccaccccgagggagcgggggcctgctacggccgaggcgtctgcccatgctccggggagggcgtgacccatcacagaccccctttgctctttgacctctccagggacccctccgaggcacggcccctgacccccgactccgagcccctgtaccacgccgtgatagcaagggggcatctgttggctgaactcaacctgaagccaaagagaagatgagtggagagaggcaacatttatagagctcaggtttctagggctggagagggatctggagggacacacaggagacacctggcataaccaaaaaatgattaaa

SEQ ID NO: 109061 - DNA, 567 bp, Homo sapiens
  Payload ID: 1424
  Gene Symbol: ARSD
  Gene Name: arylsulfatase D
  ENST ID: ENST00000559324
  CDS Start-End: 65-313
actagcggcgcccgggcgcggagtgcgcagggcaaggtcctgcgctctgggccagcgctcggccatgcgatccgccgcgcggaggggacgcgccgcgcccgccgccagggactctttgccggtgctactgtttttatgcttgcttctgaagacgtgtgaacctaaaactgcaaatgcctttaaaccaaatatcctactgatcatggcggatgatctaggcactggggatctcggttgctacgggaacaatacactgagagacaggttttcactatgttgccaaggcttgtctcgaactcctggcctcaagtgatccacccaccttagccccccaaagtgctgggatgacaggcgtgaaccaccgtgcccaaccaatatctggtgttgaagcggccagaacgccgaatattgaccagcttgcagaggaaggtgtgaggctcactcagcacctggcggccgccccgctctgcaccccaagccgagctgcattcctcacagggagacattccttcagatcaggcatggacgccagcaatggataccgggcccttcagtggaacgcaggct

SEQ ID NO: 109062 - DNA, 1853 bp, Homo sapiens
  Payload ID: 1425
  Gene Symbol: ARSE
  Gene Name: arylsulfatase E (chondrodysplasia punctata 1)
  Uniprot ID: P51690
  ENST ID: ENST00000381134
  CDS Start-End: 68-1837
ccttcctcttcttgatcggggattcaggaaggagcccaggagcagaggaagtagagagagagacaacatgttacatctgcaccattcttgtttgtgtttcaggagctggctgccagcgatgctcgctgtactgctaagtttggcaccatcagcttccagcgacatttccgcctcccgaccgaacatccttcttctgatggcggacgaccttggcattggggacattggctgctatggcaacaacaccatgaggactccgaatattgaccgccttgcagaggacggcgtgaagctgacccaacacatctctgccgcatctttgtgcaccccaagcagagccgccttcctcacgggcagataccctgtgcgatcagggatggtttccagcattggttaccgtgttcttcagtggaccggagcatctggaggtcttccaacaaatgagacaacttttgcaaaaatactgaaagagaaaggctatgccactggactcattggaaaatggcatctgggtctcaactgtgagtcagccagtgatcattgccaccaccctctccatcatggctttgaccatttctacggaatgcctttctccttgatgggtgattgcgcccgctgggaactctcagagaagcgtgtcaacctggaacaaaaactcaacttcctcttccaagtcctggccttggttgccctcacactggtagcagggaagctcacacacctgatacccgtctcgtggatgccggtcatctggtcagccctttcggccgtcctcctcctcgcaagctcctattttgtgggtgctctgattgtccatgccgattgctttctgatgagaaaccacaccatcacggagcagcccatgtgcttccaaagaacgacaccccttattctgcaggaggttgcgtcctttctcaaaaggaataagcatgggcctttcctcctctttgtttcctttctacacgttcacatccctcttatcactatggagaacttcctcgggaagagtctccacgggctgtatggggacaacgtagaggagatggactggatggtaggacggatccttgacactttggacgtggagggtttgagcaacagcaccctcatttattttacgtcggatcacggcggttccctagagaatcaacttggaaacacccagtatggtggctggaatggaatttataaaggtgggaagggcatgggaggatgggaaggtgggatccgcgtgcccgggatcttccgctggcccggggtgctcccggccggccgagtgattggcgagcccacgagtctgatggacgtgttccccaccgtggtccggctggcgggcggcgaggtgccccaggacagagtgattgacggccaagaccttctgcccttgctcctggggacagcccaacactcagaccacgagttcctgatgcattattgtgagaggtttctgcacgcagccaggtggcatcaacgggacagaggaacaatgtggaaagtccactttgtgacgcctgtgttccagccagagggagccggtgcctgctatggaagaaaggtctgcccgtgctttggggaaaaagtagtccaccacgatccacctttgctctttgacctctcaagagacccttctgagacccacatcctcacaccagcctcagagcccgtgttctatcaggtgatggaacgagtccagcaggcggtgtgggaacaccagcggacactcagcccagttcctctgcagctggacaggctgggcaacatctggagaccgtggctgcagccctgctgtggcccgttccccctctgctggtgccttagggaagatgacccacaataaatgtctgcagtgaaaa

SEQ ID NO: 109063 - DNA, 644 bp, Homo sapiens
  Payload ID: 1425
  Gene Symbol: ARSE
  Gene Name: arylsulfatase E (chondrodysplasia punctata 1)
  ENST ID: ENST00000438544
  CDS Start-End: 110-644
tcttcttgatcggggattcaggaaggagcccaggagcagaggtcaatttctgctgtcaatgtgattgtggacatctttatgtcttacaggaagtagagagagagacaacatgttacatctgcaccattcttgtttgtgtttcaggagctggctgccagcgatgctcgctgtactgctaagtttggcaccatcagcttccagcgacatttccgcctcccgaccgaacatccttcttctgatggcggacgaccttggcattggggacattggctgctatggcaacaacaccatgaggactccgaatattgaccgccttgcagaggacggcgtgaagctgacccaacacatctctgccgcatctttgtgcaccccaagcagagccgccttcctcacgggcagataccctgtgcgatcagggatggtttccagcattggttaccgtgttcttcagtggaccggagcatctggaggtcttccaacaaatgagacaacttttgcaaaaatactgaaagagaaaggctatgccactggactcattggaaaatggcatctgggtctcaactgtgagtcagccagtgatcattgccaccaccctctccatcatggctttgaccatttctacggaatgcctttctccttgatgg

SEQ ID NO: 109064 - DNA, 1990 bp, Homo sapiens
  Payload ID: 1425
  Gene Symbol: ARSE
  Gene Name: arylsulfatase E (chondrodysplasia punctata 1)
  ENST ID: ENST00000540563
  CDS Start-End: 156-1790
tgcttttcagagtgaatcagctacgcacatgcgtgagccagccgttcagtgccgccgagacagccagtgcgtgtctgttttggcaggaagaagacgtttcttccaaggagcagcctccccgctacatccagccagtgtcgcccttacacagctgcatgtcaggaagtagagagagagacaacatgttacatctgcaccattcttggactccgaatattgaccgccttgcagaggacggcgtgaagctgacccaacacatctctgccgcatctttgtgcaccccaagcagagccgccttcctcacgggcagataccctgtgcgatcagggatggtttccagcattggttaccgtgttcttcagtggaccggagcatctggaggtcttccaacaaatgagacaacttttgcaaaaatactgaaagagaaaggctatgccactggactcattggaaaatggcatctgggtctcaactgtgagtcagccagtgatcattgccaccaccctctccatcatggctttgaccatttctacggaatgcctttctccttgatgggtgattgcgcccgctgggaactctcagagaagcgtgtcaacctggaacaaaaactcaacttcctcttccaagtcctggccttggttgccctcacactggtagcagggaagctcacacacctgatacccgtctcgtggatgccggtcatctggtcagccctttcggccgtcctcctcctcgcaagctcctattttgtgggtgctctgattgtccatgccgattgctttctgatgagaaaccacaccatcacggagcagcccatgtgcttccaaagaacgacaccccttattctgcaggaggttgcgtcctttctcaaaaggaataagcatgggcctttcctcctctttgtttcctttctacacgttcacatccctcttatcactatggagaacttcctcgggaagagtctccacgggctgtatggggacaacgtagaggagatggactggatggtaggacggatccttgacactttggacgtggagggtttgagcaacagcaccctcatttattttacgtcggatcacggcggttccctagagaatcaacttggaaacacccagtatggtggctggaatggaatttataaaggtgggaagggcatgggaggatgggaaggtgggatccgcgtgcccgggatcttccgctggcccggggtgctcccggccggccgagtgattggcgagcccacgagtctgatggacgtgttccccaccgtggtccggctggcgggcggcgaggtgccccaggacagagtgattgacggccaagaccttctgcccttgctcctggggacagcccaacactcagaccacgagttcctgatgcattattgtgagaggtttctgcacgcagccaggtggcatcaacgggacagaggaacaatgtggaaagtccactttgtgacgcctgtgttccagccagagggagccggtgcctgctatggaagaaaggtctgcccgtgctttggggaaaaagtagtccaccacgatccacctttgctctttgacctctcaagagacccttctgagacccacatcctcacaccagcctcagagcccgtgttctatcaggtgatggaacgagtccagcaggcggtgtgggaacaccagcggacactcagcccagttcctctgcagctggacaggctgggcaacatctggagaccgtggctgcagccctgctgtggcccgttccccctctgctggtgccttagggaagatgacccacaataaatgtctgcagtgaaaagctggagccccgattcctaaattttgtcactcaaattgaaacaaaccagctggccatggtggttgtcatcccagcactttaggaggccaccacaggaggatcactcccgtgatcaaaaccaacctgggcaacatgatgaaactctagctctacaaaacaaaaataaaaaaaaaattagcctgca

SEQ ID NO: 109065 - DNA, 2506 bp, Homo sapiens
  Payload ID: 1425
  Gene Symbol: ARSE
  Gene Name: arylsulfatase E (chondrodysplasia punctata 1)
  ENST ID: ENST00000545496
  CDS Start-End: 462-2306
ttggtagacgtgggcgtggctttgagattcccccatgctgcgatgtggggggagtctgctctgtctgtcctaactctctctgatcttctgacttgggaaaaacaaactcgaagttaatcattcccagctcaaagccttgtgcaagtgctctctgccttcacgcttgcttcctttgggagagaaccttcctcttcttgatcggggattcaggaaggagcccaggagcagaggaagtagagagagagacaacatgttacatctgcaccattcttgagacagggtctcaccatgttgctcaagctggtcttaaacacctgggctcaggcaatgctcccaccttggcctcccaacgtgctcagataatgggcatgagccaccacgcctgaccgcttctggatctcttgatggtgctttctcagaatgcactgatagtgatttatcctgcatctggagaatgaagcatgagacccgtgattaatagatgtgctccaggctcccttgatttgatgttgccccaggcagcctcagaaggaattgtatttcattctctgcaaatcagtttgtgtttcaggagctggctgccagcgatgctcgctgtactgctaagtttggcaccatcagcttccagcgacatttccgcctcccgaccgaacatccttcttctgatggcggacgaccttggcattggggacattggctgctatggcaacaacaccatgaggactccgaatattgaccgccttgcagaggacggcgtgaagctgacccaacacatctctgccgcatctttgtgcaccccaagcagagccgccttcctcacgggcagataccctgtgcgatcagggatggtttccagcattggttaccgtgttcttcagtggaccggagcatctggaggtcttccaacaaatgagacaacttttgcaaaaatactgaaagagaaaggctatgccactggactcattggaaaatggcatctgggtctcaactgtgagtcagccagtgatcattgccaccaccctctccatcatggctttgaccatttctacggaatgcctttctccttgatgggtgattgcgcccgctgggaactctcagagaagcgtgtcaacctggaacaaaaactcaacttcctcttccaagtcctggccttggttgccctcacactggtagcagggaagctcacacacctgatacccgtctcgtggatgccggtcatctggtcagccctttcggccgtcctcctcctcgcaagctcctattttgtgggtgctctgattgtccatgccgattgctttctgatgagaaaccacaccatcacggagcagcccatgtgcttccaaagaacgacaccccttattctgcaggaggttgcgtcctttctcaaaaggaataagcatgggcctttcctcctctttgtttcctttctacacgttcacatccctcttatcactatggagaacttcctcgggaagagtctccacgggctgtatggggacaacgtagaggagatggactggatggtaggacggatccttgacactttggacgtggagggtttgagcaacagcaccctcatttattttacgtcggatcacggcggttccctagagaatcaacttggaaacacccagtatggtggctggaatggaatttataaaggtgggaagggcatgggaggatgggaaggtgggatccgcgtgcccgggatcttccgctggcccggggtgctcccggccggccgagtgattggcgagcccacgagtctgatggacgtgttccccaccgtggtccggctggcgggcggcgaggtgccccaggacagagtgattgacggccaagaccttctgcccttgctcctggggacagcccaacactcagaccacgagttcctgatgcattattgtgagaggtttctgcacgcagccaggtggcatcaacgggacagaggaacaatgtggaaagtccactttgtgacgcctgtgttccagccagagggagccggtgcctgctatggaagaaaggtctgcccgtgctttggggaaaaagtagtccaccacgatccacctttgctctttgacctctcaagagacccttctgagacccacatcctcacaccagcctcagagcccgtgttctatcaggtgatggaacgagtccagcaggcggtgtgggaacaccagcggacactcagcccagttcctctgcagctggacaggctgggcaacatctggagaccgtggctgcagccctgctgtggcccgttccccctctgctggtgccttagggaagatgacccacaataaatgtctgcagtgaaaagctggagccccgattcctaaattttgtcactcaaattgaaacaaaccagctggccatggtggttgtcatcccagcactttaggaggccaccacaggaggatcactcccgtgatcaaaaccaacctgggcaacatgatgaaactctagctctacaaaacaaaaataaaaaaaaaattagcctgca

SEQ ID NO: 109066 - DNA, 1991 bp, Homo sapiens
  Payload ID: 1426
  Gene Symbol: ARSF
  Gene Name: arylsulfatase F
  Uniprot ID: P54793
  ENST ID: ENST00000359361
  CDS Start-End: 69-1841
gttctgctcctagacattagagagataatacggctgatagacaacaagaaggtattccaagctgcacaatgaggcccaggagacccttggtcttcatgtctttggtgtgtgcactcttgaacacatgccaggcacacagggtgcatgacgacaagcctaatattgtcctaatcatggttgatgacctgggtattggagatctgggctgctacggcaatgacaccatgaggacgcctcacatcgaccgccttgccagggaaggcgtgcgactgactcagcacatctctgccgcctccctctgcagcccaagccggtccgcgttcttgacgggaagataccccatccgatcaggtatggtttctagtggtaatagacgtgtcatccaaaatcttgcagtccccgcaggcctccctcttaatgagacaacacttgcagccttgctaaagaagcaaggatacagcacggggcttataggcaaatggcaccaaggcttgaactgcgactcccgaagtgaccagtgccaccatccatataattatgggtttgactactactatggcatgccgttcactctcgttgacagctgctggccggacccctctcgtaacacggaattagcctttgagagtcagctctggctctgtgtgcagctagttgccattgccatcctcaccctaacctttgggaagctgagcggctgggtctctgttccctggctcctgatcttctccatgattctgtttattttcctcttgggctatgcttggttctccagccacacgtcccctttatactgggactgcctcctcatgcgggggcacgagatcacggagcagcccatgaaggctgaacgagctggatccattatggtgaaggaagcgatttcctttttagaaaggcacagtaaggaaactttccttctctttttctcctttcttcacgtgcacacacctctccccaccacggacgatttcactggcaccagcaagcatggcttgtatggggataatgtggaagagatggactccatggtgggcaagattcttgatgctatcgatgattttggcctaaggaacaacacccttgtctactttacatcagatcacggagggcatttggaagctaggcgagggcatgcccaacttggtggatggaatggaatatacaaaggtggaaaaggcatggggggctgggaaggtggaatccgcgtcccaggaattgtccgatggcctggaaaggtaccagctggacggttgattaaggaacctacaagtttaatggatattttaccaactgtcgcatcagtgtcaggaggaagtctccctcaggacagggtcattgacggccgagacctcatgcccttgctgcagggcaacgtcaggcactcggagcatgaatttcttttccactactgtggctcctacctgcacgccgtgcggtggatccccaaggacgacagtgggtcagtttggaaggctcactatgtgaccccggtattccagccaccagcttctggtggctgctatgtcacctcattatgcagatgtttcggagaacaggttacctaccacaacccccctctgctcttcgatctctccagggacccctcagagtccacacccctgacacctgccacagagcccctccatgattttgtgattaaaaaggtggccaacgccctgaaggaacaccaggaaaccatcgtgcctgtgacctaccaactctcagaactgaatcagggcaggacgtggctgaagccttgctgtggggtgttcccattttgtctgtgtgacaaggaagaggaagtctctcagcctcggggtcctaacgagaagagataattacaatcaggctaccagaggaagcctttggtcctaacgagaagagataattacaatcaggctaccaaaggaagcactaactttggtgctttcaagttggcaaggagtgcatttaatagtcaataaattcatctaccattccagattatt

SEQ ID NO: 109067 - DNA, 2164 bp, Homo sapiens
  Payload ID: 1426
  Gene Symbol: ARSF
  Gene Name: arylsulfatase F
  Uniprot ID: P54793
  ENST ID: ENST00000381127
  CDS Start-End: 222-1994
agtggagacaggctctcaccatgttgaccaggctggtctcgaactcccgacctcaagtgatccgccggcctcggcctcccaaagtgctgggattacaggcgtgaaccaccactcctggcccttctgttacttttccactgctgttgagatagaagtcactgttgggatccaacctttttgtttgtataaactgacaacaagaaggtattccaagctgcacaatgaggcccaggagacccttggtcttcatgtctttggtgtgtgcactcttgaacacatgccaggcacacagggtgcatgacgacaagcctaatattgtcctaatcatggttgatgacctgggtattggagatctgggctgctacggcaatgacaccatgaggacgcctcacatcgaccgccttgccagggaaggcgtgcgactgactcagcacatctctgccgcctccctctgcagcccaagccggtccgcgttcttgacgggaagataccccatccgatcaggtatggtttctagtggtaatagacgtgtcatccaaaatcttgcagtccccgcaggcctccctcttaatgagacaacacttgcagccttgctaaagaagcaaggatacagcacggggcttataggcaaatggcaccaaggcttgaactgcgactcccgaagtgaccagtgccaccatccatataattatgggtttgactactactatggcatgccgttcactctcgttgacagctgctggccggacccctctcgtaacacggaattagcctttgagagtcagctctggctctgtgtgcagctagttgccattgccatcctcaccctaacctttgggaagctgagcggctgggtctctgttccctggctcctgatcttctccatgattctgtttattttcctcttgggctatgcttggttctccagccacacgtcccctttatactgggactgcctcctcatgcgggggcacgagatcacggagcagcccatgaaggctgaacgagctggatccattatggtgaaggaagcgatttcctttttagaaaggcacagtaaggaaactttccttctctttttctcctttcttcacgtgcacacacctctccccaccacggacgatttcactggcaccagcaagcatggcttgtatggggataatgtggaagagatggactccatggtgggcaagattcttgatgctatcgatgattttggcctaaggaacaacacccttgtctactttacatcagatcacggagggcatttggaagctaggcgagggcatgcccaacttggtggatggaatggaatatacaaaggtggaaaaggcatggggggctgggaaggtggaatccgcgtcccaggaattgtccgatggcctggaaaggtaccagctggacggttgattaaggaacctacaagtttaatggatattttaccaactgtcgcatcagtgtcaggaggaagtctccctcaggacagggtcattgacggccgagacctcatgcccttgctgcagggcaacgtcaggcactcggagcatgaatttcttttccactactgtggctcctacctgcacgccgtgcggtggatccccaaggacgacagtgggtcagtttggaaggctcactatgtgaccccggtattccagccaccagcttctggtggctgctatgtcacctcattatgcagatgtttcggagaacaggttacctaccacaacccccctctgctcttcgatctctccagggacccctcagagtccacacccctgacacctgccacagagcccctccatgattttgtgattaaaaaggtggccaacgccctgaaggaacaccaggaaaccatcgtgcctgtgacctaccaactctcagaactgaatcagggcaggacgtggctgaagccttgctgtggggtgttcccattttgtctgtgtgacaaggaagaggaagtctctcagcctcggggtcctaacgagaagagataattacaatcaggctaccagaggaagcctttggtcctaacgagaagagataattacaatcaggctaccaaaggaagcactaactttggtgctttcaagttggcaaggagtgcatttaatagtcaataaattcatctaccattccagattattaaaggcccactggttgttcc

SEQ ID NO: 109068 - DNA, 1875 bp, Homo sapiens
  Payload ID: 1427
  Gene Symbol: ARSH
  Gene Name: arylsulfatase family, member H
  Uniprot ID: Q5FYA8
  ENST ID: ENST00000381130
  CDS Start-End: 1-1689
atgacaagaaacgccagacccaacattgtcctgctgatggcagatgaccttggagtgggggatttgtgctgctacggtaataactcagtgagcacacctaatattgaccgcctggcaagtgaaggagtgaggcttacccagcatctcgcagctgcttccatgtgcaccccaagtcgggctgccttcctgaccggccggtaccccatcagatcagggatggtgtctgcctacaacctgaaccgtgccttcacgtggcttggtgggtcaggtggtcttcccaccaatgaaacgacttttgccaagctgctgcagcaccgtggctaccgcacgggactcataggcaaatggcacctgggtttgagctgcgcctctcggaatgatcactgttaccacccgctcaaccatggttttcactacttttacggggtgccttttggacttttaagcgactgccaggcatccaagacaccagaactgcaccgctggctcaggatcaaactgtggatctccacggtagcccttgccctggttccttttctgcttctcattcccaagttcgcccgctggttctcagtgccatggaaggtcatctttgtctttgctctcctcgcctttctgtttttcacttcctggtactctagttatggatttactcgacgttggaattgcatccttatgaggaaccatgaaattatccagcagccaatgaaagaggagaaagtagcttccctcatgctgaaggaggcacttgctttcattgaaaggtacaaaagggaaccttttctcctctttttttccttcctgcacgtacatactccactcatctccaaaaagaagtttgttgggcgcagtaaatatggcaggtatggggacaatgtagaagaaatggattggatggtgggtaaaatcctggatgccctggaccaggagcgcctggccaaccacaccttggtgtacttcacctctgacaacgggggccacctggagcccctggacggggctgttcagctgggtggctggaacgggatctacaaaggtggcaaaggaatgggaggatgggaaggaggtatccgtgtgccagggatattccggtggccgtcagtcttggaggctgggagagtgatcaatgagcccaccagcttaatggacatctatccgacgctgtcttatataggcggagggatcttgtcccaggacagagtgattgacggccagaacctaatgcccctgctggaaggaagggcgtcccactccgaccacgagttcctcttccactactgtggggtctatctgcacacggtcaggtggcatcagaaggactgtgcaactgtgtggaaagctcattatgtgactcctaaattctaccctgaaggaacaggtgcctgctatgggagtggaatatgttcatgttcgggggatgtaacctaccacgacccaccactcctctttgacatctcaagagacccttcagaagcccttccactgaaccctgacaatgagccattatttgactccgtgatcaaaaagatggaggcagccataagagagcatcgtaggacactaacacctgtcccacagcagttctctgtgttcaacacaatttggaaaccatggctgcagccttgctgtgggaccttccccttctgtgggtgtgacaaggaagatgacatccttcccatggctccctgagaccatgcggaccacgtgttacccaccacaaacttactgttacaatggtcataggagcagagctcacctgactgattcattccatttgggataaaaactgatggcccaacccattgttttatcctcagaaatcagttctttcaagagctcggtgaaattaaagtgggcccatataacagtgaacct

SEQ ID NO: 109069 - DNA, 3161 bp, Homo sapiens
  Payload ID: 1428
  Gene Symbol: ARSI
  Gene Name: arylsulfatase family, member I
  Uniprot ID: Q5FYB1
  ENST ID: ENST00000328668
  CDS Start-End: 581-2290
ccctccacctggggctcggcccggcccggcagatgttacaactttttcgaattctctcccgccgtgtcccctcgacccgcccaacttgtgcctccctccccttcccctctggggtcctgcccacctccctgcagggagctgggctgttttaaggactccgggtggggcgagaggccgggaaagcagaggagagagaaattaggaggcgggagaaatccagggcaagaaggaagaggggagtcagaggatggtagagagcactttttggaagctgccacgccgcgtctcaggctggccgggctgagctggggaagagggagcaaaggcggcgcagggcctgcgcttaggcagcgggaggcagctcggcgcgggcctgacctccccagagcgccccgctgcggccgagcagatccggcccagccgtccggcagccagtcccggaccagacactggaccgtccccggggggcgctgaactccctcgcagcatccgagccggcgggccggtggtgcgccctgggcgcgcgaggtggtgaggccccaggagcccggcgcgccgggacgcgcgggccggcttggcgatgcacaccctcactggcttctccctggtcagcctgctcagcttcggctacctgtcctgggactgggccaagccgagcttcgtggccgacgggcccggggaggctggcgagcagccctcggccgctccgccccagcctccccacatcatcttcatcctcacggacgaccaaggctaccacgacgtgggctaccatggttcagatatcgagacccctacgctggacaggctggcggccaagggggtcaagttggagaattattacatccagcccatctgcacgccttcgcggagccagctcctcactggcaggtaccagatccacacaggactccagcattccatcatccgcccacagcagcccaactgcctgcccctggaccaggtgacactgccacagaagctgcaggaggcaggttattccacccatatggtgggcaagtggcacctgggcttctaccggaaggagtgtctgcccacccgtcggggcttcgacaccttcctgggctcgctcacgggcaatgtggactattacacctatgacaactgtgatggcccaggcgtgtgcggcttcgacctgcacgagggtgagaatgtggcctgggggctcagcggccagtactccactatgctttatgcccagcgcgccagccatatcctggccagccacagccctcagcgtcccctcttcctctatgtggccttccaggcagtacacacacccctgcagtcccctcgtgagtacctgtaccgctaccgcaccatgggcaatgtggcccggcggaagtacgcggccatggtgacctgcatggatgaggctgtgcgcaacatcacctgggccctcaagcgctacggtttctacaacaacagtgtcatcatcttctccagtgacaatggtggccagactttctcggggggcagcaactggccgctccgaggacgcaagggcacttattgggaaggtggcgtgcggggcctaggctttgtccacagtcccctgctcaagcgaaagcaacggacaagccgggcactgatgcacatcactgactggtacccgaccctggtgggtctggcaggtggtaccacctcagcagccgatgggctagatggctacgacgtgtggccggccatcagcgagggccgggcctcaccacgcacggagatcctgcacaacattgacccactctacaaccatgcccagcatggctccctggagggcggctttggcatctggaacaccgccgtgcaggctgccatccgcgtgggtgagtggaagctgctgacaggagaccccggctatggcgattggatcccaccgcagacactggccaccttcccgggtagctggtggaacctggaacgaatggccagtgtccgccaggccgtgtggctcttcaacatcagtgctgacccttatgaacgggaggacctggctggccagcggcctgatgtggtccgcaccctgctggctcgcctggccgaatataaccgcacagccatcccggtacgctacccagctgagaacccccgggctcatcctgactttaatgggggtgcttgggggccctgggccagtgatgaggaagaggaggaagaggaagggagggctcgaagcttctcccggggtcgtcgcaagaaaaaatgcaagatttgcaagcttcgatcctttttccgtaaactcaacaccaggctaatgtcccaacggatctgatggtggggagggagaaaactgtcctttagaggatcttccccactccggcttggccctgctgtttctcagggagaagcctgtcacatctccatctacagggagttggagggtgtagagtcccttggttgaacagggtagggagcctggataggagtgggtgggaataaaccagactgggatgcctgtgtctcagtcctgcctcctcacggacttgctctgtgacctcaggtgacccacatgagcttttagcctcagtttcctcatctgtaaaatgagctctaatgactttgtgactctttggtgtggccctggagcctggggccacggtggagttcctggccggccttgccacttgacaactcctttaaggcttcccccttaacacgggatccctgtggtggtgtttgggagttgcctggaggcaactccaagcctggcccccagctgaagcatggcaatctggctgctctctacagggacccccaagcgctgtgggtggagggcaggggtcgggggggttgaccttcttgggtcttcacatggcctaggccagtcctccggtcagactggtgtcaggcaccgtggtgcaaaattcctcttctggcccctccagtacccagagaaactggctgggccattaactgctgcagcaccaagggtggtagaaagagctgtgaagagcccccaaaccagtaccaggacacctgggttctcctgtgacctggggcacagttcttgccctctaggccttgatttccccacctgcaagtggggatgccagccctggctctgcctccttcatgaggctctggaagactggccaaggttgtggaggagcttgtgaacttgattaaagtgtcgtaacatggaa

SEQ ID NO: 109070 - DNA, 472 bp, Homo sapiens
  Payload ID: 1428
  Gene Symbol: ARSI
  Gene Name: arylsulfatase family, member I
  ENST ID: ENST00000509146
  CDS Start-End: 213-472
atgcagttctggaaaggtgaatcggttccttctgcctgtctgggttttgcaaccccgtggtgggacaattggccaggtgcatattcctcagaaggtaccagatccacacaggactccagcattccatcatccgcccacagcagcccaactgcctgcccctggaccaggtgacactgccacagaagctgcaggaggcaggttattccacccatatggtgggcaagtggcacctgggcttctaccggaaggagtgtctgcccacccgtcggggcttcgacaccttcctgggctcgctcacgggcaatgtggactattacacctatgacaactgtgatggcccaggcgtgtgcggcttcgacctgcacgagggtgagaatgtggcctgggggctcagcggccagtactccactatgctttatgcccagcgcgccagccatatcctggccagccacagccctcagcgtcccctctt

SEQ ID NO: 109071 - DNA, 1429 bp, Homo sapiens
  Payload ID: 1428
  Gene Symbol: ARSI
  Gene Name: arylsulfatase family, member I
  Uniprot ID: Q5FYB1
  ENST ID: ENST00000515301
  CDS Start-End: 149-1429
gggagggcctcctcatgcagttctggaaaggtaccagatccacacaggactccagcattccatcatccgcccacagcagcccaactgcctgcccctggaccaggtgacactgccacagaagctgcaggaggcaggttattccacccatatggtgggcaagtggcacctgggcttctaccggaaggagtgtctgcccacccgtcggggcttcgacaccttcctgggctcgctcacgggcaatgtggactattacacctatgacaactgtgatggcccaggcgtgtgcggcttcgacctgcacgagggtgagaatgtggcctgggggctcagcggccagtactccactatgctttatgcccagcgcgccagccatatcctggccagccacagccctcagcgtcccctcttcctctatgtggccttccaggcagtacacacacccctgcagtcccctcgtgagtacctgtaccgctaccgcaccatgggcaatgtggcccggcggaagtacgcggccatggtgacctgcatggatgaggctgtgcgcaacatcacctgggccctcaagcgctacggtttctacaacaacagtgtcatcatcttctccagtgacaatggtggccagactttctcggggggcagcaactggccgctccgaggacgcaagggcacttattgggaaggtggcgtgcggggcctaggctttgtccacagtcccctgctcaagcgaaagcaacggacaagccgggcactgatgcacatcactgactggtacccgaccctggtgggtctggcaggtggtaccacctcagcagccgatgggctagatggctacgacgtgtggccggccatcagcgagggccgggcctcaccacgcacggagatcctgcacaacattgacccactctacaaccatgcccagcatggctccctggagggcggctttggcatctggaacaccgccgtgcaggctgccatccgcgtgggtgagtggaagctgctgacaggagaccccggctatggcgattggatcccaccgcagacactggccaccttcccgggtagctggtggaacctggaacgaatggccagtgtccgccaggccgtgtggctcttcaacatcagtgctgacccttatgaacgggaggacctggctggccagcggcctgatgtggtccgcaccctgctggctcgcctggccgaatataaccgcacagccatcccggtacgctacccagctgagaacccccgggctcatcctgactttaatgggggtgcttgggggccctgggccagtgatgaggaagaggaggaagaggaagggagggctcgaagcttctcccggggtcgtcgcaagaaaaaatgcaagatttgcaagcttcgatcctttttccgtaaactcaacaccaggctaatgtcccaacggatctga

SEQ ID NO: 109072 - DNA, 4657 bp, Homo sapiens
  Payload ID: 1429
  Gene Symbol: ARSJ
  Gene Name: arylsulfatase family, member J
  Uniprot ID: Q5FYB0
  ENST ID: ENST00000315366
  CDS Start-End: 868-2667
ggcaaaagaactcggagtgccaaagctaaataagttagctgagaaaacgcacgcagtttgcagcgcctgcgccgggtgcgccaactacgcaaagaccaagcgggctccgcgcggaccggccgcggggctagggacccggctttggccttcaggctccctagcagcggggaaaaggaattgctgcccggagtttctgcggaggtggagggagatcaggaaacggcttcttcctcacttcgccgcctggtgagtgtcggggagattggcaaacgcctaggaaaggactggggaaaatagccctgggaaagtggagaaggtgatcaggaggccggtccactacggcagtttatctgtctgatcagagccagacgcgacgcgtccacttcgcagttctttccaggtgtggggaccgcaggacagacggccgatcccgccgccctccgtaccagcactcccaggagagtcagcctcgctccccaacgtcgagggcgctctggccacgaaaagttcctgtccactgtgattctcaattccttgcttggtttttttctccagagaacttttgggtggagatattaacttttttcttttttttttccttggtggaagctgctctagggaggggggaggaggaggagaaagtgaaatgtgctggagaagagcgagccctccttgttcttccggagtcccatccattaagccatcacttctggaagattaaagttgtcggacatggtgacagctgagaggagaggaggatttcttgccaggtggagagtcttcaccgtctgttgggtgcatgtgtgcgcccgcagcggcgcggggcgcgtggttctccgcgtggagtctcacctgggacctgagtgaatggctcccaggggctgtgcggggcatccgcctccgccttctccacaggcctgtgtctgtcctggaaagatgctagcaatgggggcgctggcaggattctggatcctctgcctcctcacttatggttacctgtcctggggccaggccttagaagaggaggaagaaggggccttactagctcaagctggagagaaactagagcccagcacaacttccacctcccagccccatctcattttcatcctagcggatgatcagggatttagagatgtgggttaccacggatctgagattaaaacacctactcttgacaagctcgctgccgaaggagttaaactggagaactactatgtccagcctatttgcacaccatccaggagtcagtttattactggaaagtatcagatacacaccggacttcaacattctatcataagacctacccaacccaactgtttacctctggacaatgccaccctacctcagaaactgaaggaggttggatattcaacgcatatggtcggaaaatggcacttgggtttttacagaaaagaatgcatgcccaccagaagaggatttgataccttttttggttcccttttgggaagtggggattactatacacactacaaatgtgacagtcctgggatgtgtggctatgacttgtatgaaaacgacaatgctgcctgggactatgacaatggcatatactccacacagatgtacactcagagagtacagcaaatcttagcttcccataaccccacaaagcctatatttttatatattgcctatcaagctgttcattcaccactgcaagctcctggcaggtatttcgaacactaccgatccattatcaacataaacaggaggagatatgctgccatgctttcctgcttagatgaagcaatcaacaacgtgacattggctctaaagacttatggtttctataacaacagcattatcatttactcttcagataatggtggccagcctacggcaggagggagtaactggcctctcagaggtagcaaaggaacatattgggaaggagggatccgggctgtaggctttgtgcatagcccacttctgaaaaacaagggaacagtgtgtaaggaacttgtgcacatcactgactggtaccccactctcatttcactggctgaaggacagattgatgaggacattcaactagatggctatgatatctgggagaccataagtgagggtcttcgctcaccccgagtagatattttgcataacattgaccccatatacaccaaggcaaaaaatggctcctgggcagcaggctatgggatctggaacactgcaatccagtcagccatcagagtgcagcactggaaattgcttacaggaaatcctggctacagcgactgggtcccccctcagtctttcagcaacctgggaccgaaccggtggcacaatgaacggatcaccttgtcaactggcaaaagtgtatggcttttcaacatcacagccgacccatatgagagggtggacctatctaacaggtatccaggaatcgtgaagaagctcctacggaggctctcacagttcaacaaaactgcagtgccggtcaggtatccccccaaagaccccagaagtaaccctaggctcaatggaggggtctggggaccatggtataaagaggaaaccaagaaaaagaagccaagcaaaaatcaggctgagaaaaagcaaaagaaaagcaaaaaaaagaagaagaaacagcagaaagcagtctcaggttcaacttgccattcaggtgttacttgtggataagcacaaatatttcctgtttggttaaactttaatcagttcttatctttcatctgtttcctaggtaaaccagcaaatttggctcgataatatcgctggcctaagcgtcaggcttgttttcatgctgtgccactccagagacttctgccacctggccgccacactgaaaactgtcctgctcagtgccaaggtgctactcttgcaagccacacttagagagagtggagatgtttatttctcttgctcctttagaaaacgtggtgagtcctgagttccactgctgtgcttcagtcaactgaccaaacactgctttgaattataggaggagaacaataacctaccatccgcaagcatgctaatttgatggaagttacagggtataccatccgcaagcatgctaatttgatggaagttacagggtagcatgattaaaactacctttgataaattacagtcaaagattgtgtcacctcaaaggccttgaagaatatattttcttggtgaatttttgtatgtctgtcatatgacacttgggttttttaattaattctattttatatatatatatatgtttcttttcctgtgaaaagctgtttttctcacatgtgaacagcttgcacctcattttaccatgcgtgagggaatggcaaataagaatgtttgagcacactgcccacaatgaatgtaactattttctaaacactttactagaagaacatttcagtataaaaaacctaatttatttttacagaaaaatattttgttgtttttataaaaagttatgcaaatgactttattttatttttatttcctgcataccattagaataattttatttcatttcttcaaattaccaagcactgtaatactataaattaatgtaatactgtgtgaattcagactataaaaaacatcattcagaaaactttataatcgtcattgttcaaccaagattttgaatgtaataagatgaatatattccttacaaattacttggaaattcaatgtttgtgcagagttgagacaactttattgtttctatcataaactatttatgtatcttaattattaaaatgatttactttatggcactagaaaatttactgtggcttttctgatctaacttctagctaaaattgtatcattggtcctaaaaaataaaaatctttactaataggcaattgaaggaatggtttgctaacaaccacagtaatataatatgattttacagatagatgcttccccttggctatgacatggagaaagattttcccataataataactaacatttatattaggttggtgcaaaactagttgcggtttttcccattaaaagtaataaacttactcttatacaaagtggacactgtggggagatacagagaaatggaagatacggatcctgcctggagtaggtaaccttgcttggaaaccccacatgcaaacgtcatgaggagaattaaaggagtattatcagtaatgaagtttatcatgggtcatcaatgagcatagattggtgtggatcctgtagaccctggtgttttctttgaagtgccctctcctaatgcagaggccttgaagcttacagtatacacttgaaaagtcacagatagctagaattatgatctttgaagttataactgtgatctgaaaatgtgtgtggtggtatgacagcataccattaaatacatttacatcacagctcaaaggactgtgatataatccatttatatcacaactcaaaggactgtgatataatccatttatatcacagctcacagtttctgaaaatgtataaaagaatctataatctagtactgaaattactaaattgggtaagatgatttaaatgattttaattttaacattttatttctagaatatatggctccattttattttatagtgtaaagttgtatttcctaaagtttgtgttttgtcgacagtatcttttaaatgagtcttaaaaataaaggcatattgttcatgtt

SEQ ID NO: 109073 - DNA, 2253 bp, Homo sapiens
  Payload ID: 1429
  Gene Symbol: ARSJ
  Gene Name: arylsulfatase family, member J
  ENST ID: ENST00000509829
  CDS Start-End: 451-852
agtttgcagcgcctgcgccgggtgcgccaactacgcaaagaccaagcgggctccgcgcggaccggccgcggggctagggacccggctttggccttcaggctccctagcagcggggaaaaggaattgctgcccggagtttctgcggaggtggagggagatcaggaaacggcttcttcctcacttcgccgcctgctgctctagggaggggggaggaggaggagaaagtgaaatgtgctggagaagagcgagccctccttgttcttccggagtcccatccattaagccatcacttctggaagattaaagttgtcggacatggtgacagctgagaggagaggaggatttcttgccaggtggagagtcttcaccgtctgttgggtgcatgtgtgcgcccgcagcggcgcggggcgcgtggttctccgcgtggagtctcacctgggacctgagtgaatggctcccaggggctgtgcggggcatccgcctccgccttctccacaggcctgtgtctgtcctggaaagatgctagcaatgggggcgctggcaggattctggatcctctgcctcctcacttatggttacctgtcctggggccaggccttagaagaggaggaagaaggggccttactagctcaagctggagagaaactagagcccagcacaacttccacctcccagccccatctcattttcatcctagcggatgatcagggatttagagatgtgggttaccacggatctgagattaaaacacctactcttgacaagctcgctgccgaaggagttaaactggagaactactatgtccagcctatttgcacaccatccaggagtcagtttattactggaaaatgaggaaactgaggatcagagggattaagtacttcccaaaaccatacaggtaataagcagtggagcaaattcaaacccaggtatcagatacacaccggacttcaacattctatcataagacctacccaacccaactgtttacctctggacaatgccaccctacctcagaaactgaaggaggttggatattcaacgcatatggtcggaaaatggcacttgggtttttacagaaaagaatgcatgcccaccagaagaggatttgataccttttttggttcccttttgggaagtggggattactatacacactacaaatgtgacagtcctgggatgtgtggctatgacttgtatgaaaacgacaatgctgcctgggactatgacaatggcatatactccacacagatgtacactcagagagtacagcaaatcttagcttcccataaccccacaaagcctatatttttatatattgcctatcaagctgttcattcaccactgcaagctcctggcaggtatttcgaacactaccgatccattatcaacataaacaggaggagatatgctgccatgctttcctgcttagatgaagcaatcaacaacgtgacattggctctaaagacttatggtttctataacaacagcattatcatttactcttcagataatggtggccagcctacggcaggagggagtaactggcctctcagaggtagcaaaggaacatattgggaaggagggatccgggctgtaggctttgtgcatagcccacttctgaaaaacaagggaacagtgtgtaaggaacttgtgcacatcactgactggtaccccactctcatttcactggctgaaggacagattgatgaggacattcaactagatggctatgatatctgggagaccataagtgagggtcttcgctcaccccgagtagatattttgcataacattgaccccatatacaccaaggcaaaaaatggctcctgggcagcaggctatgggatctggaacactgcaatccagtcagccatcagagtgcagcactggaaattgcttacaggaaatcctggctacagcgactgggtcccccctcagtctttcagcaacctgggaccgaaccggtggcacaatgaacggatcaccttgtcaactggcaaaagtgtatggcttttcaacatcacagccgacccatatgagagggtggacctatctaacaggtatccaggaatcgtgaagaagctcctacggaggctctcacagttcaacaaaactgcagtgccggtcaggtatccccccaaagaccccagaagtaaccctaggctcaatggaggggtctggggaccatggtataaagaggaaaccaagaaaaagaagccaagcaaaaatcaggctgagaaaaagcaaaag

SEQ ID NO: 109074 - DNA, 3354 bp, Homo sapiens
  Payload ID: 1430
  Gene Symbol: ARSK
  Gene Name: arylsulfatase family, member K
  Uniprot ID: Q6UWY0
  ENST ID: ENST00000380009
  CDS Start-End: 206-1816
aaaagcgggaatttctctgttgcgcatgtgcgcgctctccgcctgataggagttgtagttctgcgggtgaagctcggcgttactatcaagcaaccaaactgcaagctttgggagttgttcgctgtccctgccctgctctgctagggagagaacgccagagggaggcggctggcccggcggcaggctctcagaaccgctaccggcgatgctactgctgtgggtgtcggtggtcgcagccttggcgctggcggtactggcccccggagcaggggagcagaggcggagagcagccaaagcgcccaatgtggtgctggtcgtgagcgactccttcgatggaaggttaacatttcatccaggaagtcaggtagtgaaacttccttttatcaactttatgaagacacgtgggacttcctttctgaatgcctacacaaactctccaatttgttgcccatcacgcgcagcaatgtggagtggcctcttcactcacttaacagaatcttggaataattttaagggtctagatccaaattatacaacatggatggatgtcatggagaggcatggctaccgaacacagaaatttgggaaactggactatacttcaggacatcactccattagtaatcgtgtggaagcgtggacaagagatgttgctttcttactcagacaagaaggcaggcccatggttaatcttatccgtaacaggactaaagtcagagtgatggaaagggattggcagaatacagacaaagcagtaaactggttaagaaaggaagcaattaattacactgaaccatttgttatttacttgggattaaatttaccacacccttacccttcaccatcttctggagaaaattttggatcttcaacatttcacacatctctttattggcttgaaaaagtgtctcatgatgccatcaaaatcccaaagtggtcacctttgtcagaaatgcaccctgtagattattactcttcttatacaaaaaactgcactggaagatttacaaaaaaagaaattaagaatattagagcattttattatgctatgtgtgctgagacagatgccatgcttggtgaaattattttggcccttcatcaattagatcttcttcagaaaactattgtcatatactcctcagaccatggagagctggccatggaacatcgacagttttataaaatgagcatgtacgaggctagtgcacatgttccgcttttgatgatgggaccaggaattaaagccggcctacaagtatcaaatgtggtttctcttgtggatatttaccctaccatgcttgatattgctggaattcctctgcctcagaacctgagtggatactctttgttgccgttatcatcagaaacatttaagaatgaacataaagtcaaaaacctgcatccaccctggattctgagtgaattccatggatgtaatgtgaatgcctccacctacatgcttcgaactaaccactggaaatatatagcctattcggatggtgcatcaatattgcctcaactctttgatctttcctcggatccagatgaattaacaaatgttgctgtaaaatttccagaaattacttattctttggatcagaagcttcattccattataaactaccctaaagtttctgcttctgtccaccagtataataaagagcagtttatcaagtggaaacaaagtataggacagaattattcaaacgttatagcaaatcttaggtggcaccaagactggcagaaggaaccaaggaagtatgaaaatgcaattgatcagtggcttaaaacccatatgaatccaagagcagtttgaacaaaaagtttaaaaatagtgttctagagatacatataaatatattacaagatcataattatgtattttaaatgaaacagttttaataattaccaagttttggccgggcacagtggctcacacctgtaatcccaggactttgggaggctgaggaaagcagatcacaaggtcaagagattgagaccatcctggccaacatggtgaaaccctgtctctactaaaaatacaaaaattagctgggcgcggtggtgcacacctatagtctcagctactcagaggctgaggcaggaggatcgcttgaacccgggaggcagcagttgcagtgagctgagattgcgccactgtactccagcctggcaacagagtgagactgtgtcgcaaaaaaataaaaataaaataataataattaccaatttttcattattttgtaagaatgtagtgtattttaagataaaatgccaatgattataaaatcacatattttcaaaaatggttattatttaggcctttgtacaatttctaacaatttagtggaagtatcaaaagaattgaagcaaatactgtaacagttatgttcctttaaataatagagaatataaaatattgtaataatatgtatcataaaatagttgtatgtgagcatttgatggtgctcgatgagttacttgtatttgatgggattgtttggatgtatttaatgggagtatttggagtatttaacgggatgtaaaccctggatgtacctgattttgttactgttttattttaataggtaatatatatacagggtaaaagcttcaaatggtacaaaagggttaacagtgatcgtgaagtctctgtcctttccctcttccctgccatccagttccccctccaagaagcaagtaccgaaaccacctgcttacgcatttttagagattggccacaaatttataaacaaatgtatatattcctttccccctacacaaacggtaacatactgcacacattgttctgcatgttgcttctttttccttttttttttcacttaacagtagatatctagaggtgaaattactgagtcaagactatatttagcaaaattacactagatactacaaattacctctaaagaaggtatactaactgataatctcaccatcaatgcatgtcttcttatcctttgccaacctaacagataaaaatgttctatttttatttttctttttatgagtaacgtagagcatattttcatgtatttaacagccactggaatctgctttaccatggcctttcctatttctattctttgcctatttttctgttggttgttggtctttgttttgtattacaggtgtgctttagatattagctttttgtaagagatcctgcaaatatcttctttccagtttgtcattgtcatttgtcttttgactttgttctggtattttttgatatgtagaaatttttattttcatgtaagcaaatttatgaatctttgtacaccataagtatatacaattatgatttgtcaattaaaaatattagtacaaaattta

SEQ ID NO: 109075 - DNA, 1088 bp, Homo sapiens
  Payload ID: 1430
  Gene Symbol: ARSK
  Gene Name: arylsulfatase family, member K
  ENST ID: ENST00000504763
  CDS Start-End: 113-253
ccaaactgcaagctttgggagttgttcgctgtccctgccctgctctgctagggagagaacgccagagggaggcggctggcccggcggcaggctctcagaaccgctaccggcgatgctactgctgtgggtgtcggtggtcgcagccttggcgctggcggtactggcccccggagcaggggagcagaggcggagagcagccaaagcgcccaatgtggtgctggtcgtgagcgactccttcattcctgatgattaaaattacatagtctggatgtgcccatgggattttttgaaaatattacttaaagttatctttgtgatttaaacttagagaatgggcagtactggaaattgactagatggcattttattacagagtgctcttgtaatcaaaggcaaatgaaggaagcaggattgtgcagaggagaagctgaattttgttgccatcttatgaatgacagttctcaaactagtatggtgcttcagagctgctttccaataggagtgaggagaacagacctttccacctgcatgttggatggccactggttgtgggctgctcctagaatggggcatggtgttgggcaaagcagctgtcttcagcagaggcaattgttcattcctaaaagggaatccgaatgtggatcacaacatcccagaaacttccaaagatgactgagatatataggtttgttattttttttagtgtagtatgaatgcatagatttttctatatttgtgcttaaattttttgcattcacggccgggcgcggtggctcacgcctgtaatcccagcactttgggaggccgaggtgggcggatcacgaggtcaagagatcaagaccatcctggctaacacagtgaaaccccgtctctactaaaaatacaaaaaaattagccgggcgtggtttcgggcgcctgtagtcccagctactcgggaggctgaagcaggagaatggcgtgaacctgggaggcggagcttgcagtgacctgatatcgcaccactgcactccagcctgggcgacggagcgagagtccgtctcgaaaaaaaaataaaaataaaaataaaaaaatttttaaaaaataaaaaa

SEQ ID NO: 109076 - DNA, 1958 bp, Homo sapiens
  Payload ID: 1430
  Gene Symbol: ARSK
  Gene Name: arylsulfatase family, member K
  ENST ID: ENST00000513814
  CDS Start-End: 143-604
cgggtgaagctcggcgttactatcaagcaaccaaactgcaagctttgggagttgttcgctgtccctgccctgctctgctagggagagaacgccagagggaggcggctggcccggcggcaggctctcagaaccgctaccggcgatgctactgctgtgggtgtcggtggtcgcagccttggcgctggcggtactggcccccggagcaggggagcagaggcggagagcagccaaagcgcccaatgtggtgctggtcgtgagcgactccttcgatggaaggttaacatttcatccaggaagtcaggtagtgaaacttccttttatcaactttatgaagacacgtgggacttcctttctgaatgcctacacaaactctccaatttgttgcccatcacgcgcagcaatgtggagtggcctcttcactcacttaacagaatcttggaataattttaagggtctagatccaaattatacaacatggatggatgtcatggagaggcatggctaccgaacacagaaatttgggaaactggactatacttcaggacatcactccattaggcacagtgaacgtgggtcaactaatcaaagaagtgaaaaagtttgagaaagtaatcgtgtggaagcgtggacaagagatgttgctttcttactcagacaagaaggcaggcccatggttaatcttatccgtaacaggactaaagtcagagtgatggaaagggattggcagaatacagacaaagcagtaaactggttaagaaaggaagcaattaattacactgaaccatttgttatttacttgggattaaatttaccacacccttacccttcaccatcttctggagaaaattttggatcttcaacatttcacacatctctttattggcttgaaaaagtgtctcatgatgccatcaaaatcccaaagtggtcacctttgtcagaaatgcaccctgtagattattactcttcttatacaaaaaactgcactggaagatttacaaaaaaagaaattaagaatattagagcattttattatgctatgtgtgctgagacagatgccatgcttggtgaaattattttggcccttcatcaattagatcttcttcagaaaactattgtcatatactcctcagaccatggagagctggccatggaacatcgacagttttataaaatgagcatgtacgaggctagtgcacatgttccgcttttgatgatgggaccaggaattaaagccggcctacaagtatcaaatgtggtttctcttgtggatatttaccctaccatgcttgatattgctggaattcctctgcctcagaacctgagtggatactctttgttgccgttatcatcagaaacatttaagaatgaacataaagtcaaaaacctgcatccaccctggattctgagtgaattccatggatgtaatgtgaatgcctccacctacatgcttcgaactaaccactggaaatatatagcctattcggatggtgcatcaatattgcctcaactctttgatctttcctcggatccagatgaattaacaaatgttgctgtaaaatttccagaaattacttattctttggatcagaagcttcattccattataaactaccctaaagtttctgcttctgtccaccagtataataaagagcagtttatcaagtggaaacaaagtataggacagaattattcaaacgttatagcaaatcttaggtggcaccaagactggcagaaggaaccaaggaagtatgaaaatgcaattgatcagtggcttaaaacccatatgaatccaagagcagtttgaacaaaaagtttaaaaatagtgttctagagatacatataaatatattacaagatcataattatgtattttaaatgaaacagttttaataattaccaagttttggccgggcacagtggctcacacctgtaatcccaggactttgggaggctgagga

SEQ ID NO: 109077 - DNA, 1920 bp, Homo sapiens
  Payload ID: 1430
  Gene Symbol: ARSK
  Gene Name: arylsulfatase family, member K
  ENST ID: ENST00000504873
  CDS Start-End: 97-1284
gggagttgttcgctgtccctgccctgctctgctagggagagaacgccagagggaggcggctggcccggcggcaggctctcagaaccgctaccggcgatgctactgctgtgggtgtcggtggtcgcagccttggcgctggcggtactggcccccggagcaggggagcagaggcggagagcagccaaagcgcccaatgtggtgctggtcgtgagcgactccttcgatggaaggttaacatttcatccaggaagtcaggtagtgaaacttccttttatcaactttatgaagacacgtgggacttcctttctgaatgcctacacaaactctccaatttgttgcccatcacgcgcagcaatgtggagtggcctcttcactcacttaacagaatcttggaataattttaagggtctagatccaaattatacaacatggatggatgtcatggagaggcatggctaccgaacacagaaatttgggaaactggactatacttcaggacatcactccattagtaatcgtgtggaagcgtggacaagagatgttgctttcttactcagacaagaaggcaggcccatggttaatcttatccgtaacaggactaaagtcagagtgatggaaagggattggcagaatacagacaaagcagtaaactggttaagaaaggaagcaattaattacactgaaccatttgttatttacttgggattaaatttaccacacccttacccttcaccatcttctggagaaaattttggatcttcaacatttcacacatctctttattggcttgaaaaagtgtctcatgatgccatcaaaatcccaaagtggtcacctttgtcagaaatgcaccctgtagattattactcttcttatacaaaaaactgcactggaagatttacaaaaaaagaaattaagaatattagagcattttattatgctatgtgtgctgagacagatgccatgcttggtgaaattattttggcccttcatcaattagatcttcttcagaaaactattgtcatatactcctcagaccatggagagctggccatggaacatcgacagttttataaaatgagcatgtacgaggctagtgcacatgttccgcttttgatgatgggaccaggaattaaagccggcctacaagtatcaaatgtggtttctcttgtggatatttaccctaccatgcttgatgagaaaactgaggttgagataagtaaattacttgctgaagtccacatggccagtgggatattgctggaattcctctgcctcagaacctgagtggatactctttgttgccgttatcatcagaaacatttaagaatgaacataaagtcaaaaacctgcatccaccctggattctgagtgaattccatggatgtaatgtgaatgcctccacctacatgcttcgaactaaccactggaaatatatagcctattcggatggtgcatcaatattgcctcaactctttgatctttcctcggatccagatgaattaacaaatgttgctgtaaaatttccagaaattacttattctttggatcagaagcttcattccattataaactaccctaaagtttctgcttctgtccaccagtataataaagagcagtttatcaagtggaaacaaagtataggacagaattattcaaacgttatagcaaatcttaggtggcaccaagactggcagaaggaaccaaggaagtatgaaaatgcaattgatcagtggcttaaaacccatatgaatccaagagcagtttgaacaaaaagtttaaaaatagtgttctagagatacatataaatatattacaagatcataattatgtattttaaatgaaacagttttaataattaccaagttttggccgggcacagtggctcacacctgtaatcccaggactttgggaggctgagga

SEQ ID NO: 109078 - DNA, 572 bp, Homo sapiens
  Payload ID: 1430
  Gene Symbol: ARSK
  Gene Name: arylsulfatase family, member K
  ENST ID: ENST00000512106
  CDS Start-End: 1-279
agagcagccaaagcgcccaatgtggtgctggtcgtgagcgactccttcgatggaaggttaacatttcatccaggaagtcaggtagtgaaacttccttttatcaactttatgaagacacgtgggacttcctttctgaatgcctacacaaactctccaatttgttgcccatcacgcgcagtaatcgtgtggaagcgtggacaagagatgttgctttcttactcagacaagaaggcaggcccatggttaatcttatccgtaacaggactaaagtcagagtgatggaaagggattggcagaatacagacaaagcagtaaactggttaagaaaggaagcaattaattacactgaaccatttgttatttacttgggattaaatttaccacacccttacccttcaccatcttctggagaaaattttggatcttcaacatttcacacatctctttattggcttgaaaaagtgtctcatgatgccatcaaaatcccaaagtggtcacctttgtcagaaatgcaccctgtagattattactcttcttatacaaaaaactgcactggaagatttacaaaaaaa

SEQ ID NO: 109079 - DNA, 4642 bp, Homo sapiens
  Payload ID: 1431
  Gene Symbol: ARSG
  Gene Name: arylsulfatase G
  Uniprot ID: Q96EG1
  ENST ID: ENST00000448504
  CDS Start-End: 797-2374
ggctgcgcccaggccggcgggcccagcagctgcgaaccgccggcgcaccacctgtttccgcgcccggggacttccccggcggggctcagaagtgtgggatcggtcgcttggcttcccctggcgtcagcgacccagggtaacctcctccactgctgcgtgccgtgcaggcctgcctgtgtgagagccacgtgtgccgcgctctgggcacagccttggaaagtcaggaccgcgacggcagcagagcagaaaccttacagaaacatgaagccctcaaccatctgctactcagttattcggggctgacggcggcttctagaacatccaggtgttctgcagatgcgagaactcatcctgtagtcaccagatggagtcccaaacagccaagcagatgtaaggcctgtgctgtggctctgaggccctgaatacagaagggtcactttcttagtggccaaagagcagttgttgacattgatgtctaattattgaacacgaccagtcattttactgagctgcggtgaggaaacactgaccatagaagatcaagccaaatgagggattgcaaatttcctgattcttttgaattaggattccagatgggggcctcatttctacagcccccaacattcctatagccgttatcactgccatcaccactgccaccagcatcttcttgcagattccacccctgctccccagagacttcctgctttgaaagtgagcagaaaggaagctctcagaaaaatctctagtggtggctgccgtcgctccagacaatcggaatcctgccttcaccaccatgggctggctttttctaaaggttttgttggcgggagtgagtttctcaggatttctttatcctcttgtggatttttgcatcagtgggaaaacaagaggacagaagccaaactttgtgattattttggccgatgacatggggtggggtgacctgggagcaaactgggcagaaacaaaggacactgccaaccttgataagatggcttcggagggaatgaggtttgtggatttccatgcagctgcctccacctgctcaccctcccgggcttccttgctcaccggccggcttggccttcgcaatggagtcacacgcaactttgcagtcacttctgtgggaggccttccgctcaacgagaccaccttggcagaggtgctgcagcaggcgggttacgtcactgggataataggcaaatggcatcttggacaccacggctcttatcaccccaacttccgtggttttgattactactttggaatcccatatagccatgatatgggctgtactgatactccaggctacaaccaccctccttgtccagcgtgtccacagggtgatggaccatcaaggaaccttcaaagagactgttacactgacgtggccctccctctttatgaaaacctcaacattgtggagcagccggtgaacttgagcagccttgcccagaagtatgctgagaaagcaacccagttcatccagcgtgcaagcaccagcgggaggcccttcctgctctatgtggctctggcccacatgcacgtgcccttacctgtgactcagctaccagcagcgccacggggcagaagcctgtatggtgcagggctctgggagatggacagtctggtgggccagatcaaggacaaagttgaccacacagtgaaggaaaacacattcctctggtttacaggagacaatggcccgtgggctcagaagtgtgagctagcgggcagtgtgggtcccttcactggattttggcaaactcgtcaagggggaagtccagccaagcagacgacctgggaaggagggcaccgggtcccagcactggcttactggcctggcagagttccagttaatgtcaccagcactgccttgttaagcgtgctggacatttttccaactgtggtagccctggcccaggccagcttacctcaaggacggcgctttgatggtgtggacgtctccgaggtgctctttggccggtcacagcctgggcacagggtgctgttccaccccaacagcggggcagctggagagtttggagccctgcagactgtccgcctggagcgttacaaggccttctacattaccggtggagccagggcgtgtgatgggagcacggggcctgagctgcagcataagtttcctctgattttcaacctggaagacgataccgcagaagctgtgcccctagaaagaggtggtgcggagtaccaggctgtgctgcccgaggtcagaaaggttcttgcagacgtcctccaagacattgccaacgacaacatctccagcgcagattacactcaggacccttcagtaactccctgctgtaatccctaccaaattgcctgccgctgtcaagccgcataacagaccaatttttattccacgaggaggagtacctggaaattaggcaagtttgcttccaaatttcatttttaccctctttacaaacacacgctttagtttagtcttggagtttagttttggagttagccttgcatatcccttctgtatcctgtccctcctccacgccgacccgagagcagctgagctgcgctggctctgggcagggagtgtgccttaatgggaagcacacgggctttggagtcaggcacaggtgccagctccagcttttgaacttgggcaattgtttaacctaacctgcaagttgattttgagggttaaataaaggcatacatgaaaatgcctggcaaattacctgacacagagcagacattcaatacattttagtttccttgtttctctggttcccagtttctctggtcattttggtgtaaatccattctaattagtatttagggcagagcttctctctcttttctctttttttccttccacaaaccagtgtactcactggtctccatctttaatatgcaaacaaatcacctgggatcttgtgagaatccggattccgtctcagtagggctcgagtagatcctgaaatcctacatttctatcaaacaatgccttgaggagcacagatttagaccaaagttaggtcgttttccagatctcagagcagacgagtccatggataagtctgtggcccaatccccttcctctccttttaagggtgaaatgactgcatttaaaagaagttaaagagttcctcctgtcccctataaccacaaggaaacaaaaaaatatataaaaacctcaaaaatgcattgccatgattttattattagtgtccaaaatgggactcccaagtaataaatgatttattccagccacagccaaaaaagactttgcctggctaaaagagtctctctctaagtatgtaatatacaagaaatacaattcaaagagatgttcctataagtacattttttacacggcatatatttaaaaaggaggccccttttaatataaaattccggttatataccaatatggttaattagcatttacactatagtttgaacgtattttaaatagcatgatgtgtatacaatgtctcccgcgcccattggcaaccagggtcgtgggaagcttggtgaggagttaaccaggtcctgtggtttaagcagtggagcacccgggattcctgcccccctttctgctcacacaattgcactccattcttccgccttccttgttttctccaaaaccacctgataggggggatgtcctgatttctgaggtgtgcttctcatcatgactgcttcgttttgcccttctgatttccacggcacaagattatctaccaaaatcaaaacagaatggccttactcttctcaggaagaggctggtaggcaggtgcattatcaacaggtctgtgcccatgcagagtgagcagggagaggctgggcactgtggaatttttctgtctgaactcgctcatggccacagaatggtcacccagcttatttaggtgtagacaagtatgacacagttctagaaaatactgactataaaaatgtctctgtgtgtgtgtgtatgtatttatatgtatatgtatatatttttaaaaggctcatcttacttgtaaacatggactgctcaatcactattaaaaagtcagtttaggctgggcgcggtggctcacgcctgtaatcccagaactttgggaggctgaggtgggtggatcactaggtcaggagtttgagaccagcctggccaacatggtgaaaccccatcgctactaaaaaatacaaaaattagccgggcatggtggcgctcacctgtaatcccagctactcgggaggctgaggcaggagagaatcgcttgaaccggggaggtggaggctgcagtgagccgagatcgcaccactgcactccagcctgggcgatggagcaagactccatctcaaaaaaaaaaaagtcagtttaggctgggcgcagtggctcacacctgtaatcccagcactttaggaggctgaggggggtgatcacctgaggtcaggagtttgagaccagcctggccaacatggtgaaatcctgtctctactaaaaatacaaaatttagctgggcatggtagcatgcctgaaaccccagctacttgggaggctgaggcactagaatcacttgaacctaggaggtggaggttgcagtgagtggagatcacgccaacacattctagcctgagggacagagtgagactctatcatctc

SEQ ID NO: 109080 - DNA, 1733 bp, Homo sapiens
  Payload ID: 1431
  Gene Symbol: ARSG
  Gene Name: arylsulfatase G
  ENST ID: ENST00000452479
  CDS Start-End: 326-1411
gcgccggtcgcgcgcccgccagcctgccgcctgggctgggggtcacgaaaggtttgtggatttccatgcagctgcctccacctgctcaccctcccgggcttccttgctcaccggccggcttggccttcgcaatggagtcacacgcaactttgcagtcacttctgtgggaggccttccgctcaacgagaccaccttggcagaggtgctgcagcaggcgggttacgtcactgggataataggcaaatggcatcttggacaccacggctcttatcaccccaacttccgtggttttgattactactttggaatcccatatagccatgatatgggctgtactgatactccaggctacaaccaccctccttgtccagcgtgtccacagggtgatggaccatcaaggaaccttcaaagagactgttacactgacgtggccctccctctttatgaaaacctcaacattgtggagcagccggtgaacttgagcagccttgcccagaagtatgctgagaaagcaacccagttcatccagcgtgcaagcaccagcgggaggcccttcctgctctatgtggctctggcccacatgcacgtgcccttacctgtgactcagctaccagcagcgccacggggcagaagcctgtatggtgcagggctctgggagatggacagtctggtgggccagatcaaggacaaagttgaccacacagtgaaggaaaacacattcctctggtttacaggagacaatggcccgtgggctcagaagtgtgagctagcgggcagtgtgggtcccttcactggattttggcaaactcgtcaagggggaagtccagccaagcagacgacctgggaaggagggcaccgggtcccagcactggcttactggcctggcagagttccagttaatgtcaccagcactgccttgttaagcgtgctggacatttttccaactgtggtagccctggcccaggccagcttacctcaaggacggcgctttgatggtgtggacgtctccgaggtgctctttggccggtcacagcctgggcacagggtgctgttccaccccaacagcggggcagctggagagtttggagccctgcagactgtccgcctggagcgttacaaggccttctacattaccggtggagccagggcgtgtgatgggagcacggggcctgagctgcagcataagtttcctctgattttcaacctggaagacgataccgcagaagctgtgcccctagaaagaggtggtgcggagtaccaggctgtgctgcccgaggtcagaaaggttcttgcagacgtcctccaagacattgccaacgacaacatctccagcgcagattacactcaggacccttcagtaactccctgctgtaatccctaccaaattgcctgccgctgtcaagccgcataacagaccaatttttattccacgaggaggagtacctggaaattaggcaagtttgcttccaaatttcatttttaccctctttacaaacacacgctttagtttagtcttggagtttagttttggagttagccttgcatatcccttctgtatcctgtccctcctccacgccgacccgagagcagctgagctgcgctggctctgggcagggagtgtgccttaatgggaagcacacgggctttggagtcaggcacaggtgccagctccagcttttgaacttgggcaattgtttaacctaacctgcaagttgattttgagggttaaataa

SEQ ID NO: 109081 - DNA, 715 bp, Homo sapiens
  Payload ID: 1431
  Gene Symbol: ARSG
  Gene Name: arylsulfatase G
  ENST ID: ENST00000581639
  CDS Start-End: 630-715
gcgcgccgtcccacgtggacctgagccgcgccggtcgcgcgcccgccagcctgccgcctgggctgggggtcacgaaaggaaaccttacagaaacatgaagccctcaaccatctgctactcagttattcggggctgacggcggcttctagaacatccaggtgttctgcagatgcgagaactcatcctgtagtcaccagatggagtcccaaacagccaagcagatgtaaggcctgtgctgtggctctgaggccctgaatacagaagggtcactttcttagtggccaaagagcagttgttgacattgatgtctaattattgaacacgaccagtcattttactgagctgcggtgaggaaacactgaccatagaagatcaagccaaatgagggattgcaaatttcctgattcttttgaattaggattccagatgggggcctcatttctacagcccccaacattcctatagccgttatcactgccatcaccactgccaccagcatcttcttgcagattccacccctgctccccagagacttcctgctttgaaagtgagcagaaaggaagctctcagaaaaatctctagtggtggctgccgtcgctccagacaatcggaatcctgccttcaccaccatgggctggctttttctaaaggttttgttggcgggagtgagtttctcaggatttctttatcctcttgtggatttttgcatcagtgg

SEQ ID NO: 109082 - DNA, 2599 bp, Homo sapiens
  Payload ID: 1431
  Gene Symbol: ARSG
  Gene Name: arylsulfatase G
  Uniprot ID: Q96EG1
  ENST ID: ENST00000621439
  CDS Start-End: 626-2203
gccgtcccacgtggacctgagccgcgccggtcgcgcgcccgccagcctgccgcctgggctgggggtcacgaaaggaaaccttacagaaacatgaagccctcaaccatctgctactcagttattcggggctgacggcggcttctagaacatccaggtgttctgcagatgcgagaactcatcctgtagtcaccagatggagtcccaaacagccaagcagatgtaaggcctgtgctgtggctctgaggccctgaatacagaagggtcactttcttagtggccaaagagcagttgttgacattgatgtctaattattgaacacgaccagtcattttactgagctgcggtgaggaaacactgaccatagaagatcaagccaaatgagggattgcaaatttcctgattcttttgaattaggattccagatgggggcctcatttctacagcccccaacattcctatagccgttatcactgccatcaccactgccaccagcatcttcttgcagattccacccctgctccccagagacttcctgctttgaaagtgagcagaaaggaagctctcagaaaaatctctagtggtggctgccgtcgctccagacaatcggaatcctgccttcaccaccatgggctggctttttctaaaggttttgttggcgggagtgagtttctcaggatttctttatcctcttgtggatttttgcatcagtgggaaaacaagaggacagaagccaaactttgtgattattttggccgatgacatggggtggggtgacctgggagcaaactgggcagaaacaaaggacactgccaaccttgataagatggcttcggagggaatgaggtttgtggatttccatgcagctgcctccacctgctcaccctcccgggcttccttgctcaccggccggcttggccttcgcaatggagtcacacgcaactttgcagtcacttctgtgggaggccttccgctcaacgagaccaccttggcagaggtgctgcagcaggcgggttacgtcactgggataataggcaaatggcatcttggacaccacggctcttatcaccccaacttccgtggttttgattactactttggaatcccatatagccatgatatgggctgtactgatactccaggctacaaccaccctccttgtccagcgtgtccacagggtgatggaccatcaaggaaccttcaaagagactgttacactgacgtggccctccctctttatgaaaacctcaacattgtggagcagccggtgaacttgagcagccttgcccagaagtatgctgagaaagcaacccagttcatccagcgtgcaagcaccagcgggaggcccttcctgctctatgtggctctggcccacatgcacgtgcccttacctgtgactcagctaccagcagcgccacggggcagaagcctgtatggtgcagggctctgggagatggacagtctggtgggccagatcaaggacaaagttgaccacacagtgaaggaaaacacattcctctggtttacaggagacaatggcccgtgggctcagaagtgtgagctagcgggcagtgtgggtcccttcactggattttggcaaactcgtcaagggggaagtccagccaagcagacgacctgggaaggagggcaccgggtcccagcactggcttactggcctggcagagttccagttaatgtcaccagcactgccttgttaagcgtgctggacatttttccaactgtggtagccctggcccaggccagcttacctcaaggacggcgctttgatggtgtggacgtctccgaggtgctctttggccggtcacagcctgggcacagggtgctgttccaccccaacagcggggcagctggagagtttggagccctgcagactgtccgcctggagcgttacaaggccttctacattaccggtggagccagggcgtgtgatgggagcacggggcctgagctgcagcataagtttcctctgattttcaacctggaagacgataccgcagaagctgtgcccctagaaagaggtggtgcggagtaccaggctgtgctgcccgaggtcagaaaggttcttgcagacgtcctccaagacattgccaacgacaacatctccagcgcagattacactcaggacccttcagtaactccctgctgtaatccctaccaaattgcctgccgctgtcaagccgcataacagaccaatttttattccacgaggaggagtacctggaaattaggcaagtttgcttccaaatttcatttttaccctctttacaaacacacgctttagtttagtcttggagtttagttttggagttagccttgcatatcccttctgtatcctgtccctcctccacgccgacccgagagcagctgagctgcgctggctctgggcagggagtgtgccttaatgggaagcacacgggctttggagtcaggcacaggtgccagctccagcttttgaacttgggcaattgtttaacctaacctgcaagttgattttgagggttaaataaaggcatacatgaaaatgcctggcaaattacctgacacagagcagacattcaatacattttagtttccttgtttc

SEQ ID NO: 109083 - DNA, 11942 bp, Homo sapiens
  Payload ID: 1432
  Gene Symbol: ASH1L
  Gene Name: ash1 (absent, small, or homeotic)-like (Drosophila)
  Uniprot ID: Q9NR48
  ENST ID: ENST00000368346
  CDS Start-End: 641-9550
cgcgtacgggctggctggcgcgcggggcggccgaaggtggtggttggtgggagcagccagcgacgagcccgtagacactcgtacgcgtgcgggcgggcgtgcgcgctacgcggacggagtcgggcggagcgggggacggtgggaaagaacgcaaggaggaaggagtggaaggttgaggggggcgctaggcgcccttcgctccctccctctggaggagctgccgccgccaccgccgccactctgctgctgccgccgccgccgccgccgctcccgccgccattttgggttcgctttgcggaggggagacgatcccagtctcggttgcgggacccgcctcccctcagtttgccccctttagccttccacctttcccttctcctctctcgcatttccgccagtcagcttacccgctggccgcctcctgacaagcgggagggatccgccgtggacccagggaagcggaggagcctggcggccaccccctcttccccacttccctgcactctcatcgctctcggcctcggcctcggcctccgacacgagaaagatgctggtttcgagttttggagatccttgttttttatggaacacagttctgtaaaattttcataagattccttggcaataacatacgcttgtgatggaccctagaaatactgctatgttaggattgggttctgattccgaaggtttttcaagaaagagtccttctgccatcagtactggcacattggtcagtaagagagaagtagagctagaaaaaaacacaaaggaggaagaggaccttcgcaaacggaatcgagaaagaaacatcgaagctgggaaagatgatggtttgactgatgcacagcaacagttttcagtgaaagaaacaaacttttcagagggaaatttaaaattgaaaattggcctccaggctaagagaactaaaaaacctccaaagaacttggagaactatgtatgtcgacctgccataaaaacaactattaagcacccaaggaaagcacttaaaagtggaaagatgacggatgaaaagaatgaacactgtccttcaaaacgagacccttcaaagttgtacaagaaagcagatgatgttgcagccattgaatgccagtctgaagaagtcatccgtcttcattcacagggagaaaacaatcctttgtctaagaagctgtctccagtacactcagaaatggcagattatattaatgcaacgccatctactcttcttggtagccgggatcctgatttaaaggacagagcattacttaatggaggaactagtgtaacagaaaagttggcacagctgattgctacctgtcctccttccaagtcttccaagacaaaaccgaagaagttaggaactggcactacagcaggattggttagcaaggatttgatcaggaaagcaggtgttggctctgtagctggaataatacataaggacttaataaaaaagccaaccatcagcacagcagttggattggtaactaaagatcctgggaaaaagccagtgtttaatgcagcagtaggattggtcaataaggactctgtgaaaaaactgggaactggcactacagcggtattcattaataaaaacttaggcaaaaagccaggaactatcactacagtaggactgctaagcaaagattcaggaaagaagctaggaattggtattgttccaggtttagtgcataaagagtctggcaagaagttaggacttggcactgtggttggactggttaataaagatttgggaaagaaattgggttctactgttggcctagtggccaaggactgtgcaaagaagattgtagcaagttcagcaatgggattggttaataaggacattggaaagaaactaatgagttgtcctttggcaggtctgatcagtaaagatgccataaaccttaaagccgaagcactgctccccactcaggaaccgcttaaggcttcttgtagtacaaacatcaataatcaggaaagtcaggaactttctgaatccctgaaagatagtgccaccagcaaaacttttgaaaagaatgttgtacggcagaataaagaaagcatattggaaaagttctcagtacgaaaagaaatcattaatttggagaaagaaatgtttaatgaaggaacatgcattcagcaagacagtttctcatccagtgaaaagggatcttatgaaacctcaaagcatgaaaagcagcctcctgtatattgcacttctccggactttaaaatgggaggtgcttctgatgtatctaccgctaaatccccattcagtgcagtaggagaaagcaatctcccttccccatcacctactgtatctgttaatcctttaaccagaagtccccctgaaacttcttcacagttggctcctaatccattacttttaagttctactacagaactaatcgaagaaatttctgaatctgttggaaagaaccagtttacttctgaaagtacccacttgaacgttggtcataggtcagttggtcatagtataagtattgaatgtaaagggattgataaagaggtaaatgattcaaaaactacccatatagatattccaagaataagctcttcccttggaaaaaagccaagtttgacttctgaatccagcattcatactattactccttcagttgttaacttcactagtttatttagtaataagccttttttaaaactgggtgcagtatctgcatcagacaaacactgccaagttgctgaaagcctaagtactagtttgcagtccaaaccattaaaaaaaagaaaaggaagaaaacctcggtggactaaagtggtggcaagaagcacatgccggtctccaaaagggctagaattagaaagatcagagctttttaaaaacgtttcatgtagctcactatcaaatagtaattctgagccagccaagtttatgaaaaacattggacccccttcatttgtagatcatgacttccttaaacgccgattgccaaagttgagcaaatccacagctccatctcttgctctcttagctgatagtgaaaaaccatctcataagtcttttgctactcacaaactatcctccagtatgtgtgtctctagtgaccttttgtctgatatttataagcccaaaagaggaaggcctaaatctaaggagatgcctcaactggaagggccacctaaaaggactttaaaaatccctgcttctaaagtgttttctttacagtctaaggaagaacaagaacccccaattttacagccagaaattgaaatcccttccttcaaacaaggtctgtctgtgtctccttttccaaaaaagagaggcaggcctaagaggcaaatgaggtcaccagtcaagatgaagccacctgtactgtcagtggctccatttgttgccactgaaagtccaagcaagctagaatctgaaagtgacaaccatagaagtagcagtgatttctttgagagcgaggatcaacttcaggatccagatgacctagatgacagtcataggccaagtgtctgtagtatgagtgaccttgagatggaaccagataaaaaaattaccaagagaaacaatggacaattaatgaaaacaattatccgcaaaataaataaaatgaagactttaaagagaaagaaactgttgaatcagattctttcaagttctgtagaatcaagtaataaagggaaagtgcaatccaaactccataatacggtatcaagtcttgctgccacatttggctctaaattgggccaacagataaatgtcagcaagaaaggaaccatttatataggaaagagaagaggtcgcaaaccaaaaactgtcttaaatggtattctttctggtagtcctactagccttgctgttcttgagcaaacagctcaacaggcagctgggtcagcattaggacagattcttcccccattactgccttcatctgctagtagttctgagattcttccatcacctatttgctctcagtcttctgggactagtggaggtcagagccctgtaagtagtgatgcaggttttgttgaacccagttcagtgccatatttgcatttacactccagacagggcagtatgattcagactcttgcaatgaagaaggcctcaaaggggaggaggcggttatctcctcctactttgttgccaaattctccttcgcacttgagtgaactcacatctctaaaagaagctactccttccccaatcagtgagtctcatagtgatgagaccattcccagtgatagtggaattggaacagataataacagcacatcagacagggcagagaaattttgtgggcaaaaaaagaggaggcattcttttgagcatgtttctctgattccccctgaaacctctacagtgctaagcagtcttaaagaaaaacataaacacaaatgtaagcgcaggaatcatgattacctcagctatgacaagatgaaaaggcagaaacgaaaacggaaaaagaaatatccccagcttcgaaatagacaggatccagactttattgcagagctggaggaactaataagtcgcctaagtgaaattcggatcactcatcgaagtcatcattttatcccccgagatcttctgccaactatctttcgaatcaactttaatagtttctatacacatccttctttccccttagaccctttgcactacattcgaaaacctgacttaaaaaagaaaagagggagaccccctaagatgagggaggcaatggctgaaatgccttttatgcacagccttagttttcctctttctagtactggattctatccatcttatggtatgccttactctccttcaccccttacagctgctcccataggattaggttactatggaaggtatcctcccactctttatccacctcctccatctccttctttcaccacgccacttccacctccttcctatatgcatgctggtcatttacttctcaatcctgccaaataccataagaaaaagcataagctacttcgacaggaggcctttcttacaaccagcaggactcccctcctttccatgagtacctaccccagtgttcctcctgagatggcctatggttggatggttgagcacaaacacaggcaccgtcacaaacacagagaacaccgttcttctgaacaaccccaggtttctatggacactggctcttcccgatctgtcctggaatctttgaagcgctatagatttggaaaggatgctgttggagagcgatataagcataaggaaaagcaccgttgtcacatgtcctgccctcatctctctccttcaaaaagcttaataaacagagaggaacagtgggtccaccgagagccttcagaatctagtccattggccttgggattgcagacacctttacagattgactgttcagaaagttctccaagcttatcccttggaggattcactcccaactctgagccagccagcagtgatgaacatacaaaccttttcacaagtgcaataggcagctgcagagtttcaaaccctaactccagtggccggaagaaattaactgacagccctggactcttttctgcacaggacacttcactaaatcggcttcacagaaaggagtcactgccttctaacgaaagggcagtacagactttggcaggctcccagccaacctctgataaaccctcccagcggccatcagagagcacaaattgtagccctacccggaaaaggtcttcatctgagagtacttcttcaacagtaaacggagttccctctcgaagtccaagattagttgcttctggggatgactctgtggatagtctgctgcagcggatggtacaaaatgaggaccaagagcccatggagaaaagtattgatgctgtgattgcaactgcctctgcaccaccttcttccagtccaggccgtagccacagcaaggaccgaaccctgggaaaaccagacagccttttagtgcctgcagtcacaagtgactcttgcaataatagcatctcactcctatctgaaaagttgacaagcagctgttccccccatcatatcaagagaagtgtagtggaagctatgcaacgccaagctcggaaaatgtgcaattacgacaaaatcttggccacaaagaaaaacctagaccatgtcaataaaatcttaaaagccaaaaaacttcaaaggcaggccaggacagggaataactttgtgaaacgtaggccaggtcgacctcggaaatgtccccttcaggctgtcgtatcaatgcaagcattccaggctgctcagtttgtcaacccagaattgaacagagacgaggaaggagcagcactgcacctcagtcctgacacagttacagatgtaattgaggctgttgttcagagtgtaaatctgaacccagaacataaaaaggggttgaagagaaaaggttggctattggaagaacagaccagaaaaaagcagaagccattaccagaggaagaagagcaagagaataataaaagctttaatgaagcaccagttgagattcccagtccttctgaaaccccagctaaaccttctgaacctgaaagtaccttgcagcctgtgctttctctcatcccaagggaaaagaagcccccacgtcccccaaagaagaagtatcagaaagcagggctgtattctgacgtttacaaaactacagacccaaagagtcgattgatccaattaaagaaagagaagctggagtatactccaggagagcatgaatatggattatttccagcgcccattcatgttgtgttttttgtttcaggaaagtatctaagacaaaagagaattgacttccagcttccttatgatatcctttggcagtggaaacacaatcagctatacaaaaagccagatgtcccactatataagaaaattcgttcaaatgtctacgttgatgtcaaacccctttctggttacgaagctaccacctgtaactgtaagaagccagatgatgacaccaggaagggctgtgttgatgactgcctcaatagaatgatctttgctgagtgttcccccaacacttgcccatgtggcgagcaatgctgtaaccagaggatacagaggcatgaatgggtgcaatgtctagaacgatttcgagctgaggaaaaaggttggggaatcagaaccaaagagcccctaaaagctgggcagttcatcattgaatacctaggggaggtcgtcagtgaacaggagttcaggaacaggatgattgagcagtatcataatcacagtgaccactactgcctgaacctggatagtgggatggtgattgacagttaccgcatgggaaatgaggcccgattcatcaaccatagctgtgacccaaattgtgaaatgcagaaatggtctgttaatggagtataccggattggactctatgctcttaaagacatgccagctgggactgaactcacttatgattataactttcattccttcaatgtggaaaaacagcaactttgtaagtgtggctttgagaaatgtcgaggaatcatcggaggcaagagtcagcgtgtgaatggactcaccagcagcaaaaacagccagcccatggccacacacaaaaaatctggacggtcaaaagagaagagaaagtctaagcacaagctgaagaaaaggagaggccatctctctgaggaacccagtgaaaatatcaacaccccaactagattgaccccccaattacagatgaagccaatgtccaatcgtgaaaggaactttgtgttaaagcatcatgtattcttggtccgaaactgggagaagattcgtcaaaaacaggaggaagtaaagcacaccagtgataatattcactcagcatcattatatacccgttggaatgggatctgccgagatgatgggaatatcaagtctgatgtcttcatgacccagttctctgccctgcagacagctcgatctgttcgaacaagacggttggcagctgcagaggaaaatattgaagtggctcgggcagcccgcctagcccagatcttcaaagaaatttgtgatggtatcatctcttataaagattcttcccggcaagcactggcagctccacttttgaaccttcccccaaagaaaaagaatgctgattattatgagaagatctctgatcccctagatcttatcaccatagagaagcagatcctcactggttactataagacagtggaagcttttgatgctgacatgctcaaagtctttcggaatgctgagaagtactatgggcgtaaatccccagttgggagagatgtttgtcgtctacgaaaggcctattacaatgcccggcatgaggcatcagcccagattgatgagattgtgggagagacagcaagtgaggcagacagcagtgagacctcagtctctgaaaaggagaatgggcatgagaaggacgacgatgttattcgctgtatctgtggcctctacaaggatgaaggtctcatgatccagtgtgacaagtgcatggtatggcagcactgtgattgtatgggagtgaactcagatgtggagcactacctttgtgagcagtgtgacccaaggcctgtggacagggaggttcccatgatccctcggccccactatgcccaacctggctgtgtctacttcatctgtttgctccgagatgacttgctgcttcgtcagggtgactgtgtgtatctgatgagggatagtcggcgcacccctgatggccacccggtccgtcagtcctatcgactgttatctcacattaaccgagataaacttgacatctttcgcattgagaagctttggaagaatgaaaaagaggaacggtttgcctttggtcaccattatttccgtccccacgaaacacaccactctccatcccgtcggttctatcataatgaactatttcgggtgccactctatgagatcattcccttggaggctgtagtggggacctgctgtgtgttggacctttatacgtattgtaaagggagacccaaaggagtaaaggagcaagatgtgtacatctgtgattatcggcttgacaagtcagcacacctgttttacaagatccaccggaaccgctatcctgtctgcaccaaaccctatgcttttgatcacttccccaagaagctcactcccaaaaaagatttctcgcctcattacgtcccagacaactacaagaggaatggaggacgatcatcctggaagtctgagcgctcaaagccacccctaaaagacttgggccaggaggatgatgctctacccttgattgaagaggttctagccagtcaagagcaagcagccaatgagatacccagcctggaggagccagaacgggaaggggccactgctaacgtcagtgagggtgaaaaaaaaacagaggaaagtagtcaagaaccccagtcaacctgtacccctgaggaacgacggcataaccaacgggaacgactcaaccagatcttgctcaatctccttgaaaaaatccctggaaaaaatgccattgatgtgacctacttgctggaggaaggatcaggcaggaaactgcgaaggcgtactttgtttatcccagaaaacagctttcgaaagtgaccctcaaagaatgagaacctcaagcatctgggatccagtggagctaatcagtcctgcctcctgctctctgggtatagacaggggtgggaagggtccatctgggcaaggggaatggggccatgttgttgacattaggtacttaataagccttggagctagtggagagggagaggaaagggttctgtccaagacagttcaggttaattaattttcttctccattgcttcaccttaagggttaataatgtagagaggagggaggaccacattgatgaccagaacctactggtactttatagcatttgccccaccccacagcttaggtttttctgtcatcctcagatcccacaggcattgcgaagaagctgcttcctatacccaggtataactcaaaatccaaagggatagggccaggatccctattcctaccccatctattctctgttggctccaagagctaccccagagaccttaaacagaaacagtagctgaggcttcttcctagatacctgactagggaagtttgtctctcctttcttgcccaaccaggtcaaagtaaaatgtgagttgacagctcaaagcacttgtaactgctgccccctccctacctctactccccaaaatggaatcatgggatagggaaggcccccatggggtcagaagggcacggtagttcttgcaattatttttgttttacccttcataacctgtcaaacatatttttttctaatgagaaagccaggcccccgccagcacacatgctgtttttaatgcgctgtagttcttgtgtgtctgctgtgctgtgcaaatggagattcagttcaaaataaaatcatttaaaaacctacataaaaagaactctaaacccacccctgcaacaaaagtcactacataaactgttcagcagtattcacctatcagagtatttgttgtgagtatagattatcaattgaaaacactactcttgttttcttaattgtacagttttcaatgtccctttcttaaagagacagtatatttctcttcacccctagcccatcttccctcaccctcctgaatgacatcaggaggtatatccagggtgtctccttccttcctactctcttgaccagaagttaacagactatactgtctctttaaaaataaaatttaaaaagctttgttgtcttttcagacatacatatgcatatatgttttagatgttcttataagagaaaagatggtttttaaatgtgccaagttgtgtgtgtgtgtgtatatatatgtgtgtatgtgtgtgtatatatatatgtgtgtgtgtatatatatacacacacacacacacacctgctgtgtgattggtaagcaatacaatagtaaacatgtccccattacttttttctaatattggaccaatgctgtcctaattgtacatttccccttatggtgacgatgctctgactcgtttaggtagacacattgaccaccttccattccattaaatattttttcctttttcccctttctgtgtcattcttgaggaaaaaacaaaagagagaggggatgccaatgatccccttgagcagagaaaaagcaaaataaatattttattaaagaaaaaagagaattaagaaaatagtttggagtattttcttactgtagagaagcactgtacattactaagagacctgggtataagatactcacatgtggagctggaaaaatcgcatgtccaagcccgtttgagtggtttcttttgtttttcattgcagggagtgggtgggagggaggtgggactaggggcactttgggggtctccttttagtcaaaagcgagaaaatgacaagaaagagattaaaattcaatgtttcctttatagtgttaaacactaaaattttaaaaaagatgaaaaagaaaaaaaaactttgtaaaatgcgagaacagaagcaaaagacactacgctctgtcattttatctttcttttgttgaaagactaaaaaaaaactgaaatgttttttagacaatcaaatgttaggtaagtgcaaaaacttgttttttcttactggtgtagaaattaatgcctttttttatttttcagttattttataataacgaaataaaaagaaccccccagctgccaggcgggttttggtgtttgaaatgcggggcaaagcactacatcactgcaaatagatacagagttagtctgcatgtctgtaggctgtgtgattgcggaaaatataaatgctgctaatatatttcctttttacaaaagcatatctaaatagatgattgttttgatgttaatctttgtaaattatgtattaccaattttaacattggatgtaattgcatacaaagcttgcatctcaatccttgaaagtctagtattaaatggaaaaaacttttcctaa

SEQ ID NO: 109084 - DNA, 10979 bp, Homo sapiens
  Payload ID: 1432
  Gene Symbol: ASH1L
  Gene Name: ash1 (absent, small, or homeotic)-like (Drosophila)
  Uniprot ID: Q9NR48
  ENST ID: ENST00000392403
  CDS Start-End: 480-9374
ggagtggaaggttgaggggggcgctaggcgcccttcgctccctccctctggaggagctgccgccgccaccgccgccactctgctgctgccgccgccgccgccgccgctcccgccgccattttgggttcgctttgcggaggggagacgatcccagtctcggttgcgggacccgcctcccctcagtttgccccctttagccttccacctttcccttctcctctctcgcatttccgccagtcagcttacccgctggccgcctcctgacaagcgggagggatccgccgtggacccagggaagcggaggagcctggcggccaccccctcttccccacttccctgcactctcatcgctctcggcctcggcctcggcctccgacacgagaaagatgctggtttcgagttttggagatccttgttttttatggaacacagttctgtaaaattttcataagattccttggcaataacatacgcttgtgatggaccctagaaatactgctatgttaggattgggttctgattccgaaggtttttcaagaaagagtccttctgccatcagtactggcacattggtcagtaagagagaagtagagctagaaaaaaacacaaaggaggaagaggaccttcgcaaacggaatcgagaaagaaacatcgaagctgggaaagatgatggtttgactgatgcacagcaacagttttcagtgaaagaaacaaacttttcagagggaaatttaaaattgaaaattggcctccaggctaagagaactaaaaaacctccaaagaacttggagaactatgtatgtcgacctgccataaaaacaactattaagcacccaaggaaagcacttaaaagtggaaagatgacggatgaaaagaatgaacactgtccttcaaaacgagacccttcaaagttgtacaagaaagcagatgatgttgcagccattgaatgccagtctgaagaagtcatccgtcttcattcacagggagaaaacaatcctttgtctaagaagctgtctccagtacactcagaaatggcagattatattaatgcaacgccatctactcttcttggtagccgggatcctgatttaaaggacagagcattacttaatggaggaactagtgtaacagaaaagttggcacagctgattgctacctgtcctccttccaagtcttccaagacaaaaccgaagaagttaggaactggcactacagcaggattggttagcaaggatttgatcaggaaagcaggtgttggctctgtagctggaataatacataaggacttaataaaaaagccaaccatcagcacagcagttggattggtaactaaagatcctgggaaaaagccagtgtttaatgcagcagtaggattggtcaataaggactctgtgaaaaaactgggaactggcactacagcggtattcattaataaaaacttaggcaaaaagccaggaactatcactacagtaggactgctaagcaaagattcaggaaagaagctaggaattggtattgttccaggtttagtgcataaagagtctggcaagaagttaggacttggcactgtggttggactggttaataaagatttgggaaagaaattgggttctactgttggcctagtggccaaggactgtgcaaagaagattgtagcaagttcagcaatgggattggttaataaggacattggaaagaaactaatgagttgtcctttggcaggtctgatcagtaaagatgccataaaccttaaagccgaagcactgctccccactcaggaaccgcttaaggcttcttgtagtacaaacatcaataatcaggaaagtcaggaactttctgaatccctgaaagatagtgccaccagcaaaacttttgaaaagaatgttgtacggcagaataaagaaagcatattggaaaagttctcagtacgaaaagaaatcattaatttggagaaagaaatgtttaatgaaggaacatgcattcagcaagacagtttctcatccagtgaaaagggatcttatgaaacctcaaagcatgaaaagcagcctcctgtatattgcacttctccggactttaaaatgggaggtgcttctgatgtatctaccgctaaatccccattcagtgcagtaggagaaagcaatctcccttccccatcacctactgtatctgttaatcctttaaccagaagtccccctgaaacttcttcacagttggctcctaatccattacttttaagttctactacagaactaatcgaagaaatttctgaatctgttggaaagaaccagtttacttctgaaagtacccacttgaacgttggtcataggtcagttggtcatagtataagtattgaatgtaaagggattgataaagaggtaaatgattcaaaaactacccatatagatattccaagaataagctcttcccttggaaaaaagccaagtttgacttctgaatccagcattcatactattactccttcagttgttaacttcactagtttatttagtaataagccttttttaaaactgggtgcagtatctgcatcagacaaacactgccaagttgctgaaagcctaagtactagtttgcagtccaaaccattaaaaaaaagaaaaggaagaaaacctcggtggactaaagtggtggcaagaagcacatgccggtctccaaaagggctagaattagaaagatcagagctttttaaaaacgtttcatgtagctcactatcaaatagtaattctgagccagccaagtttatgaaaaacattggacccccttcatttgtagatcatgacttccttaaacgccgattgccaaagttgagcaaatccacagctccatctcttgctctcttagctgatagtgaaaaaccatctcataagtcttttgctactcacaaactatcctccagtatgtgtgtctctagtgaccttttgtctgatatttataagcccaaaagaggaaggcctaaatctaaggagatgcctcaactggaagggccacctaaaaggactttaaaaatccctgcttctaaagtgttttctttacagtctaaggaagaacaagaacccccaattttacagccagaaattgaaatcccttccttcaaacaaggtctgtctgtgtctccttttccaaaaaagagaggcaggcctaagaggcaaatgaggtcaccagtcaagatgaagccacctgtactgtcagtggctccatttgttgccactgaaagtccaagcaagctagaatctgaaagtgacaaccatagaagtagcagtgatttctttgagagcgaggatcaacttcaggatccagatgacctagatgacagtcataggccaagtgtctgtagtatgagtgaccttgagatggaaccagataaaaaaattaccaagagaaacaatggacaattaatgaaaacaattatccgcaaaataaataaaatgaagactttaaagagaaagaaactgttgaatcagattctttcaagttctgtagaatcaagtaataaagggaaagtgcaatccaaactccataatacggtatcaagtcttgctgccacatttggctctaaattgggccaacagataaatgtcagcaagaaaggaaccatttatataggaaagagaagaggtcgcaaaccaaaaactgtcttaaatggtattctttctggtagtcctactagccttgctgttcttgagcaaacagctcaacaggcagctgggtcagcattaggacagattcttcccccattactgccttcatctgctagtagttctgagattcttccatcacctatttgctctcagtcttctgggactagtggaggtcagagccctgtaagtagtgatgcaggttttgttgaacccagttcagtgccatatttgcatttacactccagacagggcagtatgattcagactcttgcaatgaagaaggcctcaaaggggaggaggcggttatctcctcctactttgttgccaaattctccttcgcacttgagtgaactcacatctctaaaagaagctactccttccccaatcagtgagtctcatagtgatgagaccattcccagtgatagtggaattggaacagataataacagcacatcagacagggcagagaaattttgtgggcaaaaaaagaggaggcattcttttgagcatgtttctctgattccccctgaaacctctacagtgctaagcagtcttaaagaaaaacataaacacaaatgtaagcgcaggaatcatgattacctcagctatgacaagatgaaaaggcagaaacgaaaacggaaaaagaaatatccccagcttcgaaatagacaggatccagactttattgcagagctggaggaactaataagtcgcctaagtgaaattcggatcactcatcgaagtcatcattttatcccccgagatcttctgccaactatctttcgaatcaactttaatagtttctatacacatccttctttccccttagaccctttgcactacattcgaaaacctgacttaaaaaagaaaagagggagaccccctaagatgagggaggcaatggctgaaatgccttttatgcacagccttagttttcctctttctagtactggattctatccatcttatggtatgccttactctccttcaccccttacagctgctcccataggattaggttactatggaaggtatcctcccactctttatccacctcctccatctccttctttcaccacgccacttccacctccttcctatatgcatgctggtcatttacttctcaatcctgccaaataccataagaaaaagcataagctacttcgacaggaggcctttcttacaaccagcaggactcccctcctttccatgagtacctaccccagtgttcctcctgagatggcctatggttggatggttgagcacaaacacaggcaccgtcacaaacacagagaacaccgttcttctgaacaaccccaggtttctatggacactggctcttcccgatctgtcctggaatctttgaagcgctatagatttggaaaggatgctgttggagagcgatataagcataaggaaaagcaccgttgtcacatgtcctgccctcatctctctccttcaaaaagcttaataaacagagaggaacagtgggtccaccgagagccttcagaatctagtccattggccttgggattgcagacacctttacagattgactgttcagaaagttctccaagcttatcccttggaggattcactcccaactctgagccagccagcagtgatgaacatacaaaccttttcacaagtgcaataggcagctgcagagtttcaaaccctaactccagtggccggaagaaattaactgacagccctggactcttttctgcacaggacacttcactaaatcggcttcacagaaaggagtcactgccttctaacgaaagggcagtacagactttggcaggctcccagccaacctctgataaaccctcccagcggccatcagagagcacaaattgtagccctacccggaaaaggtcttcatctgagagtacttcttcaacagtaaacggagttccctctcgaagtccaagattagttgcttctggggatgactctgtggatagtctgctgcagcggatggtacaaaatgaggaccaagagcccatggagaaaagtattgatgctgtgattgcaactgcctctgcaccaccttcttccagtccaggccgtagccacagcaaggaccgaaccctgggaaaaccagacagccttttagtgcctgcagtcacaagtgactcttgcaataatagcatctcactcctatctgaaaagttgacaagcagctgttccccccatcatatcaagagaagtgtagtggaagctatgcaacgccaagctcggaaaatgtgcaattacgacaaaatcttggccacaaagaaaaacctagaccatgtcaataaaatcttaaaagccaaaaaacttcaaaggcaggccaggacagggaataactttgtgaaacgtaggccaggtcgacctcggaaatgtccccttcaggctgtcgtatcaatgcaagcattccaggctgctcagtttgtcaacccagaattgaacagagacgaggaaggagcagcactgcacctcagtcctgacacagttacagatgtaattgaggctgttgttcagagtgtaaatctgaacccagaacataaaaaggggttgaagagaaaaggttggctattggaagaacagaccagaaaaaagcagaagccattaccagaggaagaagagcaagagaataataaaagctttaatgaagcaccagttgagattcccagtccttctgaaaccccagctaaaccttctgaacctgaaagtaccttgcagcctgtgctttctctcatcccaagggaaaagaagcccccacgtcccccaaagaagaagtatcagaaagcagggctgtattctgacgtttacaaaactacagacccaaagagtcgattgatccaattaaagaaagagaagctggagtatactccaggagagcatgaatatggattatttccagcgcccattcatgttggaaagtatctaagacaaaagagaattgacttccagcttccttatgatatcctttggcagtggaaacacaatcagctatacaaaaagccagatgtcccactatataagaaaattcgttcaaatgtctacgttgatgtcaaacccctttctggttacgaagctaccacctgtaactgtaagaagccagatgatgacaccaggaagggctgtgttgatgactgcctcaatagaatgatctttgctgagtgttcccccaacacttgcccatgtggcgagcaatgctgtaaccagaggatacagaggcatgaatgggtgcaatgtctagaacgatttcgagctgaggaaaaaggttggggaatcagaaccaaagagcccctaaaagctgggcagttcatcattgaatacctaggggaggtcgtcagtgaacaggagttcaggaacaggatgattgagcagtatcataatcacagtgaccactactgcctgaacctggatagtgggatggtgattgacagttaccgcatgggaaatgaggcccgattcatcaaccatagctgtgacccaaattgtgaaatgcagaaatggtctgttaatggagtataccggattggactctatgctcttaaagacatgccagctgggactgaactcacttatgattataactttcattccttcaatgtggaaaaacagcaactttgtaagtgtggctttgagaaatgtcgaggaatcatcggaggcaagagtcagcgtgtgaatggactcaccagcagcaaaaacagccagcccatggccacacacaaaaaatctggacggtcaaaagagaagagaaagtctaagcacaagctgaagaaaaggagaggccatctctctgaggaacccagtgaaaatatcaacaccccaactagattgaccccccaattacagatgaagccaatgtccaatcgtgaaaggaactttgtgttaaagcatcatgtattcttggtccgaaactgggagaagattcgtcaaaaacaggaggaagtaaagcacaccagtgataatattcactcagcatcattatatacccgttggaatgggatctgccgagatgatgggaatatcaagtctgatgtcttcatgacccagttctctgccctgcagacagctcgatctgttcgaacaagacggttggcagctgcagaggaaaatattgaagtggctcgggcagcccgcctagcccagatcttcaaagaaatttgtgatggtatcatctcttataaagattcttcccggcaagcactggcagctccacttttgaaccttcccccaaagaaaaagaatgctgattattatgagaagatctctgatcccctagatcttatcaccatagagaagcagatcctcactggttactataagacagtggaagcttttgatgctgacatgctcaaagtctttcggaatgctgagaagtactatgggcgtaaatccccagttgggagagatgtttgtcgtctacgaaaggcctattacaatgcccggcatgaggcatcagcccagattgatgagattgtgggagagacagcaagtgaggcagacagcagtgagacctcagtctctgaaaaggagaatgggcatgagaaggacgacgatgttattcgctgtatctgtggcctctacaaggatgaaggtctcatgatccagtgtgacaagtgcatggtatggcagcactgtgattgtatgggagtgaactcagatgtggagcactacctttgtgagcagtgtgacccaaggcctgtggacagggaggttcccatgatccctcggccccactatgcccaacctggctgtgtctacttcatctgtttgctccgagatgacttgctgcttcgtcagggtgactgtgtgtatctgatgagggatagtcggcgcacccctgatggccacccggtccgtcagtcctatcgactgttatctcacattaaccgagataaacttgacatctttcgcattgagaagctttggaagaatgaaaaagaggaacggtttgcctttggtcaccattatttccgtccccacgaaacacaccactctccatcccgtcggttctatcataatgaactatttcgggtgccactctatgagatcattcccttggaggctgtagtggggacctgctgtgtgttggacctttatacgtattgtaaagggagacccaaaggagtaaaggagcaagatgtgtacatctgtgattatcggcttgacaagtcagcacacctgttttacaagatccaccggaaccgctatcctgtctgcaccaaaccctatgcttttgatcacttccccaagaagctcactcccaaaaaagatttctcgcctcattacgtcccagacaactacaagaggaatggaggacgatcatcctggaagtctgagcgctcaaagccacccctaaaagacttgggccaggaggatgatgctctacccttgattgaagaggttctagccagtcaagagcaagcagccaatgagatacccagcctggaggagccagaacgggaaggggccactgctaacgtcagtgagggtgaaaaaaaaacagaggaaagtagtcaagaaccccagtcaacctgtacccctgaggaacgacggcataaccaacgggaacgactcaaccagatcttgctcaatctccttgaaaaaatccctggaaaaaatgccattgatgtgacctacttgctggaggaaggatcaggcaggaaactgcgaaggcgtactttgtttatcccagaaaacagctttcgaaagtgaccctcaaagaatgagaacctcaagcatctgggatccagtggagctaatcagtcctgcctcctgctctctgggtatagacaggggtgggaagggtccatctgggcaaggggaatggggccatgttgttgacattaggtacttaataagccttggagctagtggagagggagaggaaagggttctgtccaagacagttcaggttaattaattttcttctccattgcttcaccttaagggttaataatgtagagaggagggaggaccacattgatgaccagaacctactggtactttatagcatttgccccaccccacagcttaggtttttctgtcatcctcagatcccacaggcattgcgaagaagctgcttcctatacccaggtataactcaaaatccaaagggatagggccaggatccctattcctaccccatctattctctgttggctccaagagctaccccagagaccttaaacagaaacagtagctgaggcttcttcctagatacctgactagggaagtttgtctctcctttcttgcccaaccaggtcaaagtaaaatgtgagttgacagctcaaagcacttgtaactgctgccccctccctacctctactccccaaaatggaatcatgggatagggaaggcccccatggggtcagaagggcacggtagttcttgcaattatttttgttttacccttcataacctgtcaaacatatttttttctaatgagaaagccaggcccccgccagcacacatgctgtttttaatgcgctgtagttcttgtgtgtctgctgtgctgtgcaaatggagattcagttcaaaataaaatcatttaaaaacctacataaaaagaactctaaacccacccctgcaacaaaagtcactacataaactgttcagcagtattcacctatcagagtatttgttgtgagtatagattatcaattgaaaacactactcttgttttcttaattgtacagttttcaatgtccctttcttaaagagacagtatatttctcttcacccctagcccatcttccctcaccctcctgaatgacatcaggaggtatatccagggtgtctccttccttcctactctcttgaccagaagttaacagactatactgtctctttaaaaataaaatttaaaaagctttgttgtcttttcagacatacatatgcatatatgttttagatgttcttataagagaaaagatggtttttaaatgtgccaagttgtgtgtgtgtgtgtatatatatgtgtgtatgtgtgtgtatatatatatgtgtgtgtgtatatatatacacacacacacacacacctgctgtgtgattggtaagcaatacaatagtaaacatgtccccattacttttttctaatattggaccaatgctgtcctaattgtacatttccccttatggtgacgatgctctgactcgtttaggtagacacattgaccaccttccattccattaaatattttttcctttttcccctttctgtgtcattcttgaggaaaaaacaaaagagagaggggatgccaatgatccccttgagcagagaaaaagcaaaataaatattttattaaagaaaaaagagaa

SEQ ID NO: 109085 - DNA, 784 bp, Homo sapiens
  Payload ID: 1432
  Gene Symbol: ASH1L
  Gene Name: ash1 (absent, small, or homeotic)-like (Drosophila)
  ENST ID: ENST00000492987
  CDS Start-End: 1-463
gctcaaagtctttcggaatgctgagaagtactatgggcgtaaatccccagttgggagagatgtttgtcgtctacgaaaggcctattacaatgcccggcatgaggcatcagcccagattgatgagattgtgggagagacagcaagtgaggcagacagcagtgagacctcagtctctgaaaaggagaatgggcatgagaaggacgacgatgttattcgctgtatctgtggcctctacaaggatgaaggtctcatgatccagtgtgacaagtgcatggtatggcagcactgtgattgtatgggagtgaactcagatgtggagcactacctttgtgagcagtgtgacccaaggcctgtggacagggagtatgaccaaagggaaaataaaatacttagaaatctgtggaaggaatggcactatataaaactaaggtttttggccgggcacggtcgctcatgcctgtaatcctagcacactgggaggctaaggcggatggattgcctgagctcaggagttcgagaccagcctgggcaacacggtgaaaccccatctctactaaaatacaaaaaaaattagccgggcatggaggcgtgcacctgaagtctcaggaggttcccatgatccctcggccccactatgcccaacctggctgtgtctacttcatctgtttgctccgagatgacttgctgcttcgtcagggtgactgtgtgtatctgatgagggatagtcggcgcacccctgatggccacccggtccgtcagtcctatcgactgttatctcacatta

SEQ ID NO: 109086 - DNA, 1862 bp, Homo sapiens
  Payload ID: 1432
  Gene Symbol: ASH1L
  Gene Name: ash1 (absent, small, or homeotic)-like (Drosophila)
  ENST ID: ENST00000548830
  CDS Start-End: 272-805
ggaggaggcttgggcttgcgccgttgaagtcagcttacccgctggccgcctcctgacaagcgggagggatccgccgtggacccagggaagcggaggagcctggcggccaccccctcttccccacttccctgcactctcatcgctctcggcctcggcctcggcctccgacacgagaaagatgctggtttcgagttttggagatccttgttttttatggaacacagttctgtaaaattttcataagattccttggcaataacatacgcttgtgatggaccctagaaatactgctatgttaggattgggttctgattccgaaggtttttcaagaaagagtccttctgccatcagtactggcacattggtcagtaagagagaagtagagctagaaaaaaacacaaaggaggaagaggaccttcgcaaacggaatcgagaaagaaacatcgaagctgggaaagatgatggtttgactgatgcacagcaacagttttcagtgaaagaaacaaacttttcagagggaaatttaaaattgaaaattggcctccaggctaagagaactaaaaaacctccaaagaacttggagaactatgtatgtcgacctgccataaaaacaactattaagcacccaaggaaagcacttaaaagtggaaagatgacggatgaaaagaatgaacactgtccttcaaaacgaatggagtcttactctgtcgcccagactggagtgcagtggtgcgatctcggctcaccgcaacctccgcctcctgggttcaagcgattctcctattctcctgcctcagccccctgagtagctgggattacaggcgacccttcaaagttgtacaagaaagcagatgatgttgcagccattgaatgccagtctgaagaagtcatccgtcttcattcacagggagaaaacaatcctttgtctaagaagctgtctccagtacactcagaaatggcagattatattaatgcaacgccatctactcttcttggtagccgggatcctgatttaaaggacagagcattacttaatggaggaactagtgtaacagaaaagttggcacagctgattgctacctgtcctccttccaagtcttccaagacaaaaccgaagaagttaggaactggcactacagcaggattggttagcaaggatttgatcaggaaagcaggtgttggctctgtagctggaataatacataaggacttaataaaaaagccaaccatcagcacagcagttggattggtaactaaagatcctgggaaaaagccagtgtttaatgcagcagtaggattggtcaataaggactctgtgaaaaaactgggaactggcactacagcggtattcattaataaaaacttaggcaaaaagccaggaactatcactacagtaggactgctaagcaaagattcaggaaagaagctaggaattggtattgttccaggtttagtgcataaagagtctggcaagaagttaggacttggcactgtggttggactggttaataaagatttgggaaagaaattgggttctactgttggcctagtggccaaggactgtgcaaagaagattgtagcaagttcagcaatgggattggttaataaggacattggaaagaaactaatgagttgtcctttggcaggtctgatcagtaaagatgccataaaccttaaagccgaagcactgctccccactcaggaaccgcttaaggcttcttgtagtacaaacatcaataatcaggaaagtcaggaactttctgaatccctgaaagatagtgccaccagcaaaacttttgaaaagaatgttgtacggcagaataaagaaagcatattggaaaagttctcagtacgaaaagaaa

SEQ ID NO: 109087 - DNA, 3090 bp, Homo sapiens
  Payload ID: 1433
  Gene Symbol: ASH2L
  Gene Name: ash2 (absent, small, or homeotic)-like (Drosophila)
  Uniprot ID: Q9UBL3
  ENST ID: ENST00000343823
  CDS Start-End: 310-2196
gcagaatatccagtcgtagccacgaaaatacgccgcgtcagtccctgactcgaaaggaagtcctccagagagccgcactaaccatctagcttcctccaccttcagcctgccaggcccgcggccaccgccggcgcgggaggccggcccacctctgcccgcgcgcctggccttaaagcggtcgtggaattatgcttcctcaggcaggcggtggacgcaccgcgggctttttctgtttgaagactacagcgtcacacagcaacgcgcgcgagagaagagagtattctcgcgagaagtccaggggtggccgtgatggcggcggcaggagcaggacctggccaggaagcgggtgccgggcctggcccaggagcggtcgcaaatgcaacaggggcagaagagggggagatgaagccggtggcagcgggagcagccgctcctcctggagaggggatctctgctgctccgacagttgagcccagttccggggaggctgaaggcggggaggcaaacttggtcgatgtaagcggtggcttggagacagaatcatctaatggaaaagatacactagaaggtgctggggatacatcagaggtgatggatactcaggcgggctccgtggatgaagagaatggccgacagttgggtgaggtagagctgcaatgtgggatttgtacaaaatggttcacggctgacacatttggcatagatacctcatcctgtctacctttcatgaccaactacagttttcattgcaacgtctgccatcacagtgggaatacctatttcctccggaagcaagcaaacttgaaggaaatgtgccttagtgctttggccaacctgacatggcagtcccgaacacaggatgaacatccgaagacaatgttctccaaagataaggatattataccatttattgataaatactgggagtgcatgacaaccagacagagacctgggaaaatgacttggccaaataacattgttaaaacaatgagtaaagaaagagatgtattcttggtaaaggaacacccagatccaggcagtaaagatccagaagaagattaccccaaatttggacttttggatcaggaccttagtaacattggtcctgcttatgacaaccaaaaacagagcagtgctgtgtctactagtgggaatttaaatgggggaattgcagcaggaagcagcggaaaaggacgaggagccaagcgcaaacagcaggatggagggaccacagggaccaccaagaaggcccggagtgaccctttgttttctgctcagcgccttccccctcatggctacccattggaacacccgtttaacaaagatggctatcggtatattctagctgagcctgatccgcacgcccctgaccccgagaagctggaacttgactgctgggcaggaaaacctattcctggagacctctacagagcctgcttgtatgaacgggttttgttagccctacatgatcgagctccccagttaaagatctcagatgaccggctgactgtggttggagagaagggctactctatggtgagggcctctcatggagtacggaaaggtgcctggtattttgaaatcactgtggatgagatgccaccagataccgctgccagactgggttggtcccagcccctaggaaaccttcaagctcctttaggttatgataaatttagctattcttggcggagcaaaaagggaaccaagttccaccagtccattggcaaacactactcttctggctatggacagggagacgtcctgggattttatattaatcttcctgaagacacagagacagccaagtcattgccagacacatacaaagataaggctttgataaaattcaagagttatttgtattttgaggaaaaagactttgtggataaagcagagaagagcctgaagcagactccccatagtgagataatattttataaaaatggtgtcaatcaaggtgtggcttacaaagatatttttgagggggtttacttcccagccatctcactgtacaagagctgcacggtttccattaactttggaccatgcttcaagtatcctccgaaggatctcacttaccgccctatgagtgacatgggctggggcgccgtggtagagcacaccctggctgacgtcttgtatcacgtggagacagaagtggatgggaggcgcagtcccccatgggaaccctgaccaggtccctcttttctgtcaaggactttctgggaataatactgggggttttgtttttgtttttgaactgtctcaaatgttctcccaaagatgctaaaaacacagcctctccttttagcaagttaaaaggctgggtaggactgcgggagactgcctgcctttcaccattttctccccacttccagtgactgctcttattttgtgtaccataagccaacaaccgctgactccaggattgcataagccccctgtgaaatcggtgctgtactgcataccctgccagctgtgacttgttatcctactatattttctaaggagtgaataatattgtccgagtaactaacttatttaaaagacatttccttctgtgggcattgactgtatcccacctgttttccaaggaaatggtaacctgtttctgagaacacctgaaatcaatggctatacattccaaaccaatctaaacgctatttccttttggtgtgggtttggttttgttcattttgaaatacacttttgaacactgagatccgtaaaactactagatctctggaagtgtaattgtgaaagaaacttgcttgcagctttaacaaaatgagaaacttcccaaataaaacttgttttgaagtttatgtgacactttgcttcccttcagattgggtgcctcttggtgacagtgttcagaaatgtaagcagcacgaggaagggagctggcactgggaggaagagccgggtttctgagttgtgttttggctgctttcctattgctcccattcttgccaatcagccaccccctttcctgtgaaaatctgccaccttgaggagaggaacaagagtttaaaagggctaatgatctccctcccggtcttcccttggaacatggatgttgatata

SEQ ID NO: 109088 - DNA, 2678 bp, Homo sapiens
  Payload ID: 1433
  Gene Symbol: ASH2L
  Gene Name: ash2 (absent, small, or homeotic)-like (Drosophila)
  Uniprot ID: Q9UBL3
  ENST ID: ENST00000428278
  CDS Start-End: 442-2046
atcccgcggctcctggagccctgccgcccgccccctgcgaacccaggccccgccgccaatggctcgccctgcctctgcgccgcttggcccgtcccctctcaagcatatctcggataacgccccttccgcacctttcacgggcggtgggagctgaggctcctgtcgttatctctgatccttgcaccctggcaggaagctggtagctcacactttaacgggaggccttcacatattccagaaaagaaaccactttgcagtgccagactggaagaagtaacggtcactctgaaaacagggtgggagagctgcctctctttgaacctctcccaggaccaactctaacccagggaggcaaacttggtcgatgtaagcggtggcttggagacagaatcatctaatggaaaagatacactagaaggtgctggggatacatcagaggtgatggatactcaggcgggctccgtggatgaagagaatggccgacagttgggtgaggtagagctgcaatgtgggatttgtacaaaatggttcacggctgacacatttggcatagatacctcatcctgtctacctttcatgaccaactacagttttcattgcaacgtctgccatcacagtgggaatacctatttcctccggaagcaagcaaacttgaaggaaatgtgccttagtgctttggccaacctgacatggcagtcccgaacacaggatgaacatccgaagacaatgttctccaaagataaggatattataccatttattgataaatactgggagtgcatgacaaccagacagagacctgggaaaatgacttggccaaataacattgttaaaacaatgagtaaagaaagagatgtattcttggtaaaggaacacccagatccaggcagtaaagatccagaagaagattaccccaaatttggacttttggatcaggaccttagtaacattggtcctgcttatgacaaccaaaaacagagcagtgctgtgtctactagtgggaatttaaatgggggaattgcagcaggaagcagcggaaaaggacgaggagccaagcgcaaacagcaggatggagggaccacagggaccaccaagaaggcccggagtgaccctttgttttctgctcagcgccttccccctcatggctacccattggaacacccgtttaacaaagatggctatcggtatattctagctgagcctgatccgcacgcccctgaccccgagaagctggaacttgactgctgggcaggaaaacctattcctggagacctctacagagcctgcttgtatgaacgggttttgttagccctacatgatcgagctccccagttaaagatctcagatgaccggctgactgtggttggagagaagggctactctatggtgagggcctctcatggagtacggaaaggtgcctggtattttgaaatcactgtggatgagatgccaccagataccgctgccagactgggttggtcccagcccctaggaaaccttcaagctcctttaggttatgataaatttagctattcttggcggagcaaaaagggaaccaagttccaccagtccattggcaaacactactcttctggctatggacagggagacgtcctgggattttatattaatcttcctgaagacacagagacagccaagtcattgccagacacatacaaagataaggctttgataaaattcaagagttatttgtattttgaggaaaaagactttgtggataaagcagagaagagcctgaagcagactccccatagtgagataatattttataaaaatggtgtcaatcaaggtgtggcttacaaagatatttttgagggggtttacttcccagccatctcactgtacaagagctgcacggtttccattaactttggaccatgcttcaagtatcctccgaaggatctcacttaccgccctatgagtgacatgggctggggcgccgtggtagagcacaccctggctgacgtcttgtatcacgtggagacagaagtggatgggaggcgcagtcccccatgggaaccctgaccaggtccctcttttctgtcaaggactttctgggaataatactgggggttttgtttttgtttttgaactgtctcaaatgttctcccaaagatgctaaaaacacagcctctccttttagcaagttaaaaggctgggtaggactgcgggagactgcctgcctttcaccattttctccccacttccagtgactgctcttattttgtgtaccataagccaacaaccgctgactccaggattgcataagccccctgtgaaatcggtgctgtactgcataccctgccagctgtgacttgttatcctactatattttctaaggagtgaataatattgtccgagtaactaacttatttaaaagacatttccttctgtgggcattgactgtatcccacctgttttccaaggaaatggtaacctgtttctgagaacacctgaaatcaatggctatacattccaaaccaatctaaacgctatttccttttggtgtgggtttggttttgttcattttgaaatacacttttgaacactgagatccgtaaaactactagatctctggaagtgtaattgtgaaagaaacttgcttgcagctttaacaaaatgagaaacttcccaaataaaacttgttttgaagttta

SEQ ID NO: 109089 - DNA, 613 bp, Homo sapiens
  Payload ID: 1433
  Gene Symbol: ASH2L
  Gene Name: ash2 (absent, small, or homeotic)-like (Drosophila)
  ENST ID: ENST00000521808
  CDS Start-End: 1-271
tcagataatattttataaaaatggtgtcaatcaaggtgtggcttacaaagatatttttgagggggtttacttcccagccatctcactgtacaagagctgcacggtttccattaactttggaccatgcttcaagtatcctccgaaggatctcacttaccgccctatgagtgacatgggctggggcgccgtggtagagcacaccctggctgacgtcttgtatcacgtggagacagaagtggatgggaggcgcagtcccccatgggaaccctgaccagagaaagcttggactatatttctggaaggcacccactgtggggtgctgcttgttctgtggtgttgctgtgcagcggccgggaggagcagagggctgcaggagaccctctgagattctgctttgtgcacatgtactgccagcgcatggcattcttgagcccataaagcaagacttctcaggccctgtggttagcatcccccacacccatatcagccactagcattttaaagatggttttaggtgggtacataagggcccagaaaaaaagttttacaattattttaggggcctgaaccctcatgtcatagctaatcagtgaatgaagttaccttttaatcc

SEQ ID NO: 109090 - DNA, 656 bp, Homo sapiens
  Payload ID: 1433
  Gene Symbol: ASH2L
  Gene Name: ash2 (absent, small, or homeotic)-like (Drosophila)
  ENST ID: ENST00000517719
  CDS Start-End: 52-656
acgcgcgcgagagaagagagtattctcgcgagaagtccaggggtggccgtgatggcggcggcaggagcaggacctggccaggaagcgggtgccgggcctggcccaggagcggtcgcaaatgcaacaggggcagaagagggggagatgaagccggtggcagcgggagcagccgctcctcctggagaggggatctctgctgctccgacagttgagcccagttccggggaggctgaaggcggaaaagaaaccactttgcagtgccagactggaagaagtaacggtcactctgaaaacagggtgggagagctgcctctctttgaacctctcccaggaccaactctaacccaggaaggtgctggggatacatcagaggtgatggatactcaggcgggctccgtggatgaagagaatggccgacagttgggtgaggtagagctgcaatgtgggatttgtacaaaatggttcacggctgacacatttggcatagatacctcatcctgtctacctttcatgaccaactacagttttcattgcaacgtctgccatcacagtgggaatacctatttcctccggaagcaagcaaacttgaaggaaatgtgccttagtgctttggccaacctgacatggcagtcccgaacacaggatgaacatccgaa

SEQ ID NO: 109091 - DNA, 575 bp, Homo sapiens
  Payload ID: 1433
  Gene Symbol: ASH2L
  Gene Name: ash2 (absent, small, or homeotic)-like (Drosophila)
  ENST ID: ENST00000524247
  CDS Start-End: 1-575
gggctactctatggtgagggcctctcatggagtacggaaaggtgcctggtattttgaaatcactgtggatgagatgccaccagataccgctgccagactgggttggtcccagcccctaggaaaccttcaagctcctttaggttatgataaatttagctattcttggcggagcaaaaagggaaccaagttccaccagtccattggcaaacactactcttctggctatggacagggagacgtcctgggattttatattaatcttcctgaagacacagagacagccaagtcattgccagacacatacaaagataaggctttgataaaattcaagagttatttgtattttgaggaaaaagactttgtggataaagcagagaagagcctgaagcagactccccatagtgagataatattttataaaaatggtgtcaatcaaggtgtggcttacaaagatatttttgagggggtttacttcccagccatctcactgtacaagagctgcacggtttccattaactttggaccatgcttcaagtatcctccgaaggatctcacttaccgccctgtgagtaaca

SEQ ID NO: 109092 - DNA, 2433 bp, Homo sapiens
  Payload ID: 1433
  Gene Symbol: ASH2L
  Gene Name: ash2 (absent, small, or homeotic)-like (Drosophila)
  Uniprot ID: Q9UBL3
  ENST ID: ENST00000521652
  CDS Start-End: 296-1801
ggagctgaggctcctgtcgttatctctgatccttgcaccctggcaggaagctggtagctcacactttaacgggaggccttcacatattccagaaaagaaaccactttgcagtgccagactggaagaagtaacggtcactctgaaaacagggtgggagagctgcctctctttgaacctctcccaggaccaactctaacccagggaggcaaacttggtcgatgtaagcggtggcttggagacagaatcatctaatggaaaagatacactagaaggtgctggggatacatcagaggtgatggatactcaggcgggctccgtggatgaagagaatggccgacagttgggtgaggtagagctgcaatgtgggatttgtacaaaatggttcacggctgacacatttggcatagatacctcatcctgtctacctttcatgaccaactacagttttcattgcaacgtctgccatcacagtgggaatacctatttcctccggaagcaagcaaacttgaaggaaatgtgccttagtgctttggccaacctgacatggcagtcccgaacacaggatgaacatccgaagacaatgttctccaaagataaggatattataccatttattgataaatactgggagtgcatgacaaccagacagagacctgggaaaatgacttggccaaataacattgttaaaacaatgagtaaagaaagagatgtattcttggtaaaggaacacccagatccaggcagtaaagatccagaagaagattaccccaaatttggacttttggatcaggaccttagtaacattggtcctgcttatgacaaccaaaaacagagcagtgctgtgtctactagtgggaatttaaatgggggaattgcagcaggaagcagcggaaaaggacgaggagccaagcgcaaacagcaggatggagggaccacagggaccaccaagaaggcccggagtgaccctttgttttctgctcagcgccttccccctcatggctacccattggaacacccgtttaacaaagatggctatcggtatattctagctgagcctgatccgcacgcccctgaccccgagaagctggaacttgactgctgggcaggaaaacctattcctggagacctctacagagcctgcttgtatgaacgggttttgttagccctacatgatcgagctccccagttaaagatctcagatgaccggctgactgtggttggagagaagggctactctatggtgagggcctctcatggagtacggaaaggtgcctggtattttgaaatcactgtggatgagatgccaccagataccgctgccagactgggttggtcccagcccctaggaaaccttcaagctcctttaggttatgataaatttagctattcttggcggagcaaaaagggaaccaagttccaccagtccattggcaaacactactcttctggctatggacagggagacgtcctgggattttatattaatcttcctgaagacacagagacagccaagtcattgccagacacatacaaagataaggctttgataaaattcaagagttatttgtattttgaggaaaaagactttgtggataaagcagagaagagcctgaagcagactccccatagtgaggtttccattaactttggaccatgcttcaagtatcctccgaaggatctcacttaccgccctatgagtgacatgggctggggcgccgtggtagagcacaccctggctgacgtcttgtatcacgtggagacagaagtggatgggaggcgcagtcccccatgggaaccctgaccaggtccctcttttctgtcaaggactttctgggaataatactgggggttttgtttttgtttttgaactgtctcaaatgttctcccaaagatgctaaaaacacagcctctccttttagcaagttaaaaggctgggtaggactgcgggagactgcctgcctttcaccattttctccccacttccagtgactgctcttattttgtgtaccataagccaacaaccgctgactccaggattgcataagccccctgtgaaatcggtgctgtactgcataccctgccagctgtgacttgttatcctactatattttctaaggagtgaataatattgtccgagtaactaacttatttaaaagacatttccttctgtgggcattgactgtatcccacctgttttccaaggaaatggtaacctgtttctgagaacacctgaaatcaatggctatacattccaaaccaatctaaacgctatttccttttggtgtgggtttggttttgttcattttgaaatacacttttgaacactgagatccgtaaaactactagatctctggaagtgtaattgtgaaagaaacttgcttgcagctttaacaaaatgagaaacttcccaaataaaacttgttttgaagttta

SEQ ID NO: 109093 - DNA, 2194 bp, Homo sapiens
  Payload ID: 1433
  Gene Symbol: ASH2L
  Gene Name: ash2 (absent, small, or homeotic)-like (Drosophila)
  ENST ID: ENST00000517496
  CDS Start-End: 2-367
gatggcggcggcaggagcaggacctggccaggaagcgggtgccgggcctggcccaggagcggtcgcaaatgcaacaggggcagaagagggggagatgaagccggtggcagcgggagcagccgctcctcctggagaggggatctctgctgctccgacagttgagcccagttccggggaggctgaaggcggggaggcaaacttggtcgatgtaagcggtggcttggagacagaatcatctaatggaaaagatacactaatcctgtctacctttcatgaccaactacagttttcattgcaacgtctgccatcacagtgggaatacctatttcctccggaagcaagcaaacttgaaggaaatgtgccttagtgctttggccaacctgacatggcagtcccgaacacaggatgaacatccgaagacaatgttctccaaagataaggatattataccatttattgataaatactgggagtgcatgacaaccagacagagacctgggaaaatgacttggccaaataacattgttaaaacaatgagtaaagaaagagatgtattcttggtaaaggaacacccagatccaggcagtaaagatccagaagaagattaccccaaatttggacttttggatcaggaccttagtaacattggtcctgcttatgacaaccaaaaacagagcagtgctgtgtctactagtgggaatttaaatgggggaattgcagcaggaagcagcggaaaaggacgaggagccaagcgcaaacagcaggatggagggaccacagggaccaccaagaaggcccggagtgaccctttgttttctgctcagcgccttccccctcatggctacccattggaacacccgtttaacaaagatggctatcggtatattctagctgagcctgatccgcacgcccctgaccccgagaagctggaacttgactgctgggcaggaaaacctattcctggagacctctacagagcctgcttgtatgaacgggttttgttagccctacatgatcgagctccccagttaaagatctcagatgaccggctgactgtggttggagagaagggctactctatggtgagggcctctcatggagtacggaaaggtgcctggtattttgaaatcactgtggatgagatgccaccagataccgctgccagactgggttggtcccagcccctaggaaaccttcaagctcctttaggttatgataaatttagctattcttggcggagcaaaaagggaaccaagttccaccagtccattggcaaacactactcttctggctatggacagggagacgtcctgggattttatattaatcttcctgaagacacagagacagccaagtcattgccagacacatacaaagataaggctttgataaaattcaagagttatttgtattttgaggaaaaagactttgtggataaagcagagaagagcctgaagcagactccccatagtgagataatattttataaaaatggtgtcaatcaaggtgtggcttacaaagatatttttgagggggtttacttcccagccatctcactgtacaagagctgcacggtttccattaactttggaccatgcttcaagtatcctccgaaggatctcacttaccgccctatgagtgacatgggctggggcgccgtggtagagcacaccctggctgacgtcttgtatcacgtggagacagaagtggatgggaggcgcagtcccccatgggaaccctgaccaggtccctcttttctgtcaaggactttctgggaataatactgggggttttgtttttgtttttgaactgtctcaaatgttctcccaaagatgctaaaaacacagcctctccttttagcaagttaaaaggctgggtaggactgcgggagactgcctgcctttcaccattttctccccacttccagtgactgctcttattttgtgtaccataagccaacaaccgctgactccaggattgcataagccccctgtgaaatcggtgctgtactgcataccctgccagctgtgacttgttatcctactatattttctaaggagtgaataatattgtccgagtaactaacttatttaaaagacatttccttctgtgggcattgactgtatcccacctgttttccaaggaaatggtaacctgtttctgagaacacctgaaatcaatggctatacattcc

SEQ ID NO: 109094 - DNA, 2808 bp, Homo sapiens
  Payload ID: 1433
  Gene Symbol: ASH2L
  Gene Name: ash2 (absent, small, or homeotic)-like (Drosophila)
  ENST ID: ENST00000545394
  CDS Start-End: 330-1799
cacagcaacgcgcgcgagagaagagagtattctcgcgagaagtccaggggtggccgtgatggcggcggcaggagcaggacctggccaggaagcgggtgccgggcctggcccaggagcggtcgcaaatgcaacaggggcagaagagggggagatgaagccggtggcagcgggagcagccgctcctcctggagaggggatctctgctgctccgacagttgagcccagttccggggaggctgaaggcggggaggcaaacttggtcgatgtaagcggtggcttggagacagaatcatctaatggaaaagatacactaatcctgtctacctttcatgaccaactacagttttcattgcaacgtctgccatcacagtgggaatacctatttcctccggaagcaagcaaacttgaaggaaatgtgccttagtgctttggccaacctgacatggcagtcccgaacacaggatgaacatccgaagacaatgttctccaaagataaggatattataccatttattgataaatactgggagtgcatgacaaccagacagagacctgggaaaatgacttggccaaataacattgttaaaacaatgagtaaagaaagagatgtattcttggtaaaggaacacccagatccaggcagtaaagatccagaagaagattaccccaaatttggacttttggatcaggaccttagtaacattggtcctgcttatgacaaccaaaaacagagcagtgctgtgtctactagtgggaatttaaatgggggaattgcagcaggaagcagcggaaaaggacgaggagccaagcgcaaacagcaggatggagggaccacagggaccaccaagaaggcccggagtgaccctttgttttctgctcagcgccttccccctcatggctacccattggaacacccgtttaacaaagatggctatcggtatattctagctgagcctgatccgcacgcccctgaccccgagaagctggaacttgactgctgggcaggaaaacctattcctggagacctctacagagcctgcttgtatgaacgggttttgttagccctacatgatcgagctccccagttaaagatctcagatgaccggctgactgtggttggagagaagggctactctatggtgagggcctctcatggagtacggaaaggtgcctggtattttgaaatcactgtggatgagatgccaccagataccgctgccagactgggttggtcccagcccctaggaaaccttcaagctcctttaggttatgataaatttagctattcttggcggagcaaaaagggaaccaagttccaccagtccattggcaaacactactcttctggctatggacagggagacgtcctgggattttatattaatcttcctgaagacacagagacagccaagtcattgccagacacatacaaagataaggctttgataaaattcaagagttatttgtattttgaggaaaaagactttgtggataaagcagagaagagcctgaagcagactccccatagtgagataatattttataaaaatggtgtcaatcaaggtgtggcttacaaagatatttttgagggggtttacttcccagccatctcactgtacaagagctgcacggtttccattaactttggaccatgcttcaagtatcctccgaaggatctcacttaccgccctatgagtgacatgggctggggcgccgtggtagagcacaccctggctgacgtcttgtatcacgtggagacagaagtggatgggaggcgcagtcccccatgggaaccctgaccaggtccctcttttctgtcaaggactttctgggaataatactgggggttttgtttttgtttttgaactgtctcaaatgttctcccaaagatgctaaaaacacagcctctccttttagcaagttaaaaggctgggtaggactgcgggagactgcctgcctttcaccattttctccccacttccagtgactgctcttattttgtgtaccataagccaacaaccgctgactccaggattgcataagccccctgtgaaatcggtgctgtactgcataccctgccagctgtgacttgttatcctactatattttctaaggagtgaataatattgtccgagtaactaacttatttaaaagacatttccttctgtgggcattgactgtatcccacctgttttccaaggaaatggtaacctgtttctgagaacacctgaaatcaatggctatacattccaaaccaatctaaacgctatttccttttggtgtgggtttggttttgttcattttgaaatacacttttgaacactgagatccgtaaaactactagatctctggaagtgtaattgtgaaagaaacttgcttgcagctttaacaaaatgagaaacttcccaaataaaacttgttttgaagtttatgtgacactttgcttcccttcagattgggtgcctcttggtgacagtgttcagaaatgtaagcagcacgaggaagggagctggcactgggaggaagagccgggtttctgagttgtgttttggctgctttcctattgctcccattcttgccaatcagccaccccctttcctgtgaaaatctgccaccttgaggagaggaacaagagtttaaaagggctaatgatctccctcccggtcttcccttggaacatggatgttgatatatgtgcgggtggtttcctgtcttgcttatcttcctttgccctgagctgatggctaaagggcagttttcggactattaaagactgaaatgtaagaatgagccttctaggctgggcgc

SEQ ID NO: 109095 - DNA, 1504 bp, Homo sapiens
  Payload ID: 1434
  Gene Symbol: ASGR1
  Gene Name: asialoglycoprotein receptor 1
  Uniprot ID: P07306
  ENST ID: ENST00000269299
  CDS Start-End: 401-1276
cccaaacggtgcacggaagagtgaggtgactggcatgtgtgggggcaacacgattctcctccctggggagcagagcagaggcaacccatcccccactcccacccccacactcccctaagttccaatccatttccacctctgtttactgtccaaagtcccgggcactggagatgccacgtttggcgtgcttggacacacagacacgcagacacagagacaccggggcccagggccctcctatggaccctgcccgctcccctcccattgtccacggctgtccgcccacccccattctccaagcttcagccccctccttagttcggcatctgcacagcactgaagaacctgggaatcagaccctgagaccctgagcaatcccaggtccagcgccagccctatcatgaccaaggagtatcaagaccttcagcatctggacaatgaggagagtgaccaccatcagctcagaaaagggccacctcctccccagcccctcctgcagcgtctctgctccggacctcgcctcctcctgctctccctgggcctcagcctcctgctgcttgtggttgtctgtgtgatcggatcccaaaactcccagctgcaggaggagctgcggggcctgagagagacgttcagcaacttcacagcgagcacggaggcccaggtcaagggcttgagcacccagggaggcaatgtgggaagaaagatgaagtcgctagagtcccagctggagaaacagcagaaggacctgagtgaagatcactccagcctgctgctccacgtgaagcagttcgtgtctgacctgcggagcctgagctgtcagatggcggcgctccagggcaatggctcagaaaggacctgctgcccggtcaactgggtggagcacgagcgcagctgctactggttctctcgctccgggaaggcctgggctgacgccgacaactactgccggctggaggacgcgcacctggtggtggtcacgtcctgggaggagcagaaatttgtccagcaccacataggccctgtgaacacctggatgggcctccacgaccaaaacgggccctggaagtgggtggacgggacggactacgagacgggcttcaagaactggaggccggagcagccggacgactggtacggccacgggctcggaggaggcgaggactgtgcccacttcaccgacgacggccgctggaacgacgacgtctgccagaggccctaccgctgggtctgcgagacagagctggacaaggccagccaggagccacctctcctttaatttatttcttcaatgcctcgacctgccgcaggggtccgggattgggaatccgcccatctgggggcctcttctgctttctcgggaattttcatctaggattttaagggaaggggaaggatagggtgatgttccgaaggtgaggagcttgaaacccgtggcgctttctgcagtttgcaggttatcattgtgaactttttttttttaagagtaaaaagaaatatacctaaa

SEQ ID NO: 109096 - DNA, 944 bp, Homo sapiens
  Payload ID: 1434
  Gene Symbol: ASGR1
  Gene Name: asialoglycoprotein receptor 1
  ENST ID: ENST00000380920
  CDS Start-End: 266-838
tgtcagtgatcagtttggtgaagggggaaaagggccacctcctccccagcccctcctgcagcgtctctgctccggacctcgcctcctcctgctctccctgggcctcagcctcctgctgcttgtggttgtctgtgtgatcggatcccaaaactcccagctgcaggaggagctgcggggcctgagagagacgttcagcaacttcacagcgagcacggaggcccaggtcaagggcttgagcacccagggaggcaatgtgggaagaaagatgaagtcgctagagtcccagctggagaaacagcagaaggacctgagtgaagatcactccagcctgctgctccacgtgaagcagttcgtgtctgacctgcggagcctgagctgtcagatggcggcgctccagggcaatggctcagaaaggacctgctgcccggtcaactgggtggagcacgagcgcagctgctactggttctctcgctccgggaaggcctgggctgacgccgacaactactgccggctggaggacgcgcacctggtggtggtcacgtcctgggaggagcagaaatttgtccagcaccacataggccctgtgaacacctggatgggcctccacgaccaaaacgggccctggaagtgggtggacgggacggactacgagacgggcttcaagaactggaggccggagcagccggacgactggtacggccacgggctcggaggaggcgaggactgtgcccacttcaccgacgacggccgctggaacgacgacgtctgccagaggccctaccgctgggtctgcgagacagagctggacaaggccagccaggagccacctctcctttaatttatttcttcaatgcctcgacctgccgcaggggtccgggattgggaatccgcccatctgggggcctcttctgctttctcgggaattttcatctaggattttaagg

SEQ ID NO: 109097 - DNA, 797 bp, Homo sapiens
  Payload ID: 1434
  Gene Symbol: ASGR1
  Gene Name: asialoglycoprotein receptor 1
  ENST ID: ENST00000572879
  CDS Start-End: 435-719
tctggccctgcagggtcgcccaccgcccgcatttcttcatgtacatggttcctcctagactactagggccgccttagcttgctacccttttaggaccctggagctgtgccagggtcccctctgtccccgcgctcctgacaccccctcctcttgcagggccacctcctccccagcccctcctgcagcgtctctgctccggacctcgcctcctcctgctctccctgggcctcagcctcctgctgcttgtggttgtctgtgtgatcggatcccaaaactcccagctgcaggaggagctgcggggcctgagagagacgttcagcaacttcacagcgagcacggaggcccaggtcaagggcttgagcacccaggatcactccagcctgctgctccacgtgaagcagttcgtgtctgacctgcggagcctgagctgtcagatggcggcgctccagggcaatggctcagaaaggacctgctgcccggtcaactgggtggagcacgagcgcagctgctactggttctctcgctccgggaaggcctgggctgacgccgacaactactgccggctggaggacgcgcacctggtggtggtcacgtcctgggaggagcagaaatttgtccagcaccacataggccctgtgaacacctggatgggcctccacgaccaaaacgggccctggaagtgggtggacgggacggactacgagacgggcttcaagtgagtgcgcgccctccctcggcctgggtccggccgccttcgcgccctggggccctgggctgaggagtctggagcgacccgc

SEQ ID NO: 109098 - DNA, 627 bp, Homo sapiens
  Payload ID: 1434
  Gene Symbol: ASGR1
  Gene Name: asialoglycoprotein receptor 1
  ENST ID: ENST00000570576
  CDS Start-End: 539-627
ggagggggtggactgaggttcctggattggctgcagtgacgcagtcatgccattaggtgtcagcaaaagctcagggcctcggtgggatggggcggctcagcgcttagcccccttccccagccctcttttctccccgatttccagttgcctctggccctgcagggtcgcccaccgcccgcatttcttcatgtacatggttcctcctagactactagggccgccttagcttgctacccttttaggaccctggagctgtgccagggtcccctctgtccccgcgctcctgacaccccctcctcttgcagggccacctcctccccagcccctcctgcagcgtctctgctccggacctcgcctcctcctgctctccctgggcctcagcctcctgctgcttgtggttgtctgtgtgatcggatcccaaaactcccagctgcaggaggagctgcggggcctgagagagacgttcagcaacttcacagcgagcacggaggcccaggtcaagggcttgagcacccagggaggcaatgtgggaagaaagatgaagtcgctagagtcccagctggagaaacagcagaaggacctgagtgaagatcactccagcctgctgctccacgtgaagcagttcgt

SEQ ID NO: 109099 - DNA, 1552 bp, Homo sapiens
  Payload ID: 1434
  Gene Symbol: ASGR1
  Gene Name: asialoglycoprotein receptor 1
  Uniprot ID: P07306
  ENST ID: ENST00000574388
  CDS Start-End: 794-1552
acacagagacaccggggcccagggccctcctatggaccctgcccgctcccctcccattgtccacggctgtccgcccacccccattctccaagcttcagccccctccttagttcggcatctgcacagcactgaagaacctgggaatcagaccctgagaccctgagcaagtaaaatgggaagagaggtggcgggaggctggctgggggtgcaggggtgcggagggaacccagggtgtgttggggggtgctgggtgggaaacatcagaggatggattctggatgtcaggcctgggaggggatggaggaaagaagaaagctcccggtggggcgcggtggtccacgcctgtaatcccagcacgttgggaggctggggtgggtggattgcctgagctcaggagtttgagacaagcctgggcaacacggtgaaaccccgtctctactaaaatacaaaaaagtagccaggcgtggtggcgtgcacctgttgtcccagctactccagaggctgaggcaggagaaccgcttgaacccgggaggcagaggttgcagtaagctgagatcatgccactgcactccggcctggggacagagcaagactccctctcaaaaaaaaaaaaaaaaagaaaagaaaaaaaagaaaaagaaaagaaagaaagaagaaaggtctccatgatggagccgtcaatcagatgggagtaaagagatgggcccctcattcccactctagtcctggtgagcccccacctcagccccagcctcagtcttgactcagtcccaggtccagcgccagccctatcatgaccaaggagtatcaagaccttcagcatctggacaatgaggagagtgaccaccatcagctcagaaaagactcccagctgcaggaggagctgcggggcctgagagagacgttcagcaacttcacagcgagcacggaggcccaggtcaagggcttgagcacccagggaggcaatgtgggaagaaagatgaagtcgctagagtcccagctggagaaacagcagaaggacctgagtgaagatcactccagcctgctgctccacgtgaagcagttcgtgtctgacctgcggagcctgagctgtcagatggcggcgctccagggcaatggctcagaaaggacctgctgcccggtcaactgggtggagcacgagcgcagctgctactggttctctcgctccgggaaggcctgggctgacgccgacaactactgccggctggaggacgcgcacctggtggtggtcacgtcctgggaggagcagaaatttgtccagcaccacataggccctgtgaacacctggatgggcctccacgaccaaaacgggccctggaagtgggtggacgggacggactacgagacgggcttcaagaactggaggccggagcagccggacgactggtacggccacgggctcggaggaggcgaggactgtgcccacttcaccgacgacggccgctggaacgacgacgtctgccagaggccctaccgctgggtctgcgagacagagctggacaaggccagccaggagccacctctcctttaa

SEQ ID NO: 109100 - DNA, 855 bp, Homo sapiens
  Payload ID: 1434
  Gene Symbol: ASGR1
  Gene Name: asialoglycoprotein receptor 1
  ENST ID: ENST00000573083
  CDS Start-End: 503-855
cacagagacaccggggcccagggccctcctatggaccctgcccgctcccctcccattgtccacggctgtccgcccacccccattctccaagcttcagccccctccttagttcggcatctgcacagcactgaagaacctgggaatcagaccctgagaccctgagcaaccaggcgtggtggcgtgcacctgttgtcccagctactccagaggctgaggcaggagaaccgcttgaacccgggaggcagaggttgcagtaagctgagatcatgccactgcactccggcctggggacagagcaagactccctctcaaaaaaaaaaaaaaaaagaaaagaaaaaaaagaaaaagaaaagaaagaaagaagaaaggtctccatgatggagccgtcaatcagatgggagtaaagagatgggcccctcattcccactctagtcctggtgagcccccacctcagccccagcctcagtcttgactcagtcccaggtccagcgccagccctatcatgaccaaggagtatcaagaccttcagcatctggacaatgaggagagtgaccaccatcagctcagaaaagggccacctcctccccagcccctcctgcagcgtctctgctccggacctcgcctcctcctgctctccctgggcctcagcctcctgctgcttgtggttgtctgtgtgatcggatcccaaaactcccagctgcaggaggagctgcggggcctgagagagacgttcagcaacttcacagcgagcacggaggcccaggtcaagggcttgagcacccagggaggcaatgtgggaagaaagatgaagtcgctagagtcccagctggagaaacagcagaaggacctgagtga

SEQ ID NO: 109101 - DNA, 887 bp, Homo sapiens
  Payload ID: 1434
  Gene Symbol: ASGR1
  Gene Name: asialoglycoprotein receptor 1
  ENST ID: ENST00000574330
  CDS Start-End: 1-488
tgagagagacgttcagcaacttcacagcgagcacggaggcccaggtcaagggcttgagcacccagggaggcaatgtgggaagaaagatgaagtcgctagagtcccagctggagaaacagcagaaggacctgagtgaagatcactccagcctgctgctccacgtgaagcagttcgtgtctgacctgcggagcctgagctgtcagatggcggcgctccagggcaatggctcagaaaggacctgctgcccggtcaactgggtggagcacgagcgcagctgctactggttctctcgctccgggaaggcctgggctgacgccgacaactactgccggctggaggacgcgcacctggtggtggtcacgtcctgggaggagcagaaatttgtccagcaccacataggccctgtgaacacctggatgggcctccacgaccaaaacgggccctggaagtgggtggacgggacggactacgagacgggcttcaagtgagtgcgcgccctccctcggcctgggtccggccgccttcgcgccctggggccctgggctgaggagtctggagcgacccgcctgcggatccgacctcctggggcccacagctggctctgtccccaggaactggaggccggagcagccggacgactggtacggccacgggctcggaggaggcgaggactgtgcccacttcaccgacgacggccgctggaacgacgacgtctgccagaggccctaccgctgggtctgcgagacagagctggacaaggccagccaggagccacctctcctttaatttatttcttcaatgcctcgacctgccgcaggggtccgggattgggaatccgcccatctgggggcctcttctgctttctcgggaattttcatctaggattt

SEQ ID NO: 109102 - DNA, 1384 bp, Homo sapiens
  Payload ID: 1434
  Gene Symbol: ASGR1
  Gene Name: asialoglycoprotein receptor 1
  Uniprot ID: P07306
  ENST ID: ENST00000619926
  CDS Start-End: 401-1159
cccaaacggtgcacggaagagtgaggtgactggcatgtgtgggggcaacacgattctcctccctggggagcagagcagaggcaacccatcccccactcccacccccacactcccctaagttccaatccatttccacctctgtttactgtccaaagtcccgggcactggagatgccacgtttggcgtgcttggacacacagacacgcagacacagagacaccggggcccagggccctcctatggaccctgcccgctcccctcccattgtccacggctgtccgcccacccccattctccaagcttcagccccctccttagttcggcatctgcacagcactgaagaacctgggaatcagaccctgagaccctgagcaatcccaggtccagcgccagccctatcatgaccaaggagtatcaagaccttcagcatctggacaatgaggagagtgaccaccatcagctcagaaaagactcccagctgcaggaggagctgcggggcctgagagagacgttcagcaacttcacagcgagcacggaggcccaggtcaagggcttgagcacccagggaggcaatgtgggaagaaagatgaagtcgctagagtcccagctggagaaacagcagaaggacctgagtgaagatcactccagcctgctgctccacgtgaagcagttcgtgtctgacctgcggagcctgagctgtcagatggcggcgctccagggcaatggctcagaaaggacctgctgcccggtcaactgggtggagcacgagcgcagctgctactggttctctcgctccgggaaggcctgggctgacgccgacaactactgccggctggaggacgcgcacctggtggtggtcacgtcctgggaggagcagaaatttgtccagcaccacataggccctgtgaacacctggatgggcctccacgaccaaaacgggccctggaagtgggtggacgggacggactacgagacgggcttcaagaactggaggccggagcagccggacgactggtacggccacgggctcggaggaggcgaggactgtgcccacttcaccgacgacggccgctggaacgacgacgtctgccagaggccctaccgctgggtctgcgagacagagctggacaaggccagccaggagccacctctcctttaatttatttcttcaatgcctcgacctgccgcaggggtccgggattgggaatccgcccatctgggggcctcttctgctttctcgggaattttcatctaggattttaagggaaggggaaggatagggtgatgttccgaaggtgaggagcttgaaacccgtggcgctttctgcagtttgcaggttatcattgtgaactttttttttttaagagtaaaaagaaatatacct

SEQ ID NO: 109103 - DNA, 1396 bp, Homo sapiens
  Payload ID: 1435
  Gene Symbol: ASGR2
  Gene Name: asialoglycoprotein receptor 2
  Uniprot ID: P07307
  ENST ID: ENST00000254850
  CDS Start-End: 280-1143
tactgtccaaagtcccaggccaggaggtgccaggttagagcttggacactcagaccctccagtgcaggccttgcccggaccagcccctcctccactctcctctcccctgtgagctccacctgccccagttctcctggctttaacccctccttggccaaggccagggttgcctgcgggagccaggtgtccgctctccacacctttcacagccccagccctcagagcaacctcagcccagcccagcccagctccagctccagctccagcccgggccccatcatggccaaggactttcaagatatccagcagctgagctcggaggaaaatgaccatcctttccatcaagggccacctcctgcccagcccctggcacagcgtctctgctccatggtctgcttcagtctgcttgccctgagcttcaacatcctgctgctggtggtcatctgtgtgactgggtcccaaagtgcacagctgcaagccgagctgcggagcctgaaggaagctttcagcaacttctcctcgagcaccctgacggaggtccaggcaatcagcacccacggaggcagcgtgggtgacaagatcacatccctaggagccaagctggagaaacagcagcaggacctgaaagcagatcacgatgccctgctcttccatctgaagcacttccccgtggacctgcgcttcgtggcctgccagatggagctcctccacagcaacggctcccaaaggacctgctgccccgtcaactgggtggagcaccaaggcagctgctactggttctctcactccgggaaggcctgggctgaggcggagaagtactgccagctggagaacgcacacctggtggtcatcaactcctgggaggagcagaaattcattgtacaacacacgaaccccttcaatacctggataggtctcacggacagtgatggctcttggaaatgggtggatggcacagactataggcacaactacaagaactgggctgtcactcagccagataattggcacgggcacgagctgggtggaagtgaagactgtgttgaagtccagccggatggccgctggaacgatgacttctgcctgcaggtgtaccgctgggtgtgtgagaaaaggcggaatgccaccggcgaggtggcctgaccccagcacacctctggctaacccataccccacacctgcccagctctggcttctctgttgaggattttgaggaaaggaagaaacactgagacaggggtatggggaagagctgagcaaagagagaaaggaggtagtttaagagtccctgaccctggaggactgagatcccacctccttctgtaattcattgtaattattataatcgtcagcctcttcaatggcgtaggaaagaagaaacaaatgcttgaatctc

SEQ ID NO: 109104 - DNA, 1386 bp, Homo sapiens
  Payload ID: 1435
  Gene Symbol: ASGR2
  Gene Name: asialoglycoprotein receptor 2
  Uniprot ID: P07307
  ENST ID: ENST00000355035
  CDS Start-End: 198-1133
ctgcgggagccaggtgtccgctctccacacctttcacagatcctacccaggccaccaccccgaacccctccgaccctgcgttccatcccaccatcaacctccacgtgaatctgcacctctgccccagccccagccctcagagcaacctcagcccagcccagcccagctccagctccagctccagcccgggccccatcatggccaaggactttcaagatatccagcagctgagctcggaggaaaatgaccatcctttccatcaaggtgaggggccaggcactcgcaggctgaatcccaggagaggaaatccatttttgaaagggccacctcctgcccagcccctggcacagcgtctctgctccatggtctgcttcagtctgcttgccctgagcttcaacatcctgctgctggtggtcatctgtgtgactgggtcccaaagtgagggtcacgggggtgcacagctgcaagccgagctgcggagcctgaaggaagctttcagcaacttctcctcgagcaccctgacggaggtccaggcaatcagcacccacggaggcagcgtgggtgacaagatcacatccctaggagccaagctggagaaacagcagcaggacctgaaagcagatcacgatgccctgctcttccatctgaagcacttccccgtggacctgcgcttcgtggcctgccagatggagctcctccacagcaacggctcccaaaggacctgctgccccgtcaactgggtggagcaccaaggcagctgctactggttctctcactccgggaaggcctgggctgaggcggagaagtactgccagctggagaacgcacacctggtggtcatcaactcctgggaggagcagaaattcattgtacaacacacgaaccccttcaatacctggataggtctcacggacagtgatggctcttggaaatgggtggatggcacagactataggcacaactacaagaactgggctgtcactcagccagataattggcacgggcacgagctgggtggaagtgaagactgtgttgaagtccagccggatggccgctggaacgatgacttctgcctgcaggtgtaccgctgggtgtgtgagaaaaggcggaatgccaccggcgaggtggcctgaccccagcacacctctggctaacccataccccacacctgcccagctctggcttctctgttgaggattttgaggaaaggaagaaacactgagacaggggtatggggaagagctgagcaaagagagaaaggaggtagtttaagagtccctgaccctggaggactgagatcccacctccttctgtaattcattgtaattattataatcgtcagcctcttcaatggcgtaggaaagaagaaacaaatgcttgaatctc

SEQ ID NO: 109105 - DNA, 879 bp, Homo sapiens
  Payload ID: 1435
  Gene Symbol: ASGR2
  Gene Name: asialoglycoprotein receptor 2
  Uniprot ID: P07307
  ENST ID: ENST00000446679
  CDS Start-End: 1-879
atggccaaggactttcaagatatccagcagctgagctcggaggaaaatgaccatcctttccatcaagggccacctcctgcccagcccctggcacagcgtctctgctccatggtctgcttcagtctgcttgccctgagcttcaacatcctgctgctggtggtcatctgtgtgactgggtcccaaagtgagggtcacgggggtgcacagctgcaagccgagctgcggagcctgaaggaagctttcagcaacttctcctcgagcaccctgacggaggtccaggcaatcagcacccacggaggcagcgtgggtgacaagatcacatccctaggagccaagctggagaaacagcagcaggacctgaaagcagatcacgatgccctgctcttccatctgaagcacttccccgtggacctgcgcttcgtggcctgccagatggagctcctccacagcaacggctcccaaaggacctgctgccccgtcaactgggtggagcaccaaggcagctgctactggttctctcactccgggaaggcctgggctgaggcggagaagtactgccagctggagaacgcacacctggtggtcatcaactcctgggaggagcagaaattcattgtacaacacacgaaccccttcaatacctggataggtctcacggacagtgatggctcttggaaatgggtggatggcacagactataggcacaactacaagaactgggctgtcactcagccagataattggcacgggcacgagctgggtggaagtgaagactgtgttgaagtccagccggatggccgctggaacgatgacttctgcctgcaggtgtaccgctgggtgtgtgagaaaaggcggaatgccaccggcgaggtggcctga

SEQ ID NO: 109106 - DNA, 1202 bp, Homo sapiens
  Payload ID: 1435
  Gene Symbol: ASGR2
  Gene Name: asialoglycoprotein receptor 2
  ENST ID: ENST00000574868
  CDS Start-End: 797-1202
ttttagtagagacagagtttcaccatgttggccaggctggtctcgaactcctgacctcagtttctctactcacctgggccaccacctagagcaagttgcctcatctctccgaggctccgcttccgaaccctgtgaaatgggagtaacagaagtcctgcctcgtgggggtgttgtgctgtgataaatgaagaaacaccttggagaatttagggcagtggctgggcctgaggacagtgtttgtgttgcctgggctggggcagggtctgggccggacggggctctctgaggttggattcctcctgcgaggagagctgtttttctgcaaagccccttcctcctcctgctgaagcttctggatttgagaggctttactctccaggagagtgaagcgagttgggccagagctgagagtctggtggccgagcccacaggaagctggggtctgtggttcagatgccggattgggcaagagtagagaactggtcgctgtgatcctggtcagggatatttggagacacccacagttctgtcccaggccaggaggtgccaggttagagcttggacactcagaccctccagtgcaggccttgcccggaccagcccctcctccactctcctctcccctgtgagctccacctgccccagttctcctggctttaacccctccttggccaaggccagggttgcctgcgggagccaggtgtccgctctccacacctttcacagccccagccctcagagcaacctcagcccagcccagcccagctccagctccagctccagcccgggccccatcatggccaaggactttcaagatatccagcagctgagctcggaggaaaatgaccatcctttccatcaaggtgaggggccaggcactcgcaggctgaatcccaggagaggaaatccatttttgaaagggccacctcctgcccagcccctggcacagcgtctctgctccatggtctgcttcagtctgcttgccctgagcttcaacatcctgctgctggtggtcatctgtgtgactgggtcccaaagtgcacagctgcaagccgagctgcggagcctgaaggaagctttcagcaacttctcctcgagcaccctgacggaggtccaggcaatcagcacccacggaggcagcgtgggtgacaagatcacatccctaggagccaagctggagaaacagcagcaggacctgaaag

SEQ ID NO: 109107 - DNA, 467 bp, Homo sapiens
  Payload ID: 1436
  Gene Symbol: ASPG
  Gene Name: asparaginase
  ENST ID: ENST00000550583
  CDS Start-End: 1-423
gcggccgcccggggaggccacacagaggcagtcaccatgctgctgcagagaggtgtggacgtgaacacccgggacacggatggcttcagcccgctgctgctggccgtgcggggcaggcatccgggtgtcattgggttgctgcgggaagccggggcctccctgtccacccaggagctggaggaagcagggacggagctgtgcaggctggcatacagggccgacctcgaaggcctgcaggtgtggtggcaggcaggggctgacctggggcagccgggctatgacgggcacagcgccctgcacgtcgcagaggcagccgggaacctggcagtggtggcctttctacagagcctggagggtgcggttggtgcccaggccccatgcccagagccctcatgttttcaggaagtgctgcctggtgtctaacctgaaggcgtcctgctgcagtataagccattccttcctcccat

SEQ ID NO: 109108 - DNA, 377 bp, Homo sapiens
  Payload ID: 1436
  Gene Symbol: ASPG
  Gene Name: asparaginase
  ENST ID: ENST00000551170
  CDS Start-End: 1-377
cccggccagccgcaaccagaggattctctacaccgtgctggagtgccagcccctcttcgactccagtgacatgaccatcgctgagtgggtttgccttgcccagaccatcaagaggcactacgagcagtaccacggctttgtggtcatccacggcaccgacaccatggcctttgctgcctcgatgctgtccttcatgctggagaacctgcagaagactgtcatcctcactggggcccaggtgcccatccatgccctgtggagcgacggccgtgagaacctgctgggggcactgctcatggctggccagtatgtgatcccagagctgctgaccaaggaccttcggggggagatgacgccaccctcggtggaagagcgcc

SEQ ID NO: 109109 - DNA, 1791 bp, Homo sapiens
  Payload ID: 1436
  Gene Symbol: ASPG
  Gene Name: asparaginase
  ENST ID: ENST00000546892
  CDS Start-End: 81-1748
cctccgcgcagtccctgagtcccgcaggccctgcgtccccgctgcacacccccgtccactcccgtggtccccggtccggcatggcgcgcgcggtggggcccgagcggaggctgctggccgtctacaccggcggcaccattggcatgcggagtgagctcggcgtgcttgtgcccgggacgggcctggctgccatcctgaggacactgcccatgttccatgacgaggagcacgcccgagcccgcggcctctctgaggacaccctggtgctacccccggccagccgcaaccagaggattctctacaccgtgctggagtgccagcccctcttcgactccagtgacatgaccatcgctgagtgggtttgccttgcccagaccatcaagaggcactacgagcagtaccacggctttgtggtcatccacggcaccgacaccatggcctttgctgcctcgatgctgtccttcatgctggagaacctgcagaagactgtcatcctcactggggcccaggtgcccatccatgccctgtggagcgacggccgtgagaacctgctgggggcactgctcatggctggccagtatgtgatcccagaggtctgccttttcttccagaatcagctgtttcggggcaaccgggcaaccaaggtagacgctcggaggttcgcagctttctgctccccgaacctgctgcctctggccacagtgggtgctgacatcacaatcaacagggagctggtgcggaaggtggacgggaaggctgggctggtggtgcacagcagcatggagcaggacgtgggcctgctgcgcctctaccctgggatccctgccgccctggttcgggccttcttgcagcctcccctgaagggcgtggtcatggagaccttcggttcagggaacggacccaccaagcccgacctgctgcaggagctgcgggtggccaccgagcgcggcctggtcatcgtcaactgtacccactgcctccagggggctgtgaccacagactatgcagctggcatggccatggcgggagccggcgtcatctcaggcttcgacatgacatcggaggccgccctggccaagctatcgtatgtgctgggccagccagggctgagcctggatgtcaggaaggagctgctgaccaaggaccttcggggggagatgacgccaccctcggtggaagagcgccggccctcactgcagggcaacacgctgggcggtggggtctcctggctcctcagtctgagcggcagccaggaggcagatgccctgcggaatgccctggtgcccagcctggcctgtgctgctgcccacgccggtgacgtggaggcgctgcaggcgcttgtggagctgggcagtgacctgggcctggtggactttaacggccaaaccccactgcacgcggccgcccggggaggccacacagaggcagtcaccatgctgctgcagagaggtgtggacgtgaacacccgggacacggatggcttcagcccgctgctgctggccgtgcggggcaggcatccgggtgtcattgggttgctgcgggaagccggggcctccctgtccacccaggagctggaggaagcagggacggagctgtgcaggcagaggcagccgggaacctggcagtggtggcctttctacagagcctggagggtgcggttggtgcccaggccccatgcccagaagtgctgcctggtgtctaacctgaaggcgtcctgctgcagtataagccattccttcctcccatgacctgctggaggggtctcaggcatgaccccactgctggggctgc

SEQ ID NO: 109110 - DNA, 4851 bp, Homo sapiens
  Payload ID: 1436
  Gene Symbol: ASPG
  Gene Name: asparaginase
  Uniprot ID: Q86U10
  ENST ID: ENST00000551177
  CDS Start-End: 93-1814
cgccccgggcctcctccgcgcagtccctgagtcccgcaggccctgcgtccccgctgcacacccccgtccactcccgtggtccccggtccggcatggcgcgcgcggtggggcccgagcggaggctgctggccgtctacaccggcggcaccattggcatgcggagtgagctcggcgtgcttgtgcccgggacgggcctggctgccatcctgaggacactgcccatgttccatgacgaggagcacgcccgagcccgcggcctctctgaggacaccctggtgctacccccggccagccgcaaccagaggattctctacaccgtgctggagtgccagcccctcttcgactccagtgacatgaccatcgctgagtgggtttgccttgcccagaccatcaagaggcactacgagcagtaccacggctttgtggtcatccacggcaccgacaccatggcctttgctgcctcgatgctgtccttcatgctggagaacctgcagaagactgtcatcctcactggggcccaggtgcccatccatgccctgtggagcgacggccgtgagaacctgctgggggcactgctcatggctggccagtatgtgatcccagaggtctgccttttcttccagaatcagctgtttcggggcaaccgggcaaccaaggtagacgctcggaggttcgcagctttctgctccccgaacctgctgcctctggccacagtgggtgctgacatcacaatcaacagggagctggtgcggaaggtggacgggaaggctgggctggtggtgcacagcagcatggagcaggacgtgggcctgctgcgcctctaccctgggatccctgccgccctggttcgggccttcttgcagcctcccctgaagggcgtggtcatggagaccttcggttcagggaacggacccaccaagcccgacctgctgcaggagctgcgggtggccaccgagcgcggcctggtcatcgtcaactgtacccactgcctccagggggctgtgaccacagactatgcagctggcatggccatggcgggagccggcgtcatctcaggcttcgacatgacatcggaggccgccctggccaagctatcgtatgtgctgggccagccagggctgagcctggatgtcaggaaggagctgctgaccaaggaccttcggggggagatgacgccaccctcggtggaagagcgccggccctcactgcagggcaacacgctgggcggtggggtctcctggctcctcagtctgagcggcagccaggaggcagatgccctgcggaatgccctggtgcccagcctggcctgtgctgctgcccacgccggtgacgtggaggcgctgcaggcgcttgtggagctgggcagtgacctgggcctggtggactttaacggccaaaccccactgcacgcggccgcccggggaggccacacagaggcagtcaccatgctgctgcagagaggtgtggacgtgaacacccgggacacggatggcttcagcccgctgctgctggccgtgcggggcaggcatccgggtgtcattgggttgctgcgggaagccggggcctccctgtccacccaggagctggaggaagcagggacggagctgtgcaggctggcatacagggccgacctcgaaggcctgcaggtgtggtggcaggcaggggctgacctggggcagccgggctatgacgggcacagcgccctgcacgtcgcagaggcagccgggaacctggcagtggtggcctttctacagagcctggagggtgcggttggtgcccaggccccatgcccagaagtgctgcctggtgtctaacctgaaggcgtcctgctgcagtataagccattccttcctcccatgacctgctggaggggtctcaggcatgaccccactgctggggctgcttcccagcctgctctcatgtaaagcctgaaggcctttgttgggcaggacggcaataaagtctctgacatcccctcaccaggtctgtacagcctggctctgagaggctctgtctgggtccgggactgtggatgtgtgtggggagtcaggcccaggctctgtggggtctctgcgggggtcacttggcccatccttccgggggcagctgtgcgtgtgagctgggcagggtggggtgcatggacgtgacttggccaagtggtcctttcccagctgccactcccccttcctgccaccctgcctttgcccaggctggtccctcctccagacaccctctgcccatctccttacctcctgcgccttcattctggagcttgaagtcccctcccccaggcagccctccaacccctggatgagcatgctgcccctgcttaactctttagtcctcacagtcccgtcccagttgctgtctggttttctgtcaccccagtatcgctgcacccggcccccctctcaggccagggccacaccagggctccatagggctgcggaagcctgtgagtgtcaagggggcttcacactctggtggtgagcccctggggaccattccagcccctgctctgcctgaagctcctgatgcagcctccaccgtgagccaggccaccctgtaagggaagaggtgagctgtgcctgcctggttgcacagcctgggcaggtgggcgggtggggcgggccctgctgctgcccggtgggggtggtgctccaaggccaagggcagcctcgtgccttctttcagctggggctgaaatcgggggtgtggacccctggcccccatcatgtgtgcatgcactggcctgggatggccagggactccctgctgctgcccccagcccctgaccccttcttgctgggtgtgaggagcatgggggctgcctccctccaggcctctctacctgcccaggtgacggttccttttgtccctctgtttggctggcctctggactggagccccaggagggcaaaagcatgaccccagagctggcccttggcacctgggcataccccaggctcctcagcctggttcccaagcctggctggtactgccgctggcatccttgctgtcctcaccccgacacaggtgtgcctgggccttgcacaacaaggtgacgccatgcgagcgtggcagggccggggaagcctttgctcctcaccctggtgaggcccatgaggggctgcaggtggagggagggtggcaccgggccccagagccaggagcccctgctgtccccggatggccgagacccttggagggccttgggagaggcggtggggcatctggacaaatgcctggtgcaggtgagaaggggtgggactacctccggcatccctgggctgagcccacctggtctccccggttgctcctgcacacggcagtgcccacctgcttccctcagctcctgaggggctgggcagagcctgttgctcacgccaccccactcagtgctgctccgggttgtgaaagctgcaggtggctcacgttagcccacatggcagcaccctcccagagcaggtgccaacctgccagtgtagacacaccgactgatgccgggggtgagtgtcctgtagtgtagaaacgcccactcatcctgcttgtcccgcagagagcatttgtcaagctggcctttctccaactgggtcactgatggagttcggcagagacggcttgggggccacgggctgggcagatggggagagctcctcacaaggctgggcagccagacccccattgtcagtcccctccaaaccctcgtgggatgtagggccctaccacagggagccccgggactgggccagtgtctcaggaggctgtgaagagtcataggcttgagtctgggagctttctcgggggccgttttgtgccccttggggagaggccagaggggccctgggtaaggggactcctctagaatcacccagaagtggcaggaggtgcagggccactgctcggggctccctgggctctgagctgggcagtgacctggccccaaggcctctggctctctggcgtgcagtgggaacagccgggacagacaggcttggagcgttcgtgtcctgcgccgcgttggtgtgtttcgtccccactgtgcctgtaggagggcaccgggtccccgtctatcctacttcatggctgaggaagctaaggcacagagtggccccgtcctgcgcccagggctctgcgttggcacagggcagagctgggctgtgaatcagggccgccttgtctcttgctgtggtgtgaggctgtgggagactcaggaatgaggcacagccaggtgcccagtgcccgtgggacccgcctccccacagtggggtggcgccgctcacacctggtaatttcacgctgggggaggccttggttcctatagcccatctcgaatcacctggatcccagggctatctctggggaacatctcctctccatcacgactactgtctttttcaccagcattttctatcctaaaatcagactcctcagctgagggccctccaggaccgcccttccccagctggaggtaaccagatttctcgtgtatgctaggaagttccccttctggtcacacctcaatatttcctgctgctggtgggaactgcaggtgcttgtacttgtcaccttctccccgtcctctctcgtcagttcccttggatgctggacacgggagccacctgggcgaggggagcccatccaagtggctgtgcgtcgggaagagtctgcccaggactgggctagaccagaacttagaattaaggagtggtggccaggcttggtggctcacacctgcaatcccagcactttgggaggccgaggcgggtggatagcttgagcctaggagtttgagaacagccaacatggcgaaactctgtctcttaaaaaataaataaaaacattagccag

SEQ ID NO: 109111 - DNA, 2182 bp, Homo sapiens
  Payload ID: 1437
  Gene Symbol: ASRGL1
  Gene Name: asparaginase like 1
  Uniprot ID: Q7L266
  ENST ID: ENST00000301776
  CDS Start-End: 134-1060
gaccagagcggttgcgggctgagcggtttcgagccggcgtcggggagcggcggtaccgggcggctgcggggctggctcgacccagcttgaggtctcggcgtccgcgtcctgcggtgccctgggatccgccgacatgaatcccatcgtagtggtccacggcggcggagccggtcccatctccaaggatcggaaggagcgagtgcaccagggcatggtcagagccgccaccgtgggctacggcatcctccgggagggcgggagcgccgtggatgccgtagagggagctgtcgtcgccctggaagacgatcccgagttcaacgcaggttgtgggtctgtcttgaacacaaatggtgaggttgaaatggatgctagtatcatggatggaaaagacctgtctgcaggagcagtgtccgcagtccagtgtatagcaaatcccattaaacttgctcggcttgtcatggaaaagacacctcattgctttctgactgaccaaggcgcagcgcagtttgcagcagctatgggggttccagagattcctggagaaaaactggtgacagagagaaacaaaaagcgcctggaaaaagagaagcatgaaaaaggtgctcagaaaacagattgtcaaaaaaacttgggaaccgtgggtgctgttgccttggactgcaaagggaatgtagcctacgcaacctccacaggcggtatcgttaataaaatggtcggccgcgttggggactcaccgtgtctaggagctggaggttatgccgacaatgacatcggagccgtctcaaccacagggcatggggaaagcatcctgaaggtgaacctggctagactcaccctgttccacatagaacaaggaaagacggtagaagaggctgcggacctatcgttgggttatatgaagtcaagggttaaaggtttaggtggcctcatcgtggttagcaaaacaggagactgggtggcaaagtggacctccacctccatgccctgggcagccgccaaggacggcaagctgcacttcggaattgatcctgacgatactactatcaccgaccttccctaagccgctggaagattgtattccagatgctagcttagaggtcaagtacagtctcctcatgagacatagcctaatcaattagatctagaattggaaaaattgtcccgtctgtcacttgttttgttgccttaataagcatctgaatgtttggttgtggggcgggttctgaagcgatgagagaaatgcccgtattaggaggattacttgagcccaggaggtcaaagctgaggtgagccatgattactccactgcactccagcctgggcaacagagccaggccctgtatcaaaaaaaaaaaaaaaaagaaaagggaaaaaagaaagaaagcagcagcatgatcctgacatgacagatgtgggagacccacagcctgcagacactgtgggctggaaggtgggaagggaggggccggtggaggtggagctgtttgaaagtgacacagcagcagtagaagcagtggtgggcgaagcccaggtgaccctcagaacgttgcacaagaacatcagggaaaagaaccagaatcctttaaggaaaatgttcttcatgtatgagagactaaagtgatttttctaagaaagttcagcccttctctgacttacctggacatttctagatacttccaaaggaccctctgggaatccatagcttcctaatctggagatgggaggtcataagggagacgctgtggggttccttgaagtttcttgggttcacagaggagccccctcacttggtgttctcccgtgagccagcctccacctgccaaagacactctggtcctcgtatagtgagtaatggggctcagggcctctccaacaacagagaggagctgatgctgtagggctgaccccgtgacttcctgagtcctcaccctgtccagtgctttgagattcttcccacctccccatcctcaccagccggatcgggcgctgtgcagtgtggtcagcatggtgaagaaagtcatttcctcggtgggcagtattcctctttatctctcattacactggaaatgttatttctgctgtatcatccgtgctcaacgttttagtctgtcaggctcaccttctctctggaaagaatttgcttaacttgacattccatgtgccgctaataaaatatattttg

SEQ ID NO: 109112 - DNA, 2270 bp, Homo sapiens
  Payload ID: 1437
  Gene Symbol: ASRGL1
  Gene Name: asparaginase like 1
  Uniprot ID: Q7L266
  ENST ID: ENST00000415229
  CDS Start-End: 216-1142
gttgtgaccagagcggttgcgggctgagcggtttcgagccggcgtcggggagcggcggtaccgggcggctgcggggctggctcgacccagcttgaggtctcggcgtccgcgtcctgcggtgccctggggtctcccgaggaccttgtacccgcgcggcttccttgggctggctttggacgacgctttcgccttcctgctgcctaggatccgccgacatgaatcccatcgtagtggtccacggcggcggagccggtcccatctccaaggatcggaaggagcgagtgcaccagggcatggtcagagccgccaccgtgggctacggcatcctccgggagggcgggagcgccgtggatgccgtagagggagctgtcgtcgccctggaagacgatcccgagttcaacgcaggttgtgggtctgtcttgaacacaaatggtgaggttgaaatggatgctagtatcatggatggaaaagacctgtctgcaggagcagtgtccgcagtccagtgtatagcaaatcccattaaacttgctcggcttgtcatggaaaagacacctcattgctttctgactgaccaaggcgcagcgcagtttgcagcagctatgggggttccagagattcctggagaaaaactggtgacagagagaaacaaaaagcgcctggaaaaagagaagcatgaaaaaggtgctcagaaaacagattgtcaaaaaaacttgggaaccgtgggtgctgttgccttggactgcaaagggaatgtagcctacgcaacctccacaggcggtatcgttaataaaatggtcggccgcgttggggactcaccgtgtctaggagctggaggttatgccgacaatgacatcggagccgtctcaaccacagggcatggggaaagcatcctgaaggtgaacctggctagactcaccctgttccacatagaacaaggaaagacggtagaagaggctgcggacctatcgttgggttatatgaagtcaagggttaaaggtttaggtggcctcatcgtggttagcaaaacaggagactgggtggcaaagtggacctccacctccatgccctgggcagccgccaaggacggcaagctgcacttcggaattgatcctgacgatactactatcaccgaccttccctaagccgctggaagattgtattccagatgctagcttagaggtcaagtacagtctcctcatgagacatagcctaatcaattagatctagaattggaaaaattgtcccgtctgtcacttgttttgttgccttaataagcatctgaatgtttggttgtggggcgggttctgaagcgatgagagaaatgcccgtattaggaggattacttgagcccaggaggtcaaagctgaggtgagccatgattactccactgcactccagcctgggcaacagagccaggccctgtatcaaaaaaaaaaaaaaaaagaaaagggaaaaaagaaagaaagcagcagcatgatcctgacatgacagatgtgggagacccacagcctgcagacactgtgggctggaaggtgggaagggaggggccggtggaggtggagctgtttgaaagtgacacagcagcagtagaagcagtggtgggcgaagcccaggtgaccctcagaacgttgcacaagaacatcagggaaaagaaccagaatcctttaaggaaaatgttcttcatgtatgagagactaaagtgatttttctaagaaagttcagcccttctctgacttacctggacatttctagatacttccaaaggaccctctgggaatccatagcttcctaatctggagatgggaggtcataagggagacgctgtggggttccttgaagtttcttgggttcacagaggagccccctcacttggtgttctcccgtgagccagcctccacctgccaaagacactctggtcctcgtatagtgagtaatggggctcagggcctctccaacaacagagaggagctgatgctgtagggctgaccccgtgacttcctgagtcctcaccctgtccagtgctttgagattcttcccacctccccatcctcaccagccggatcgggcgctgtgcagtgtggtcagcatggtgaagaaagtcatttcctcggtgggcagtattcctctttatctctcattacactggaaatgttatttctgctgtatcatccgtgctcaacgttttagtctgtcaggctcaccttctctctggaaagaatttgcttaacttgacattccatgtgccgctaataaaatatattttgaaagaa

SEQ ID NO: 109113 - DNA, 1177 bp, Homo sapiens
  Payload ID: 1437
  Gene Symbol: ASRGL1
  Gene Name: asparaginase like 1
  ENST ID: ENST00000534183
  CDS Start-End: 136-348
gtgaccagagcggttgcgggctgagcggtttcgagccggcgtcggggagcggcggtaccgggcggctgcggggctggctcgacccagcttgaggtctcggcgtccgcgtcctgcggtgccctgggatccgccgacatgaatcccatcgtagtggtccacggcggcggagccggtcccatctccaaggatcggaaggagcgagtgcaccagggcatggtcagagccgccaccgtgggctacggcatcctccgggagggcgggagcgccgtggatgccgtagagggagctgtcgtcgccctggaagacgatcccgagttcaacgcagacacctcattgctttctgactgaccaaggcgcagcgcagtttgcagcagctatgggggttccagagattcctggagaaaaactggtgacagagagaaacaaaaagcgcctggaaaaagagaagcatgaaaaaggtgctcagaaaacagattgtcaaaaaaacttgggaaccgtgggtgctgttgccttggactgcaaagggaatgtagcctacgcaacctccacaggcggtatcgttaataaaatggtcggccgcgttggggactcaccgtgtctaggtaggaccaagggatgcctcctgccccttcccctcttctcccgccctcaggctttcctcactctctattccctgcccctctccgtttcttgctgcgttccctttctgcttttggtgcagctccaggatgtctgggagtgacaatggggttggaaggggttgttcggggtgctgccttgagagggtgtttgtatctggcgccactgtttttactagattgcatgcctttttggaacaacttggggagagaagtggagacagggatgctaacgttgcccccagtctaccctgtcgtgattctgtcttctctttagccacagtttcaggatctgcagacttacttgagtaagacttactcccgagacatgggctctgattagcaatctgagaaatctgagactgcagttgttagatctgagcagcatgaaagtgacatacttctacagacacattatagattgagatgttgtttacattaacggggaagcacgccatctcattcccaggagtgggtgagaggcagggctggggggctgtatgtttcactccgtgcagactttcacacttgtcatgcag

SEQ ID NO: 109114 - DNA, 574 bp, Homo sapiens
  Payload ID: 1437
  Gene Symbol: ASRGL1
  Gene Name: asparaginase like 1
  ENST ID: ENST00000529226
  CDS Start-End: 194-406
gctgagcggtttcgagccggcgtcggggagcggcggtaccgggcggctgcggggctggctcgacccagcttgaggtctcggcgtccgcgtcctgcggtgccctggggtctcccgaggaccttgtacccgcgcggcttccttgggctggctttggacgacgctttcgccttcctgctgcctaggatccgccgacatgaatcccatcgtagtggtccacggcggcggagccggtcccatctccaaggatcggaaggagcgagtgcaccagggcatggtcagagccgccaccgtgggctacggcatcctccgggagggcgggagcgccgtggatgccgtagagggagctgtcgtcgccctggaagacgatcccgagttcaacgcagacacctcattgctttctgactgaccaaggcgcagcgcagtttgcagcagctatgggggttccagagattcctggagaaaaactggtgacagagagaaacaaaaagcgcctggaaaaagagaagcatgaaaaaggtgctcagaaaacagattgtcaaaaaaacttgggaaccgtgggtgctgttgccttgga

SEQ ID NO: 109115 - DNA, 639 bp, Homo sapiens
  Payload ID: 1437
  Gene Symbol: ASRGL1
  Gene Name: asparaginase like 1
  ENST ID: ENST00000534571
  CDS Start-End: 92-586
gggagcggcggtaccgggcggctgcggggctggctcgacccagcttgaggtctcggcgtccgcgtcctgcggtgccctgggatccgccgacatgaatcccatcgtagtggtccacggcggcggagccggtcccatctccaaggatcggaaggagcgagtgcaccagggcatggtcagagccgccaccgtgggctacggcatcctccgggagggcgggagcgccgtggatgccgtagagggagctgtcgtcgccctggaagacgatcccgagttcaacgcaggttgtgggtctgtcttgaacacaaatggtgaggttgaaatggatgctagtatcatggatggaaaagacctgtctgcaggagcagtgtccgcagtccagtgtatagcaaatcccattaaacttgctcggcttgtcatggaaaagacacctcattgctttctgactgaccaaggcgcagcgcagtttgcagcagctatgggggttccagagattcctggagaaaaactggtgacagagagaaacaaaaagcgcctggaaaaagagaagcatgaaaaaggtgctcagaaaacagattgtcaaaagtaagtcttacctgtggctcgcattatttgggagttattaaaatatgaaagtttggc

SEQ ID NO: 109116 - DNA, 535 bp, Homo sapiens
  Payload ID: 1437
  Gene Symbol: ASRGL1
  Gene Name: asparaginase like 1
  ENST ID: ENST00000526096
  CDS Start-End: 135-535
cggtaccgggcggctgcggggctggctcgacccagcttgaggtctcggcgtccgcgtcctgcggtgccctggtggtccacggcggcggagccggtcccatctccaaggatcggaaggagcgagtgcaccagggcatggtcagagccgccaccgtgggctacggcatcctccgggagggcgggagcgccgtggatgccgtagagggagctgtcgtcgccctggaagacgatcccgagttcaacgcaggttgtgggtctgtcttgaacacaaatggtgaggttgaaatggatgctagtatcatggatggaaaagacctgtctgcaggagcagtgtccgcagtccagtgtatagcaaatcccattaaacttgctcggcttgtcatggaaaagacacctcattgctttctgactgaccaaggcgcagcgcagtttgcagcagctatgggggttccagagattcctggagaaaaactggtgacagagagaaacaaaaagcgcctggaaaaagagaagcatgaaaaaggtgctcagaaaac

SEQ ID NO: 109117 - DNA, 1543 bp, Homo sapiens
  Payload ID: 1437
  Gene Symbol: ASRGL1
  Gene Name: asparaginase like 1
  ENST ID: ENST00000528206
  CDS Start-End: 1-171
attcctggagaaaaactggtgacagagagaaacaaaaagcgcctggaaaaagagaagcatgaaaaaggtgctcagaaaacagattgtcaaaagttcttccgagggcacaagcttaccacaagactgactgtagacgtactcgggaatctctcatcaacttgttctcaatgaccacgctctagctcaccttcaccctagagaaaagcacccacgttgggcaccagatgaaggggtggccagcccctctacacctgtgggcgtttctcatcaggtgggacgagagactgagaaaagaaataagaggctgggtgcggtgggtcacgcctgtaatccccgcactttgggaggccgaggccggtggatcacgaggtcaggagatcgagaccatcctggctaacagggtgaaaccccatctctactaaaaatacaaaaaattagccgggcccagtggcgggtgcctgtagtcccagctactcaggaggctgaggcaggagagacagagacaacgtatagagaaaaaaaagtgggcccaggggaccggtgctcagcatacggaggacccccaccggcaacagtctctgagttccctcagtatttactgatcattatctctaccatctggagagggggatgtggcaggacaataagttaatagagaggagagggtcagcaggaaaacatgtgaacaaatgtctctgtgtcataaataaggaaaggtgctatgccttgatgtgcatgtatacaaacattaaagagcagtattgtcgctagcacctctcacctccagccctaaggctgttttctcctatctcagtaaatagaacatacaatcgggttttaaacccagacattctattgcccagggacaagcaggagacagatgccttcctcttatcacaactgcaaagaggccttcctcttttactaatgctcctcagcacagaccctttacgggtggggtgtcgggctgggggacagtgtcgggctgggggacggtcaggtctttcccttcccacaaggccatatctcaggctatcacatggggagaaaccttggacaatacctggctttcctaggcagaggtccctgcagccttccgcagtgtattgtgtccctgggtacttgaaattagagaatggtaatgacttttaacaagcatactgccttcaagcacttttttaacaaagcacagcctgcatagccctaaatccattaaaccttgagtcaacacagcacgtctctgcgacacagggttggggtagggttacagattaacagcatctcaaggcagaagaatttttcttagtacagaacaaaatagagtctcttatgtctacttctttctacatagacacagtaacagcctgatctctttcgtttccccacaaatccatatagtatttgagtgtgataatgtaaaaatcagtattcatttctaaatctaagtactgctttgagaattttgttggtaattccagttgctgctgcttcagcagaaggaagcttctccaaattaaaataaattaaaaacttgctaaaaact

SEQ ID NO: 109118 - DNA, 1161 bp, Homo sapiens
  Payload ID: 1437
  Gene Symbol: ASRGL1
  Gene Name: asparaginase like 1
  ENST ID: ENST00000628829
  CDS Start-End: 94-306
cggggagcggcggtaccgggcggctgcggggctggctcgacccagcttgaggtctcggcgtccgcgtcctgcggtgccctgggatccgccgacatgaatcccatcgtagtggtccacggcggcggagccggtcccatctccaaggatcggaaggagcgagtgcaccagggcatggtcagagccgccaccgtgggctacggcatcctccgggagggcgggagcgccgtggatgccgtagagggagctgtcgtcgccctggaagacgatcccgagttcaacgcagacacctcattgctttctgactgaccaaggcgcagcgcagtttgcagcagctatgggggttccagagattcctggagaaaaactggtgacagagagaaacaaaaagcgcctggaaaaagagaagcatgaaaaaggtgctcagaaaacagattgtcaaaaaaacttgggaaccgtgggtgctgttgccttggactgcaaagggaatgtagcctacgcaacctccacaggcggtatcgttaataaaatggtcggccgcgttggggactcaccgtgtctaggagctggaggttatgccgacaatgacatcggagccgtctcaaccacagggcatggggaaagcatcctgaaggtgaacctggctagactcaccctgttccacatagaacaaggaaagacggtagaagaggctgcggacctatcgttgggttatatgaagtcaagggttaaaggtttaggtggcctcatcgtggttagcaaaacaggagactgggtggcaaagtggacctccacctccatgccctgggcagccgccaaggacggcaagctgcacttcggaattgatcctgacgatactactatcaccgaccttccctaagccgctggaagattgtattccagatgctagcttagaggtcaagtacagtctcctcatgagacatagcctaatcaattagatctagaattggaaaaattgtcccgtctgtcacttgttttgttgccttaataagcatctgaatgtttggttgtggggcgggttctgaagcgatgagagaaatgcccgtattaggaggattacttgagcccaggaggtcaaagctgaggtgagccatgattactccactgcactccagcctgggcaacagagccaggccctgtatc

SEQ ID NO: 109119 - DNA, 2356 bp, Homo sapiens
  Payload ID: 1438
  Gene Symbol: ASNS
  Gene Name: asparagine synthetase (glutamine-hydrolyzing)
  Uniprot ID: P08243
  ENST ID: ENST00000175506
  CDS Start-End: 530-2215
agtcctgctccgccccggacaccccgcggccccgcccctgtgcgcgctggttggtcctcgcaggcatgatgaaacttcccgcacgcgttacaggagccaggtcggtataagcgccagcggcctcgccgcccgtcaagctgtccacatccctggcctcagcccgccacatcaccctgacctgcttacgcccagcctgtggacattttcgcggtccgggtccctgcggcggacgggtcggatcgtgctcgtggccagggcgcagtcaggtgtcgcgtggtcctgatctaggaagagactgcggccttatcaccgtctcggtgtctgctttcaccttcaactgcccccctcctcacctggaccgctcaccctcctcctcccctctcaccccgccatccccaccagtccccacctgtctctgtagactgcaagactcatcaagtgacttgctgagcaaaccctgccgagaagagattttcttcaatcacatctgaataaatcacttgaagaaagcttatagcttcattgcaccatgtgtggcatttgggcgctgtttggcagtgatgattgcctttctgttcagtgtctgagtgctatgaagattgcacacagaggtccagatgcattccgttttgagaatgtcaatggatacaccaactgctgctttggatttcaccggttggcggtagttgacccgctgtttggaatgcagccaattcgagtgaagaaatatccgtatttgtggctctgttacaatggtgaaatctacaaccataagaagatgcaacagcattttgaatttgaataccagaccaaagtggatggtgagataatccttcatctttatgacaaaggaggaattgagcaaacaatttgtatgttggatggtgtgtttgcatttgttttactggatactgccaataagaaagtgttcctgggtagagatacatatggagtcagacctttgtttaaagcaatgacagaagatggatttttggctgtatgttcagaagctaaaggtcttgttacattgaagcactccgcgactccctttttaaaagtggagccttttcttcctggacactatgaagttttggatttaaagccaaatggcaaagttgcatccgtggaaatggttaaatatcatcactgtcgggatgtacccctgcacgccctctatgacaatgtggagaaactctttccaggttttgagatagaaactgtgaagaacaacctcaggatcctttttaataatgctgtaaagaaacgtttgatgacagacagaaggattggctgccttttatcagggggcttggactccagcttggttgctgccactctgttgaagcagctgaaagaagcccaagtacagtatcctctccagacatttgcaattggcatggaagacagccccgatttactggctgctagaaaggtggcagatcatattggaagtgaacattatgaagtcctttttaactctgaggaaggcattcaggctctggatgaagtcatattttccttggaaacttatgacattacaacagttcgtgcttcagtaggtatgtatttaatttccaagtatattcggaagaacacagatagcgtggtgatcttctctggagaaggatcagatgaacttacgcagggttacatatattttcacaaggctccttctcctgaaaaagccgaggaggagagtgagaggcttctgagggaactctatttgtttgatgttctccgcgcagatcgaactactgctgcccatggtcttgaactgagagtcccatttctagatcatcgattttcttcctattacttgtctctgccaccagaaatgagaattccaaagaatgggatagaaaaacatctcctgagagagacgtttgaggattccaatctgatacccaaagagattctctggcgaccaaaagaagccttcagtgatggaataacttcagttaagaattcctggtttaagattttacaggaatacgttgaacatcaggttgatgatgcaatgatggcaaatgcagcccagaaatttcccttcaatactcctaaaaccaaagaaggatattactaccgtcaagtctttgaacgccattacccaggccgggctgactggctgagccattactggatgcccaagtggatcaatgccactgacccttctgcccgcacgctgacccactacaagtcagctgtcaaagcttaggtggtctttatgctgtaatgtgaaagcaaatatttcttcgtgttggatggggactgtgggtagataggggaacaatgagagtcaactcaggctaacttgggtgtgaaaaaaataaaagtcctaaatctaaaccattgctgt

SEQ ID NO: 109120 - DNA, 1994 bp, Homo sapiens
  Payload ID: 1438
  Gene Symbol: ASNS
  Gene Name: asparagine synthetase (glutamine-hydrolyzing)
  Uniprot ID: P08243
  ENST ID: ENST00000394308
  CDS Start-End: 181-1866
aaacttcccgcacgcgttacaggagccaggtcggtataagcgccagcggcctcgccgcccgtcaagctgtccacatccctggcctcagcccgccacatcaccctgacctgcttacgcccagattttcttcaatcacatctgaataaatcacttgaagaaagcttatagcttcattgcaccatgtgtggcatttgggcgctgtttggcagtgatgattgcctttctgttcagtgtctgagtgctatgaagattgcacacagaggtccagatgcattccgttttgagaatgtcaatggatacaccaactgctgctttggatttcaccggttggcggtagttgacccgctgtttggaatgcagccaattcgagtgaagaaatatccgtatttgtggctctgttacaatggtgaaatctacaaccataagaagatgcaacagcattttgaatttgaataccagaccaaagtggatggtgagataatccttcatctttatgacaaaggaggaattgagcaaacaatttgtatgttggatggtgtgtttgcatttgttttactggatactgccaataagaaagtgttcctgggtagagatacatatggagtcagacctttgtttaaagcaatgacagaagatggatttttggctgtatgttcagaagctaaaggtcttgttacattgaagcactccgcgactccctttttaaaagtggagccttttcttcctggacactatgaagttttggatttaaagccaaatggcaaagttgcatccgtggaaatggttaaatatcatcactgtcgggatgtacccctgcacgccctctatgacaatgtggagaaactctttccaggttttgagatagaaactgtgaagaacaacctcaggatcctttttaataatgctgtaaagaaacgtttgatgacagacagaaggattggctgccttttatcagggggcttggactccagcttggttgctgccactctgttgaagcagctgaaagaagcccaagtacagtatcctctccagacatttgcaattggcatggaagacagccccgatttactggctgctagaaaggtggcagatcatattggaagtgaacattatgaagtcctttttaactctgaggaaggcattcaggctctggatgaagtcatattttccttggaaacttatgacattacaacagttcgtgcttcagtaggtatgtatttaatttccaagtatattcggaagaacacagatagcgtggtgatcttctctggagaaggatcagatgaacttacgcagggttacatatattttcacaaggctccttctcctgaaaaagccgaggaggagagtgagaggcttctgagggaactctatttgtttgatgttctccgcgcagatcgaactactgctgcccatggtcttgaactgagagtcccatttctagatcatcgattttcttcctattacttgtctctgccaccagaaatgagaattccaaagaatgggatagaaaaacatctcctgagagagacgtttgaggattccaatctgatacccaaagagattctctggcgaccaaaagaagccttcagtgatggaataacttcagttaagaattcctggtttaagattttacaggaatacgttgaacatcaggttgatgatgcaatgatggcaaatgcagcccagaaatttcccttcaatactcctaaaaccaaagaaggatattactaccgtcaagtctttgaacgccattacccaggccgggctgactggctgagccattactggatgcccaagtggatcaatgccactgacccttctgcccgcacgctgacccactacaagtcagctgtcaaagcttaggtggtctttatgctgtaatgtgaaagcaaatatttcttcgtgttggatggggactgtgggtagataggggaacaatgagagtcaactcaggctaacttgggtgtgaaaaaaataaaagtcctaaatct

SEQ ID NO: 109121 - DNA, 2289 bp, Homo sapiens
  Payload ID: 1438
  Gene Symbol: ASNS
  Gene Name: asparagine synthetase (glutamine-hydrolyzing)
  Uniprot ID: P08243
  ENST ID: ENST00000394309
  CDS Start-End: 473-2158
tttctgtcctggttccctgaagcatcgagagggaaccgcggccggcaggccggaccgctccggagaggaggcagcggcagtttgagcccctgtaaatgttatatgtgtacttttttttactatgtggcgtcgaagcctgtggacattttcgcggtccgggtccctgcggcggacgggtcggatcgtgctcgtggccagggcgcagtcaggtgtcgcgtggtcctgatctaggaagagactgcggccttatcaccgtctcggtgtctgctttcaccttcaactgcccccctcctcacctggaccgctcaccctcctcctcccctctcaccccgccatccccaccagtccccacctgtctctgtagactgcaagactcatcaagtgacttgctgagcaaaccctgccgagaagagattttcttcaatcacatctgaataaatcacttgaagaaagcttatagcttcattgcaccatgtgtggcatttgggcgctgtttggcagtgatgattgcctttctgttcagtgtctgagtgctatgaagattgcacacagaggtccagatgcattccgttttgagaatgtcaatggatacaccaactgctgctttggatttcaccggttggcggtagttgacccgctgtttggaatgcagccaattcgagtgaagaaatatccgtatttgtggctctgttacaatggtgaaatctacaaccataagaagatgcaacagcattttgaatttgaataccagaccaaagtggatggtgagataatccttcatctttatgacaaaggaggaattgagcaaacaatttgtatgttggatggtgtgtttgcatttgttttactggatactgccaataagaaagtgttcctgggtagagatacatatggagtcagacctttgtttaaagcaatgacagaagatggatttttggctgtatgttcagaagctaaaggtcttgttacattgaagcactccgcgactccctttttaaaagtggagccttttcttcctggacactatgaagttttggatttaaagccaaatggcaaagttgcatccgtggaaatggttaaatatcatcactgtcgggatgtacccctgcacgccctctatgacaatgtggagaaactctttccaggttttgagatagaaactgtgaagaacaacctcaggatcctttttaataatgctgtaaagaaacgtttgatgacagacagaaggattggctgccttttatcagggggcttggactccagcttggttgctgccactctgttgaagcagctgaaagaagcccaagtacagtatcctctccagacatttgcaattggcatggaagacagccccgatttactggctgctagaaaggtggcagatcatattggaagtgaacattatgaagtcctttttaactctgaggaaggcattcaggctctggatgaagtcatattttccttggaaacttatgacattacaacagttcgtgcttcagtaggtatgtatttaatttccaagtatattcggaagaacacagatagcgtggtgatcttctctggagaaggatcagatgaacttacgcagggttacatatattttcacaaggctccttctcctgaaaaagccgaggaggagagtgagaggcttctgagggaactctatttgtttgatgttctccgcgcagatcgaactactgctgcccatggtcttgaactgagagtcccatttctagatcatcgattttcttcctattacttgtctctgccaccagaaatgagaattccaaagaatgggatagaaaaacatctcctgagagagacgtttgaggattccaatctgatacccaaagagattctctggcgaccaaaagaagccttcagtgatggaataacttcagttaagaattcctggtttaagattttacaggaatacgttgaacatcaggttgatgatgcaatgatggcaaatgcagcccagaaatttcccttcaatactcctaaaaccaaagaaggatattactaccgtcaagtctttgaacgccattacccaggccgggctgactggctgagccattactggatgcccaagtggatcaatgccactgacccttctgcccgcacgctgacccactacaagtcagctgtcaaagcttaggtggtctttatgctgtaatgtgaaagcaaatatttcttcgtgttggatggggactgtgggtagataggggaacaatgagagtcaactcaggctaacttgggtgtgaaaaaaataaaagtcctaaatctaaa

SEQ ID NO: 109122 - DNA, 745 bp, Homo sapiens
  Payload ID: 1438
  Gene Symbol: ASNS
  Gene Name: asparagine synthetase (glutamine-hydrolyzing)
  ENST ID: ENST00000437657
  CDS Start-End: 259-745
ccgtctcggtgtctgctttcaccttcaactgcccccctcctcacctggaccgctcaccctcctcctcccctctcaccccgccatccccaccagtccccacctgtctctgtagactgcaagactcatcaagtgacttgctgagcaaaccctgccgagaagaggtctgtttagggacacaggcgaccaagtacagaaaaagattttcttcaatcacatctgaataaatcacttgaagaaagcttatagcttcattgcaccatgtgtggcatttgggcgctgtttggcagtgatgattgcctttctgttcagtgtctgagtgctatgaagattgcacacagaggtccagatgcattccgttttgagaatgtcaatggatacaccaactgctgctttggatttcaccggttggcggtagttgacccgctgtttggaatgcagccaattcgagtgaagaaatatccgtatttgtggctctgttacaatggtgaaatctacaaccataagaagatgcaacagcattttgaatttgaataccagaccaaagtggatggtgagataatccttcatctttatgacaaaggaggaattgagcaaacaatttgtatgttggatggtgtgtttgcatttgttttactggatactgccaataagaaagtgttcctgggtagagatacatatggagtcagacctttgtttaaagcaatgacagaagatggatttttggctgtatgttcagaagctaaag

SEQ ID NO: 109123 - DNA, 562 bp, Homo sapiens
  Payload ID: 1438
  Gene Symbol: ASNS
  Gene Name: asparagine synthetase (glutamine-hydrolyzing)
  ENST ID: ENST00000451771
  CDS Start-End: 465-562
atgatgaaacttcccgcacgcgttacaggagccaggtcggtataagcgccagcggcctcgccgcccgtcaagctgtccacatccctggcctcagcccgccacatcaccctgacctgcttacgcccagcctgtggacattttcgcggtccgggtccctgcggcggacgggtcggatcgtgctcgtggccagggcgcagtcaggtgtcgcgtggtcctgatctaggaagagactgcggccttatcaccgtctcggtgtctgctttcaccttcaactgcccccctcctcacctggaccgctcaccctcctcctcccctctcaccccgccatccccaccagtccccacctgtctctgtagactgcaagactcatcaagtgacttgctgagcaaaccctgccgagaagagattttcttcaatcacatctgaataaatcacttgaagaaagcttatagcttcattgcaccatgtgtggcatttgggcgctgtttggcagtgatgattgcctttctgttcagtgtctgagtgctatgaagattgcacacagaggtccagatgcattccg

SEQ ID NO: 109124 - DNA, 828 bp, Homo sapiens
  Payload ID: 1438
  Gene Symbol: ASNS
  Gene Name: asparagine synthetase (glutamine-hydrolyzing)
  ENST ID: ENST00000442734
  CDS Start-End: 185-828
gattgttacgcacctgacagctagcggaaggacctttctgtcctggttccctgaagcatcgagagggaaccgcggccggcaggccggaccgctccggagaggaggcagcggcagtttgagcccctattttcttcaatcacatctgaataaatcacttgaagaaagcttatagcttcattgcaccatgtgtggcatttgggcgctgtttggcagtgatgattgcctttctgttcagtgtctgagtgctatgaagattgcacacagaggtccagatgcattccgttttgagaatgtcaatggatacaccaactgctgctttggatttcaccggttggcggtagttgacccgctgtttggaatgcagccaattcgagtgaagaaatatccgtatttgtggctctgttacaatggtgaaatctacaaccataagaagatgcaacagcattttgaatttgaataccagaccaaagtggatggtgagataatccttcatctttatgacaaaggaggaattgagcaaacaatttgtatgttggatggtgtgtttgcatttgttttactggatactgccaataagaaagtgttcctgggtagagatacatatggagtcagacctttgtttaaagcaatgacagaagatggatttttggctgtatgttcagaagctaaaggtcttgttacattgaagcactccgcgactccctttttaaaagtggagccttttcttcctggacactatgaagttttggatttaaagccaaatggcaaagttgcatccgtggaaatggttaaatatcatcactgtcgggatgtacccctgcacgccct

SEQ ID NO: 109125 - DNA, 1947 bp, Homo sapiens
  Payload ID: 1438
  Gene Symbol: ASNS
  Gene Name: asparagine synthetase (glutamine-hydrolyzing)
  ENST ID: ENST00000454046
  CDS Start-End: 60-1265
attttcttcaatcacatctgaataaatcacttgaagaaagcttatagcttcattgcaccatgtgtggcatttgggcgctgtttggcagtgatgattgcctttctgttcagtgtctgagtgctatgaagattgcacacagaggtccagatgcattccgttttgagaatgtcaatggatacaccaactgctgctttggatttcaccggttggcggtagttgacccgctgtttggaatgcagccaattcgagtgaagaaatatccgtatttgtggctctgttacaatggtgaaatctacaaccataagaagatgcaacagcattttgaatttgaataccagaccaaagtggatggtgagataatccttcatctttatgacaaaggaggaattgagcaaacaatttgtatgttggatggtgtgtttgcatttgttttactggatactgccaataagaaagtgttcctgggtagagatacatatggagtcagacctttgtttaaagcaatgacagaagatggatttttggctgtatgttcagaagctaaaggtcttgttacattgaagcactccgcgactccctttttaaaagtggagccttttcttcctggacactatgaagttttggatttaaagccaaatggcaaagttgcatccgtggaaatggttaaatatcatcactgtcgggatgtacccctgcacgccctctatgacaatgtggagaaactctttccaggttttgagatagaaactgtgaagaacaacctcaggatcctttttaataatgctgtaaagaaacgtttgatgacagacagaaggattggctgccttttatcagggggcttggactccagcttggttgctgccactctgttgaagcagctgaaagaagcccaagtacagtatcctctccagacatttgcaattggcatggaagacagccccgatttactggctgctagaaaggtggcagatcatattggaagtgaacattatgaagtcctttttaactctgaggaaggcattcaggctctggatgaagtcatattttccttggaaacttatgacattacaacagttcgtgcttcagtaggtatgtatttaatttccaagtatattcggaagaacacagatagcgtggtgatcttctctggagaaggatcagatgaacttacgcagggttacatatattttcacaaggattggagagggagaaagaaaaactgctttgtgtgccaaaagcaaaactcttggtgtttttgtttgtgaaataggctccttctcctgaaaaagccgaggaggagagtgagaggcttctgagggaactctatttgtttgatgttctccgcgcagatcgaactactgctgcccatggtcttgaactgagagtcccatttctagatcatcgattttcttcctattacttgtctctgccaccagaaatgagaattccaaagaatgggatagaaaaacatctcctgagagagacgtttgaggattccaatctgatacccaaagagattctctggcgaccaaaagaagccttcagtgatggaataacttcagttaagaattcctggtttaagattttacaggaatacgttgaacatcaggttgatgatgcaatgatggcaaatgcagcccagaaatttcccttcaatactcctaaaaccaaagaaggatattactaccgtcaagtctttgaacgccattacccaggccgggctgactggctgagccattactggatgcccaagtggatcaatgccactgacccttctgcccgcacgctgacccactacaagtcagctgtcaaagcttaggtggtctttatgctgtaatgtgaaagcaaatatttcttcgtgttggatggggactgtgggtagataggggaacaatgagagtcaactcaggctaacttgggtgtgaaaaaaataaaagtcctaaatct

SEQ ID NO: 109126 - DNA, 579 bp, Homo sapiens
  Payload ID: 1438
  Gene Symbol: ASNS
  Gene Name: asparagine synthetase (glutamine-hydrolyzing)
  ENST ID: ENST00000448127
  CDS Start-End: 224-579
tactgaacaatgcaactttgagacagaaatatttgagaacatttttgtcagtgaggacattttgatagtgaatattttgtatcttctattaacttgaaatgttttatttgttataaagccaggatatctgatatcaaattaaattgttttttttttccctttagattttcttcaatcacatctgaataaatcacttgaagaaagcttatagcttcattgcaccatgtgtggcatttgggcgctgtttggcagtgatgattgcctttctgttcagtgtctgagtgctatgaagattgcacacagaggtccagatgcattccgttttgagaatgtcaatggatacaccaactgctgctttggatttcaccggttggcggtagttgacccgctgtttggaatgcagccaattcgagtgaagaaatatccgtatttgtggctctgttacaatggtgaaatctacaaccataagaagatgcaacagcattttgaatttgaataccagaccaaagtggatggtgagataatccttcatctttatgacaaaggaggaattgagcaaacaatttgtatgttggatgg

SEQ ID NO: 109127 - DNA, 1812 bp, Homo sapiens
  Payload ID: 1438
  Gene Symbol: ASNS
  Gene Name: asparagine synthetase (glutamine-hydrolyzing)
  Uniprot ID: P08243
  ENST ID: ENST00000444334
  CDS Start-End: 135-1757
ataagcgccagcggcctcgccgcccgtcaagctgtccacatccctggcctcagcccgccacatcaccctgacctgcttacgcccagattttcttcaatcacatctgaataaatcacttgaagtgtctgagtgctatgaagattgcacacagaggtccagatgcattccgttttgagaatgtcaatggatacaccaactgctgctttggatttcaccggttggcggtagttgacccgctgtttggaatgcagccaattcgagtgaagaaatatccgtatttgtggctctgttacaatggtgaaatctacaaccataagaagatgcaacagcattttgaatttgaataccagaccaaagtggatggtgagataatccttcatctttatgacaaaggaggaattgagcaaacaatttgtatgttggatggtgtgtttgcatttgttttactggatactgccaataagaaagtgttcctgggtagagatacatatggagtcagacctttgtttaaagcaatgacagaagatggatttttggctgtatgttcagaagctaaaggtcttgttacattgaagcactccgcgactccctttttaaaagtggagccttttcttcctggacactatgaagttttggatttaaagccaaatggcaaagttgcatccgtggaaatggttaaatatcatcactgtcgggatgtacccctgcacgccctctatgacaatgtggagaaactctttccaggttttgagatagaaactgtgaagaacaacctcaggatcctttttaataatgctgtaaagaaacgtttgatgacagacagaaggattggctgccttttatcagggggcttggactccagcttggttgctgccactctgttgaagcagctgaaagaagcccaagtacagtatcctctccagacatttgcaattggcatggaagacagccccgatttactggctgctagaaaggtggcagatcatattggaagtgaacattatgaagtcctttttaactctgaggaaggcattcaggctctggatgaagtcatattttccttggaaacttatgacattacaacagttcgtgcttcagtaggtatgtatttaatttccaagtatattcggaagaacacagatagcgtggtgatcttctctggagaaggatcagatgaacttacgcagggttacatatattttcacaaggctccttctcctgaaaaagccgaggaggagagtgagaggcttctgagggaactctatttgtttgatgttctccgcgcagatcgaactactgctgcccatggtcttgaactgagagtcccatttctagatcatcgattttcttcctattacttgtctctgccaccagaaatgagaattccaaagaatgggatagaaaaacatctcctgagagagacgtttgaggattccaatctgatacccaaagagattctctggcgaccaaaagaagccttcagtgatggaataacttcagttaagaattcctggtttaagattttacaggaatacgttgaacatcaggttgatgatgcaatgatggcaaatgcagcccagaaatttcccttcaatactcctaaaaccaaagaaggatattactaccgtcaagtctttgaacgccattacccaggccgggctgactggctgagccattactggatgcccaagtggatcaatgccactgacccttctgcccgcacgctgacccactacaagtcagctgtcaaagcttaggtggtctttatgctgtaatgtgaaagcaaatatttcttcgtgttggatggggact

SEQ ID NO: 109128 - DNA, 1588 bp, Homo sapiens
  Payload ID: 1438
  Gene Symbol: ASNS
  Gene Name: asparagine synthetase (glutamine-hydrolyzing)
  Uniprot ID: P08243
  ENST ID: ENST00000455086
  CDS Start-End: 45-1481
cctggcctcagcccgccacatcaccctgacctgcttacgcccagatgcaacagcattttgaatttgaataccagaccaaagtggatggtgagataatccttcatctttatgacaaaggaggaattgagcaaacaatttgtatgttggatggtgtgtttgcatttgttttactggatactgccaataagaaagtgttcctgggtagagatacatatggagtcagacctttgtttaaagcaatgacagaagatggatttttggctgtatgttcagaagctaaaggtcttgttacattgaagcactccgcgactccctttttaaaagtggagccttttcttcctggacactatgaagttttggatttaaagccaaatggcaaagttgcatccgtggaaatggttaaatatcatcactgtcgggatgtacccctgcacgccctctatgacaatgtggagaaactctttccaggttttgagatagaaactgtgaagaacaacctcaggatcctttttaataatgctgtaaagaaacgtttgatgacagacagaaggattggctgccttttatcagggggcttggactccagcttggttgctgccactctgttgaagcagctgaaagaagcccaagtacagtatcctctccagacatttgcaattggcatggaagacagccccgatttactggctgctagaaaggtggcagatcatattggaagtgaacattatgaagtcctttttaactctgaggaaggcattcaggctctggatgaagtcatattttccttggaaacttatgacattacaacagttcgtgcttcagtaggtatgtatttaatttccaagtatattcggaagaacacagatagcgtggtgatcttctctggagaaggatcagatgaacttacgcagggttacatatattttcacaaggctccttctcctgaaaaagccgaggaggagagtgagaggcttctgagggaactctatttgtttgatgttctccgcgcagatcgaactactgctgcccatggtcttgaactgagagtcccatttctagatcatcgattttcttcctattacttgtctctgccaccagaaatgagaattccaaagaatgggatagaaaaacatctcctgagagagacgtttgaggattccaatctgatacccaaagagattctctggcgaccaaaagaagccttcagtgatggaataacttcagttaagaattcctggtttaagattttacaggaatacgttgaacatcaggttgatgatgcaatgatggcaaatgcagcccagaaatttcccttcaatactcctaaaaccaaagaaggatattactaccgtcaagtctttgaacgccattacccaggccgggctgactggctgagccattactggatgcccaagtggatcaatgccactgacccttctgcccgcacgctgacccactacaagtcagctgtcaaagcttaggtggtctttatgctgtaatgtgaaagcaaatatttcttcgtgttggatggggactgtgggtagataggggaacaatgagagtcaactcaggctaacttgggtgtgaa

SEQ ID NO: 109129 - DNA, 573 bp, Homo sapiens
  Payload ID: 1438
  Gene Symbol: ASNS
  Gene Name: asparagine synthetase (glutamine-hydrolyzing)
  ENST ID: ENST00000453600
  CDS Start-End: 385-573
aagctgtccacatccctggcctcagcccgccacatcaccctgacctgcttacgcccagcctgtggacattttcgcggtccgggtccctgcggcggacgggtcggatcgtgctcgtggccagggcgcagtcaggtgtcgcgtggtcctgatctaggaagagactgcggccttatcaccgtctcggtgtctgctttcaccttcaactgcccccctcctcacctggaccgctcaccctcctcctcccctctcaccccgccatccccaccagtccccacctgtctctgtagactgcaagactcatcaagtgacttgctgagcaaaccctgccgagaagagattttcttcaatcacatctgaataaatcacttgaagtgtctgagtgctatgaagattgcacacagaggtccagatgcattccgttttgagaatgtcaatggatacaccaactgctgctttggatttcaccggttggcggtagttgacccgctgtttggaatgcagccaattcgagtgaagaaatatccgtatttgtggctctgttacaatggtgaaatctacaaccataagaaggtg

SEQ ID NO: 109130 - DNA, 584 bp, Homo sapiens
  Payload ID: 1438
  Gene Symbol: ASNS
  Gene Name: asparagine synthetase (glutamine-hydrolyzing)
  ENST ID: ENST00000414884
  CDS Start-End: 500-584
acgcacctgacagctagcggaaggacctttctgtcctggttccctgaagcatcgagagggaaccgcggccggcaggccggaccgctccggagaggaggcagcggcagtttgagcccctgtaaatgttatatgtgtacttttttttactatgtggcgtcgaagcctgtggacattttcgcggtccgggtccctgcggcggacgggtcggatcgtgctcgtggccagggcgcagtcaggtgtcgcgtggtcctgatctaggaagagactgcggccttatcaccgtctcggtgtctgctttcaccttcaactgcccccctcctcacctggaccgctcaccctcctcctcccctctcaccccgccatccccaccagtccccacctgtctctgtagactgcaagactcatcaagtgacttgctgagcaaaccctgccgagaagagattttcttcaatcacatctgaataaatcacttgaagaaagcttatagcttcattgcaccatgtgtggcatttgggcgctgtttggcagtgatgattgcctttctgttcagtgtctgagtgctatgaagattgcacacagaggtc

SEQ ID NO: 109131 - DNA, 1638 bp, Homo sapiens
  Payload ID: 1438
  Gene Symbol: ASNS
  Gene Name: asparagine synthetase (glutamine-hydrolyzing)
  Uniprot ID: P08243
  ENST ID: ENST00000437628
  CDS Start-End: 74-1510
gaagcatcgagagggaaccgcggccggcaggccggaccgctccggagaggaggcagcggcagtttgagcccctatgcaacagcattttgaatttgaataccagaccaaagtggatggtgagataatccttcatctttatgacaaaggaggaattgagcaaacaatttgtatgttggatggtgtgtttgcatttgttttactggatactgccaataagaaagtgttcctgggtagagatacatatggagtcagacctttgtttaaagcaatgacagaagatggatttttggctgtatgttcagaagctaaaggtcttgttacattgaagcactccgcgactccctttttaaaagtggagccttttcttcctggacactatgaagttttggatttaaagccaaatggcaaagttgcatccgtggaaatggttaaatatcatcactgtcgggatgtacccctgcacgccctctatgacaatgtggagaaactctttccaggttttgagatagaaactgtgaagaacaacctcaggatcctttttaataatgctgtaaagaaacgtttgatgacagacagaaggattggctgccttttatcagggggcttggactccagcttggttgctgccactctgttgaagcagctgaaagaagcccaagtacagtatcctctccagacatttgcaattggcatggaagacagccccgatttactggctgctagaaaggtggcagatcatattggaagtgaacattatgaagtcctttttaactctgaggaaggcattcaggctctggatgaagtcatattttccttggaaacttatgacattacaacagttcgtgcttcagtaggtatgtatttaatttccaagtatattcggaagaacacagatagcgtggtgatcttctctggagaaggatcagatgaacttacgcagggttacatatattttcacaaggctccttctcctgaaaaagccgaggaggagagtgagaggcttctgagggaactctatttgtttgatgttctccgcgcagatcgaactactgctgcccatggtcttgaactgagagtcccatttctagatcatcgattttcttcctattacttgtctctgccaccagaaatgagaattccaaagaatgggatagaaaaacatctcctgagagagacgtttgaggattccaatctgatacccaaagagattctctggcgaccaaaagaagccttcagtgatggaataacttcagttaagaattcctggtttaagattttacaggaatacgttgaacatcaggttgatgatgcaatgatggcaaatgcagcccagaaatttcccttcaatactcctaaaaccaaagaaggatattactaccgtcaagtctttgaacgccattacccaggccgggctgactggctgagccattactggatgcccaagtggatcaatgccactgacccttctgcccgcacgctgacccactacaagtcagctgtcaaagcttaggtggtctttatgctgtaatgtgaaagcaaatatttcttcgtgttggatggggactgtgggtagataggggaacaatgagagtcaactcaggctaacttgggtgtgaaaaaaataaaagtcctaaatct

SEQ ID NO: 109132 - DNA, 1865 bp, Homo sapiens
  Payload ID: 1438
  Gene Symbol: ASNS
  Gene Name: asparagine synthetase (glutamine-hydrolyzing)
  Uniprot ID: P08243
  ENST ID: ENST00000422745
  CDS Start-End: 130-1752
ttcccgcacgcgttacaggagccaggtcggtataagcgccagcggcctcgccgcccgtcaagctgtccacatccctggcctcagcccgccacatcaccctgacctgcttacgcccagtgtctgagtgctatgaagattgcacacagaggtccagatgcattccgttttgagaatgtcaatggatacaccaactgctgctttggatttcaccggttggcggtagttgacccgctgtttggaatgcagccaattcgagtgaagaaatatccgtatttgtggctctgttacaatggtgaaatctacaaccataagaagatgcaacagcattttgaatttgaataccagaccaaagtggatggtgagataatccttcatctttatgacaaaggaggaattgagcaaacaatttgtatgttggatggtgtgtttgcatttgttttactggatactgccaataagaaagtgttcctgggtagagatacatatggagtcagacctttgtttaaagcaatgacagaagatggatttttggctgtatgttcagaagctaaaggtcttgttacattgaagcactccgcgactccctttttaaaagtggagccttttcttcctggacactatgaagttttggatttaaagccaaatggcaaagttgcatccgtggaaatggttaaatatcatcactgtcgggatgtacccctgcacgccctctatgacaatgtggagaaactctttccaggttttgagatagaaactgtgaagaacaacctcaggatcctttttaataatgctgtaaagaaacgtttgatgacagacagaaggattggctgccttttatcagggggcttggactccagcttggttgctgccactctgttgaagcagctgaaagaagcccaagtacagtatcctctccagacatttgcaattggcatggaagacagccccgatttactggctgctagaaaggtggcagatcatattggaagtgaacattatgaagtcctttttaactctgaggaaggcattcaggctctggatgaagtcatattttccttggaaacttatgacattacaacagttcgtgcttcagtaggtatgtatttaatttccaagtatattcggaagaacacagatagcgtggtgatcttctctggagaaggatcagatgaacttacgcagggttacatatattttcacaaggctccttctcctgaaaaagccgaggaggagagtgagaggcttctgagggaactctatttgtttgatgttctccgcgcagatcgaactactgctgcccatggtcttgaactgagagtcccatttctagatcatcgattttcttcctattacttgtctctgccaccagaaatgagaattccaaagaatgggatagaaaaacatctcctgagagagacgtttgaggattccaatctgatacccaaagagattctctggcgaccaaaagaagccttcagtgatggaataacttcagttaagaattcctggtttaagattttacaggaatacgttgaacatcaggttgatgatgcaatgatggcaaatgcagcccagaaatttcccttcaatactcctaaaaccaaagaaggatattactaccgtcaagtctttgaacgccattacccaggccgggctgactggctgagccattactggatgcccaagtggatcaatgccactgacccttctgcccgcacgctgacccactacaagtcagctgtcaaagcttaggtggtctttatgctgtaatgtgaaagcaaatatttcttcgtgttggatggggactgtgggtagataggggaacaatgagagtcaactcaggctaacttgggtgtgaaaaaaat

SEQ ID NO: 109133 - DNA, 2450 bp, Homo sapiens
  Payload ID: 1439
  Gene Symbol: ASNSD1
  Gene Name: asparagine synthetase domain containing 1
  Uniprot ID: Q9NWL6
  ENST ID: ENST00000260952
  CDS Start-End: 414-2345
aaaagaaagggtgagcgcggctggaagcgcgcatgcgctgtggctaatgccgtaggctccttcagggctgagccatcccgcgtgtcttgcgctcggtggaaatgcccagccgagggacgcgaccagaggacagctctgtgctgatccccaccgacaattcgaccccacacaaggaggatctaagcagcaagattaaagaacaaaaaattgtggtggatgaactttctaaccttaagaagaataggaaagtatataggcaacaacagaacagcaatatattctttcttgcagaccgaacagaaatgctgtctgagagcaagaatatattggatgaactgaaaaaagaataccaagaaatagaaaacttagacaagaccaaaatcaagaaatagtcaacctgatttcacataacaatgtgtggcatttgttgttctgtaaacttttctgctgagcatttcagtcaagatttaaaagaggacttactatataatcttaaacagcggggacccaatagtagtaaacaattgttaaagtctgatgttaactaccagtgtttattttctgctcacgtcctacacttgaggggtgttttgactacccagcctgtggaagatgaaagaggcaatgtgtttctatggaatggagaaatttttagtggaataaaggttgaagctgaagagaatgacactcaaattttgtttaattatctttcctcctgtaagaatgaatctgagattttgtcactcttctcagaagtacaaggtccctggtcatttatatattatcaagcatctagtcattatttatggtttggtagggatttttttggtcgccgtagcttgctttggcattttagtaatttgggcaagagtttctgcctctcttcagttggcacccaaacatctggattggcaaatcagtggcaagaagttccagcatctggacttttcagaattgatcttaagtctactgtcatttccggatgcattattttacaactgtatccttggaaatatatttctagggagaatattattgaagaaaatgttaatagcctgagtcaaatttcagcagacttaccagcatttgtatcagtggtagcaaatgaagccaaactgtatcttgaaaaacctgttgttcctttaaatatgatgttgccacaagctgcattggagactcattgcagtaatatttccaatgtgccacctacaagagagatacttcaagtctttcttactgatgtacacatgaaggaagtaattcagcagttcattgatgtcctgagtgtagcagtcaagaaacgtgtcttgtgtttacctagggatgaaaacctgacagcaaatgaagttttgaaaacgtgtgataggaaagcaaatgttgcaatcctgttttctgggggcattgattccatggttattgcaacccttgctgaccgtcatattcctttagatgaaccaattgatcttcttaatgtagctttcatagctgaagaaaagaccatgccaactacctttaacagagaagggaataaacagaaaaataaatgtgaaataccttcagaagaattctctaaagatgttgctgctgctgctgctgacagtcctaataaacatgtcagtgtaccagatcgaatcacaggaagggcgggactaaaggaactacaagctgttagcccttcccgaatttggaattttgttgaaattaatgtttctatggaagaactgcagaaattaagaagaactcgaatatgtcacttaattcggccattggatacagttttggatgatagcattggctgtgcagtctggtttgcttctagaggaattggttggttagtggcccaggaaggagtgaaatcctatcagagcaatgcaaaggtagttctcactggaattggtgcagatgagcaacttgcaggttattctcgtcatcgtgtccgctttcagtcgcatgggctggaaggattgaataaggaaataatgatggaactgggtcgaatttcttctagaaatcttggtcgtgatgacagagttattggtgatcatggaaaagaagcaagatttcctttcctggatgaaaatgttgtctcctttctaaattctctgccgatttgggaaaaagcaaacttgactttaccccgaggaattggtgaaaaattacttttacgccttgcagctgtggaacttggtcttacagcctctgctcttctgcccaaacgggccatgcagtttggatcaagaattgcaaaaatggaaaaaattaatgaaaaggcatctgataaatgtggacggctccaaatcatgtccttagaaaatctttctattgaaaaggagactaaattgtaatgtgattcacaatgtaacaatataaaaataagtttttatataattatataaaagtaagatactctgctgctttactattgtataacatagtagttttaaagttca

SEQ ID NO: 109134 - DNA, 567 bp, Homo sapiens
  Payload ID: 1439
  Gene Symbol: ASNSD1
  Gene Name: asparagine synthetase domain containing 1
  ENST ID: ENST00000425590
  CDS Start-End: 349-567
gctggaagcgcgcatgcgctgtggctaatgccgtaggctccttcagggctgagccatcccgcgtgtcttgcgctcggtggaaatgcccagccgagggacgcgaccagaggacagctctgtgctgatccccaccgacaattcgaccccacacaaggaggatctaagcagcaagattaaagaacaaaaaattgtggtggatgaactttctaaccttaagaagaataggaccgaacagaaatgctgtctgagagcaagaatatattggatgaactgaaaaaagaataccaagaaatagaaaacttagacaagaccaaaatcaagaaatagtcaacctgatttcacataacaatgtgtggcatttgttgttctgtaaacttttctgctgagcatttcagtcaagatttaaaagaggacttactatataatcttaaacagcggggacccaatagtagtaaacaattgttaaagtctgatgttaactaccagtgtttattttctgctcacgtcctacacttgaggggtgttttgactacccagcctgtggaagatgaaagaggcaatgtgttt

SEQ ID NO: 109135 - DNA, 2172 bp, Homo sapiens
  Payload ID: 1439
  Gene Symbol: ASNSD1
  Gene Name: asparagine synthetase domain containing 1
  ENST ID: ENST00000420250
  CDS Start-End: 317-2172
ctaatgccgtaggctccttcagggctgagccatcccgcgtgtcttgcgctcggtggaaatgcccagccgagggacgcgaccagaggacagctctgtgctgatccccaccgacaattcgaccccacacaaggaggatctaagcagcaagaaagtatataggcaacaacagaacagcaatatattctttcttgcagaccgaacagaaatgctgtctgagagcaagaatatattggatgaactgaaaaaagaataccaagaaatagaaaacttagacaagaccaaaatcaagaaatagtcaacctgatttcacataacaatgtgtggcatttgttgttctgtaaacttttctgctgagcatttcagtcaagatttaaaagaggacttactatataatcttaaacagcggggacccaatagtagtaaacaattgttaaagtctgatgttaactaccagtgtttattttctgctcacgtcctacacttgaggggtgttttgactacccagcctgtggaagatgaaagaggcaatgtgtttctatggaatggagaaatttttagtggaataaaggttgaagctgaagagaatgacactcaaattttgtttaattatctttcctcctgtaagaatgaatctgagattttgtcactcttctcagaagtacaaggtccctggtcatttatatattatcaagcatctagtcattatttatggtttggtagggatttttttggtcgccgtagcttgctttggcattttagtaatttgggcaagagtttctgcctctcttcagttggcacccaaacatctggattggcaaatcagtggcaagaagttccagcatctggacttttcagaattgatcttaagtctactgtcatttccggatgcattattttacaactgtatccttggaaatatatttctagggagaatattattgaagaaaatgttaatagcctgagtcaaatttcagcagacttaccagcatttgtatcagtggtagcaaatgaagccaaactgtatcttgaaaaacctgttgttcctttaaatatgatgttgccacaagctgcattggagactcattgcagtaatatttccaatgtgccacctacaagagagatacttcaagtctttcttactgatgtacacatgaaggaagtaattcagcagttcattgatgtcctgagtgtagcagtcaagaaacgtgtcttgtgtttacctagggatgaaaacctgacagcaaatgaagttttgaaaacgtgtgataggaaagcaaatgttgcaatcctgttttctgggggcattgattccatggttattgcaacccttgctgaccgtcatattcctttagatgaaccaattgatcttcttaatgtagctttcatagctgaagaaaagaccatgccaactacctttaacagagaagggaataaacagaaaaataaatgtgaaataccttcagaagaattctctaaagatgttgctgctgctgctgctgacagtcctaataaacatgtcagtgtaccagatcgaatcacaggaagggcgggactaaaggaactacaagctgttagcccttcccgaatttggaattttgttgaaattaatgtttctatggaagaactgcagaaattaagaagaactcgaatatgtcacttaattcggccattggatacagttttggatgatagcattggctgtgcagtctggtttgcttctagaggaattggttggttagtggcccaggaaggagtgaaatcctatcagagcaatgcaaaggtagttctcactggaattggtgcagatgagcaacttgcaggttattctcgtcatcgtgtccgctttcagtcgcatgggctggaaggattgaataaggaaataatgatggaactgggtcgaatttcttctagaaatcttggtcgtgatgacagagttattggtgatcatggaaaagaagcaagatttcctttcctggatgaaaatgttgtctcctttctaaattctctgccgatttgggaaaaagcaaacttgactttaccccgaggaattggtgaaaaattacttttacgccttgcagctgtggaacttggtcttacagcctctgctcttctgcccaaacgggccatgcagtttggatcaagaattgcaaaaatggaaaaaattaatgaaaa

SEQ ID NO: 109136 - DNA, 581 bp, Homo sapiens
  Payload ID: 1439
  Gene Symbol: ASNSD1
  Gene Name: asparagine synthetase domain containing 1
  ENST ID: ENST00000607829
  CDS Start-End: 1-291
atgcccagccgagggacgcgaccagaggacagctctgtgctgatccccaccgacaattcgaccccacacaaggaggatctaagcagcaagattaaagaacaaaaaattgtggtggatgaactttctaaccttaagaagaataggaaagtatataggcaacaacagaacagcaatatattctttcttgcagaccgaacagaaatgctgtctgagagcaagaatatattggatgaactgaaaaaagaataccaagaaatagaaaacttagacaagaccaaaatcaagaaatagtcaacctgatttcacataacaatgtgtggcatttgttgttctgtaaacttttctgctgagcatttcagtcaagatttaaaagaggacttactatataatcttaaacagcggggacccaatagtagtaaacaattgttaaagtctgatgttaactaccagtgtttattttctgctcacgtcctacacttgaggggtgttttgactacccagcctgtggaagatgaaagaggcaatgtgtttctatggaatggagaaatttttagtggaataaaggttgaagctgaagagaa

SEQ ID NO: 109137 - DNA, 535 bp, Homo sapiens
  Payload ID: 1439
  Gene Symbol: ASNSD1
  Gene Name: asparagine synthetase domain containing 1
  ENST ID: ENST00000607690
  CDS Start-End: 1-192
atgcccagccgagggacgcgaccagaggacagctctgtgctgatccccaccgacaattcgaccccacacaaggaggatctaagcagcaagattaaagaacaaaaaattgtggtggatgaactttctaaccttaagaagaataggaccgaacagaaatgctgtctgagagcaagaatatattggatgaactgaaaaaagaataccaagaaatagaaaacttagacaagaccaaaatcaagaaatagtcaacctgatttcacataacaatgtgtggcatttgttgttctgtaaacttttctgctgagcatttcagtcaagatttaaaagaggacttactatataatcttaaacagcggggacccaatagtagtaaacaattgttaaagtctgatgttaactaccagtgtttattttctgctcacgtcctacacttgaggggtgttttgactacccagcctgtggaagatgaaagaggcaatgtgtttctatggaatggagaaatttttagtggaataaaggttgaagctgaagagaa

SEQ ID NO: 109138 - DNA, 579 bp, Homo sapiens
  Payload ID: 1439
  Gene Symbol: ASNSD1
  Gene Name: asparagine synthetase domain containing 1
  ENST ID: ENST00000607535
  CDS Start-End: 63-200
gtggctaatgccgtaggctccttcagggctgagccatcccgcgtgtcttgcgctcggtggaaatgcccagccgagggacgcgaccagaggacagctctgtgctgatccccaccgacaattcgaccccacacaaggaggatctaagcagcaagaccgaacagaaatgctgtctgagagcaagaatatattggatgaactgaaaaaagaataccaagaaatagaaaacttagacaagaccaaaatcaagaaatagtcaacctgatttcacataacaatgtgtggcatttgttgttctgtaaacttttctgctgagcatttcagtcaagatttaaaagaggacttactatataatcttaaacagcggggacccaatagtagtaaacaattgttaaagtctgatgttaactaccagtgtttattttctgctcacgtcctacacttgaggggtgttttgactacccagcctgtggaagatgaaagaggcaatgtgtttctatggaatggagaaatttttagtggaataaaggttgaagctgaagagaatgacactcaaattttgtttaattatctttcctcctg

SEQ ID NO: 109139 - DNA, 968 bp, Homo sapiens
  Payload ID: 1439
  Gene Symbol: ASNSD1
  Gene Name: asparagine synthetase domain containing 1
  ENST ID: ENST00000607062
  CDS Start-End: 449-937
gtgagcgcgcagacgctattggtaagactcgcgggaaaagaaagggtgagcgcggctggaagcgcgcatgcgctgtggctaatgccgtaggctccttcagggctgagccatcccgcgtgtcttgcgctcggtggaaatgcccagccgagggacgcgaccagaggacagctctgtgctgatccccaccgacaattcgaccccacacaaggaggatctaagcagcaagattaaagaacaaaaaattgtggtggatgaactttctaaccttaagaagaataggaaagtatataggcaacaacagaacagcaatatattctttcttgcagaccgaacagaaatgctgtctgagagcaagaatatattggatgaactgaaaaaagaataccaagaaatagaaaacttagacaagaccaaaatcaagaaatagtcaacctgatttcacataacaatgtgtggcatttgttgttctgtagttctcactggaattggtgcagatgagcaacttgcaggttattctcgtcatcgtgtccgctttcagtcgcatgggctggaaggattgaataaggaaataatgatggaactgggtcgaatttcttctagaaatcttggtcgtgatgacagagttattggtgatcatggaaaagaagcaagatttcctttcctggatgaaaatgttgtctcctttctaaattctctgccgatttgggaaaaagcaaacttgactttaccccgaggaattggtgaaaaattacttttacgccttgcagctgtggaacttggtcttacagcctctgctcttctgcccaaacgggccatgcagtttggatcaagaattgcaaaaatggaaaaaattaatgaaaaggcatctgataaatgtggacggctccaaatcatgtccttagaaaatctttctattgaaaaggagactaaattgtaatgtgattcacaatgtaacaatataaaaataa

SEQ ID NO: 109140 - DNA, 741 bp, Homo sapiens
  Payload ID: 1439
  Gene Symbol: ASNSD1
  Gene Name: asparagine synthetase domain containing 1
  ENST ID: ENST00000606910
  CDS Start-End: 3-741
aaatgcccagccgagggacgcgaccagaggacagctctgtgctgatccccaccgacaattcgaccccacacaaggaggatctaagcagcaagattaaagaacaaaaaattgtggtggatgaactttctaaccttaagaagaataggaaagtatataggcaacaacagaacagcaatatattctttcttgcagaccgaacagaaatgctgtctgagagcaagactttcatagctgaagaaaagaccatgccaactacctttaacagagaagggaataaacagaaaaataaatgtgaaataccttcagaagaattctctaaagatgttgctgctgctgctgctgacagtcctaataaacatgtcagtgtaccagatcgaatcacaggaagggcgggactaaaggaactacaagctgttagcccttcccgaatttggaattttgttgaaattaatgtttctatggaagaactgcagaaattaagaagaactcgaatatgtcacttaattcggccattggatacagttttggatgatagcattggctgtgcagtctggtttgcttctagaggaattggttggttagtggcccaggaaggagtgaaatcctatcagagcaatgcaaaggtagttctcactggaattggtgcagatgagcaacttgcaggttattctcgtcatcgtgtccgctttcagtcgcatgggctggaaggattgaataaggaaataatgatggaactgggtc

SEQ ID NO: 109141 - DNA, 573 bp, Homo sapiens
  Payload ID: 1439
  Gene Symbol: ASNSD1
  Gene Name: asparagine synthetase domain containing 1
  ENST ID: ENST00000605941
  CDS Start-End: 70-243
atgcgctgtggctaatgccgtaggctccttcagggctgagccatcccgcgtgtcttgcgctcggtggaaatgcccagccgagggacgcgaccagaggacagctctgtgctgatccccaccgacaattcgaccccacacaaggaggatctaagcagcaagattaaagaacaaaaaattgtggtggatgaactttctaaccttaagaagaataggcctaaattatgttttccagaaagtatataggcaacaacagaacagcaatatattctttcttgcagaccgaacagaaatgctgtctgagagcaagaatatattggatgaactgaaaaaagaataccaagaaatagaaaacttagacaagaccaaaatcaagaaatagtcaacctgatttcacataacaatgtgtggcatttgttgttctgtaaacttttctgctgagcatttcagtcaagatttaaaagaggacttactatataatcttaaacagcggggacccaatagtagtaaacaattgttaaagtctgatgttaactaccagtgtttattttctgctcacgtcctacacttgagggg

SEQ ID NO: 109142 - DNA, 3099 bp, Homo sapiens
  Payload ID: 1440
  Gene Symbol: NARS
  Gene Name: asparaginyl-tRNA synthetase
  Uniprot ID: O43776
  ENST ID: ENST00000256854
  CDS Start-End: 457-2103
aaccagcctccaccatctggggatcggggcgacatccttggtctggtttgcaagaggacccgcacgcctccagctggggcggaattggaagattcagaaaggaaagttggggaggcggggaaggaagggtgcaaaagtgacactgtgccagggtctccagggccgcggagctccgggacaggcagcgccttccgagctgcacaaacgcgtggggcggggcgtctctggatccggaagttgcctctgccctcaccaaagatggcggccccggcgccgctcgcccacctctcgtaaccaatggaaccgcggcgctcggccgattctcgcaggcgccctcagatctacgctctctgatgcaacgccggaatcgcggaaaccgccggtgcacgttggagtcataagacggcgtcggtgttgcagtctgtgtccttggaggtgaccagggccactgcaggcatggtgctagcagagctgtacgtctctgaccgagagggaagcgatgccacgggagatggaaccaaggagaaaccatttaaaacaggtctaaaggctttgatgacagtagggaaagaaccatttcctaccatttacgtagattcacaaaaagaaaatgagaggtggaatgttatttctaaatcacagttgaagaacattaaaaagatgtggcatagggaacaaatgaagagtgaatcccgggaaaagaaagaggcagaagatagtttacgaagagaaaagaacctggaagaagcaaagaagattaccattaaaaatgatccaagtctcccagagccaaaatgtgtgaagattggtgcgttagaaggatatagaggccaaagagtaaaggtgtttggctgggtccacaggctgcgcaggcaaggaaagaatttaatgtttctggtgttgcgagatggtacaggttatcttcagtgtgtcttggcggatgagttgtgtcagtgctacaatggagttctcttgtccacggagagcagtgttgcagtgtatggaatgctaaatcttaccccaaagggcaagcaggctccaggtggccatgagctgagttgtgacttctgggaactaattgggttggcccctgctggaggagctgacaacctgatcaatgaggagtctgacgttgatgtccagctcaacaacagacacatgatgatccgaggagaaaacatgtccaaaatcctaaaagcacgatccatggtcaccaggtgctttagagatcacttctttgatagggggtactatgaagttactcctccaacattagtgcaaacacaagtagaaggtggtgccacactcttcaagcttgactattttggggaagaggcatttttgactcaatcctctcagttgtacttggagacctgcctcccagccctgggagatgttttttgtattgctcagtcataccgggcagagcagtccagaacacgaaggcacctggctgagtacactcacgtggaagctgagtgtcctttcctgacttttgacgacctcctgaaccggttggaggacttggtttgtgatgtggtagatcgaatattgaagtcacctgcagggagcatagtgcatgagctcaacccgaactttcagccccccaaacggcctttcaaacggatgaactattcagatgctatcgtttggctaaaagaacatgatgtaaagaaagaagatggaactttctatgaatttggagaagatatcccagaagctcctgagagactgatgacagacaccattaatgaaccaatcttgctgtgtcgatttcctgtggagatcaagtccttctacatgcagcgatgtcctgaggattcccgtcttactgaatctgtcgacgtgttgatgcccaatgttggtgagattgtgggaggctcaatgcgtatctttgatagtgaagaaatactggcaggttataaaagggaagggattgaccccactccctattactggtatacggatcagagaaaatacggtacatgtccccatggaggatatggcttgggcttggaacgattcttaacgtggattctgaataggtatcacatccgagacgtgtgcttataccctcgatttgtccagcgttgcacgccataaccattttctccagaagcgtggaggaaagattatgaaaggaacaggctctttaaaaaagaaaacaaaaagccagaatcttcctttttttgtttcattggggtttctctttctgtttttctttctactaccataaaaactatctcaaatcacctgaacatcaagtgatattaaggttgtcatcttaagaaaaaatatccatttttttcttaagttcgggaaacaaagttcggggaaaatacctggcatgaaactgtagttagggatacatttcagcattttactcactttatccaagttattcattttattcaagttatatgtatgtataattcaacaattttagattatggtgtaagatactccagtaacttatctttctgtccttttaagtgtaccttgaattctttgatttattttattgcatcaatgaattaaaacaaaaatcttgggggaagaaattggcaatatcgtataaaaatctgctcatattagaacacagtataattcagcagtaaacactagaatcaaatgaatagccttttgtatcagttattaatcttttctaactctgcttagctgctaataatcctgaggcatagaaattgaagaatttgtaaaaatagaattgccttaaaggatttgaagtaagaacataattttggggagagttttttagtgattcacagtatccctcttagcattaatttaaggtaaagaggcagattgattttccctctttcctggtaattcctaagtaattaagaataaataagttccaaaagaaattgtagctggaatcttaataacaattgtgagtggctgtttgagttgcccccaccatgtccttagatctaatctgtgctaccttattaactcacagcaggcttactgaatggcttcatttcagatttagttgatttctccaccaaatgcatgtcatgtattctcaataggctgtattcccagcagtcaataaatgaacacccgtaaaaactc

SEQ ID NO: 109143 - DNA, 937 bp, Homo sapiens
  Payload ID: 1440
  Gene Symbol: NARS
  Gene Name: asparaginyl-tRNA synthetase
  Uniprot ID: O43776
  ENST ID: ENST00000540592
  CDS Start-End: 76-600
ggtgcacgttggagtcataagacggcgtcggtgttgcagtctgtgtccttggaggtgaccagggccactgcaggcatggtgctagcagagctgtacgtctctgaccgagagggaagcgatgccacgggagatggaaccaaggagaaaccatttaaaacaggtctaaaggctttgatgacagtagggaaagaaccatttcctaccatttacgtagattcacaaaaagaaaatgagaggtggaatgttatttctaaatcacagttgaagaacattaaaaagatgtggcatagggaacaaatgaagagtgaatcccgggaaaagaaagaggcagaagatagtttacgaagagaaaagaacctggaagaagcaaagaagattaccattaaaaatgatccaagtctcccagagccaaaatgtgtgaagattggtgcgttagaaggatatagaggccaaagagtaaaggtgtttggctgggtccacaggctgcgcaggcaagtgtcagtgctacaatggagttctcttgtccacggagagcagtgttgcagtgtatggaatgctaaatcttaccccaaagggcaagcaggctccaggtggccatgagctgagttgtgacttctgggaactaattgggttggcccctgctggaggagctgacaacctgatcaatgaggagtctgacgttgatgtccagctcaacaacagacacatgatgatccgaggagaaaacatgtccaaaatcctaaaagcacgatccatggtcaccaggtgctttagagatcacttctttgatagggggtactatgaagttactcctccaacattagtgcaaacacaagtagaaggtggtgccacactcttcaagcttgactattttggggaagaggcatttttgactcaatcctctcagttgtacttggagacctgcctcccagccctg

SEQ ID NO: 109144 - DNA, 562 bp, Homo sapiens
  Payload ID: 1440
  Gene Symbol: NARS
  Gene Name: asparaginyl-tRNA synthetase
  ENST ID: ENST00000587194
  CDS Start-End: 76-562
ggtgcacgttggagtcataagacggcgtcggtgttgcagtctgtgtccttggaggtgaccagggccactgcaggcatggtgctagcagagctgtacgtctctgaccgagagggaagcgatgccacgggagatggaaccaaggagaaaccatttaaaacaggtctaaaggctttgatgacagtagggaaagaaccatttcctaccatttacgtagattcacaaaaagaaaatgagaggtggaatgttatttctaaatcacagttgaagaacattaaaaagatgtggcatagggaacaaatgaagagtgaatcccgggaaaagaaagaggcagaagatagtttacgaagagaaaagaacctggaagaagcaaagaagattaccattaaaaatgatccaagtctcccagagccaaaatgtgtgaagattggtgcgttagaaggatatagaggccaaagagtaaaggtgtttggctgggtccacaggctgcgcaggcaagtgtcagtgctacaatggagttctcttgtccacggagagcagtgttgcagtgtatggaatgctaaat

SEQ ID NO: 109145 - DNA, 1608 bp, Homo sapiens
  Payload ID: 1440
  Gene Symbol: NARS
  Gene Name: asparaginyl-tRNA synthetase
  ENST ID: ENST00000586807
  CDS Start-End: 69-479
gttggagtcataagacggcgtcggtgttgcagtctgtgtccttggaggtgaccagggccactgcaggcatggtgctagcagagctgtacgtctctgaccgagagggaagcgatgccacgggagatggaaccaaggagaaaccatttaaaacaggtctaaaggctttgatgacagtagggaaagaaccatttcctaccatttacgtagattcacaaaaagaaaatgagaggtggaatgttatttctaaatcacagttgaagaacattaaaaagatgtggcatagggaacaaatgaagagtgaatcccgggaaaagaaagaggcagaagatagtttacgaagagaaaagaacctggaagaagcaaagaagattaccattaaaaatgatccaagtctcccagagccaaaatgtgtgaagattggtgctttagagatcacttctttgatagggggtactatgaagttactcctccaacattagtgcaaacacaagtagaaggtggtgccacactcttcaagcttgactattttggggaagaggcatttttgactcaatcctctcagttgtacttggagacctgcctcccagccctgggagatgttttttgtattgctcagtcataccgggcagagcagtccagaacacgaaggcacctggctgagtacactcacgtggaagctgagtgtcctttcctgacttttgacgacctcctgaaccggttggaggacttggtttgtgatgtggtagatcgaatattgaagtcacctgcagggagcatagtgcatgagctcaacccgaactttcagccccccaaacggcctttcaaacggatgaactattcagatgctatcgtttggctaaaagaacatgatgtaaagaaagaagatggaactttctatgaatttggagaagatatcccagaagctcctgagagactgatgacagacaccattaatgaaccaatcttgctgtgtcgatttcctgtggagatcaagtccttctacatgcagcgatgtcctgaggattcccgtcttactgaatctgtcgacgtgttgatgcccaatgttggtgagattgtgggaggctcaatgcgtatctttgatagtgaagaaatactggcaggttataaaagggaagggattgaccccactccctattactggtatacggatcagagaaaatacggtacatgtccccatggaggatatggcttgggcttggaacgattcttaacgtggattctgaataggtatcacatccgagacgtgtgcttataccctcgatttgtccagcgttgcacgccataaccattttctccagaagcgtggaggaaagattatgaaaggaacaggctctttaaaaaagaaaacaaaaagccagaatcttcctttttttgtttcattggggtttctctttctgtttttctttctactaccataaaaactatctcaaatcacctgaacatcaagtgatattaaggttgtcatcttaagaaaaaatatccatttttttcttaagttcgggaaacaaagttcggggaaaatacctggcatgaaactgtagttagggatacatttcagcattttactcactttatccaagttattca

SEQ ID NO: 109146 - DNA, 1002 bp, Homo sapiens
  Payload ID: 1440
  Gene Symbol: NARS
  Gene Name: asparaginyl-tRNA synthetase
  ENST ID: ENST00000587675
  CDS Start-End: 618-1002
gtctcgcagctggcgcggtgtttgctggtgacatgaactcaaccagcctccaccatctggggatcggggcgacatccttggtctggtttgcaagaggacccgcacgcctccagctggggcggaattggaagattcagaaaggaaagttggggaggcggggaaggaagggtgcaaaagtgacactgtgccagggtctccagggccgcggagctccgggacaggcagcgccttccgagctgcacaaacgcgtggggcggggcgtctctggatccggaagttgcctctgccctcaccaaagatggcggccccggcgccgctcgcccacctctcgtaaccaatggaaccgcggcgctcggccgattctcgcaggcgccctcagatctacgctctctgatgcaacgccggaatcgcggaaaccgccggtgcacgttggagtcataagacggcgtcggtgttgcagtctgtgtccttggaggtgaccagggccactgcaggcatggtgctaggctttgatgacagtagggaaagaaccatttcctaccatttacgtagattcacaaaaagaaaatgagaggtggaatgttatttctaaatcacagttgaagaacattaaaaagatgtggcatagggaacaaatgaagagtgaatcccgggaaaagaaagaggcagaagatagtttacgaagagaaaagaacctggaagaagcaaagaagattaccattaaaaatgatccaagtctcccagagccaaaatgtgtgaagattggtgcgttagaaggatatagaggccaaagagtaaaggtgtttggctgggtccacaggctgcgcaggcaaggaaagaatttaatgtttctggtgttgcgagatggtacaggttatcttcagtgtgtcttggcggatgagttgtgtcagtgctacaatggagttctcttgtccacggagagcagtgttgcagtgtatggaatgctaaatcttaccccaaagggcaagcaggctccaggtg

SEQ ID NO: 109147 - DNA, 463 bp, Homo sapiens
  Payload ID: 1440
  Gene Symbol: NARS
  Gene Name: asparaginyl-tRNA synthetase
  ENST ID: ENST00000590123
  CDS Start-End: 21-164
tgaccagggccactgcaggcatggtgctagagctgtacgtctctgaccgagagggaagcgatgccacgggagatggaaccaaggagaaaccatttaaaacaggtctaaagtattgtacaatgttcaagaactgtcttttctctcctccctacccaaggctttgatgacagtagggaaagaaccatttcctaccatttacgtagattcacaaaaagaaaatgagaggtggaatgttatttctaaatcacagttgaagaacattaaaaagatgtggcatagggaacaaatgaagagtgaatcccgggaaaagaaagaggcagaagatagtttacgaagagaaaagaacctggaagaagcaaagaagattaccattaaaaatgatccaagtctcccagagccaaaatgtgtgaagattggtgcgttagaaggatatagaggccaaagagtaaaggtgtttggctgg

SEQ ID NO: 109148 - DNA, 582 bp, Homo sapiens
  Payload ID: 1440
  Gene Symbol: NARS
  Gene Name: asparaginyl-tRNA synthetase
  ENST ID: ENST00000588661
  CDS Start-End: 93-582
tctgatgcaacgccggaatcgcggaaaccgccggtgcacgttggagtcataagacggcgtcggtgttgcagtctgtgtccttggaggctttgatgacagtagggaaagaaccatttcctaccatttacgtagattcacaaaaagaaaatgagaggtggaatgttatttctaaatcacagttgaagaacattaaaaagatgtggcatagggaacaaatgaagagtgaatcccgggaaaagaaagaggcagaagatagtttacgaagagaaaagaacctggaagaagcaaagaagattaccattaaaaatgatccaagtctcccagagccaaaatgtgtgaagattggtgcgttagaaggatatagaggccaaagagtaaaggtgtttggctgggtccacaggctgcgcaggcaaggaaagaatttaatgtttctggtgttgcgagatggtacaggttatcttcagtgtgtcttggcggatgagttgtgtcagtgctacaatggagttctcttgtccacggagagcagtgttgcagtgtatggaatgctaaatcttaccccaaagggcaagcaggctccaggtg

SEQ ID NO: 109149 - DNA, 584 bp, Homo sapiens
  Payload ID: 1440
  Gene Symbol: NARS
  Gene Name: asparaginyl-tRNA synthetase
  ENST ID: ENST00000591599
  CDS Start-End: 84-584
aaaccgccggtgcacgttggagtcataagacggcgtcggtgttgcagtctgtgtccttggaggtgaccagggccactgcaggcatggtgctagcagagctgtacgtctctgaccgagagggaagcgatgccacgggagatggaaccaaggagaaaccatttaaaacaggtctaaaggctttgatgacagtagggaaagaaccatttcctaccatttacgtagattcacaaaaagaaaatgagaggtggaatgttatttctaaatcacagttgaagaacattaaaaagatgtggcatagggaacaaatgaagagtgaatcccgggaaaagaaagaggtgaagattggtgcgttagaaggatatagaggccaaagagtaaaggtgtttggctgggtccacaggctgcgcaggcaaggaaagaatttaatgtttctggtgttgcgagatggtacaggttatcttcagtgtgtcttggcggatgagttgtgtcagtgctacaatggagttctcttgtccacggagagcagtgttgcagtgtatggaatgctaaatcttaccccaaagggcaagcaggctccaggtggc

SEQ ID NO: 109150 - DNA, 2519 bp, Homo sapiens
  Payload ID: 1441
  Gene Symbol: NARS2
  Gene Name: asparaginyl-tRNA synthetase 2, mitochondrial (putative)
  Uniprot ID: Q96I59
  ENST ID: ENST00000281038
  CDS Start-End: 377-1810
gtagcgtgatgacgtaagcggcgttggcgtggtgtggtaggagtggttgcgcgtgttgcggcccgggttctgttcgtaggtttacaattgtcgcgggtagtggggcgccccagctgccaactgcacgtggtttctttctggcgtttgcctagtgtcctgtccattccgccccgttgggaagtgggaagcggagaggttctgtggggacagagctgggagtcctgaaggagaaagcgcgcagccgaggggctctggagtgccttagagcagagctgcggccgcggaaggggagcagctgagaaaggagggccgctgcaggcggggttcgaaccgtggggtctgggctgctcccgcggagggcctgggcggacgcgggatgctgggggtccgctgcctgctgcggtccgtgcgcttctgttcctccgcccccttccccaagcacaaaccttcagccaaactgagcgtgcgggacgctctcggggctcagaacgcgagtggggagcgcattaagatccagggatggattcgttctgtccgatcccagaaggaagtcttgttcctgcatgtaaatgatgggtcatctttggaaagccttcaggttgttgcagattcaggccttgacagtagagaattaaattttgggagttctgtggaagtacaagggcagctgataaaaagtccatccaaaaggcaaaatgtggaactgaaggcagaaaaaattaaagttattggaaattgtgatgccaaggatttccccatcaaatataaagagaggcatcctctggagtatctgcgacaatatcctcactttaggtgtaggactaacgttctgggttctatattgaggattcgcagtgaagcgacagctgctattcattctttctttaaggacagtggctttgtacatattcatactccaataatcacatccaatgactctgagggagctggagaactttttcaacttgaaccttcaggcaaacttaaggtacctgaggagaatttcttcaatgttcctgctttcttaactgtctcaggacaacttcatctagaagtgatgtcaggagcttttactcaagtgtttacctttggtccgaccttccgagctgaaaattctcagagccggaggcacctggcagagttttatatgatagaagcagagatttcttttgttgacagccttcaagatcttatgcaggttatagaggaactgttcaaggctacaacaatgatggttctctcaaaatgtcctgaagatgttgaactctgtcacaaattcatagcacctggccaaaaggacagattagaacatatgctaaaaaacaactttttaatcatttcttatactgaagcagtggagatcttaaagcaagcatcccagaacttcacctttaccccagagtggggtgctgacctacggactgaacatgaaaagtacctggtgaagcactgtggcaacatacctgtcttcgttattaattatccattaacactcaagcctttctacatgagggataatgaagatggccctcagcacacggttgctgctgttgatcttctggttcctggagttggggaactctttggaggaggcctcagagaagaacgataccatttcttagaggagcgcttagccagatcgggacttacagaagtctaccaatggtatctggaccttcgtcgatttggatctgtgccacatggaggttttgggatgggatttgaacgctacctgcagtgcatcttgggtgttgacaatatcaaagatgttatccctttcccaaggtttcctcattcatgccttttatagctggaagattggttaaggaaaagcaccccccatggcagagacactgcacatgattgtgcatacagcagaatgcatgtttggattttagaaatgcagatttcaatatgtaattgttgtgccataagatatcatagaaaaaatataagtggttgtgattttcttagaaagttgagggtatttcacgtaaggatgagctcccgcaagaagaggtacttatagcaaggggactctcaaatccattacctcaattaagaaatgaagaaattgaattagtctcaaagtttcttttaaactctaaaacagaatgagataatgtattttacgttgtctataatcattaaatcactccctgtgtaatttgtgagaaccatctagtagctcgaaataaaataatgttgcatcttttctcccttgccatatactttgtgataaatccttatctcattttcagtacttcattaaacattgcagaaaaaaatattccttaaggtcttaattgatttaaagaagtagctattctgaattgaaatctcctttcattgaactggatgaaaaaatcatgtttaataactgttgcttttcaattttcaaagctgttgagatattacattaagtatttcaactctttaatcactgttgttataatttgtttatatttgatgtttataatttgtctaataaaatagatttttttaatagacacctatgg

SEQ ID NO: 109151 - DNA, 755 bp, Homo sapiens
  Payload ID: 1441
  Gene Symbol: NARS2
  Gene Name: asparaginyl-tRNA synthetase 2, mitochondrial (putative)
  ENST ID: ENST00000529880
  CDS Start-End: 31-755
gctcccgcggagggcctgggcggacgcgggatgctgggggtccgctgcctgctgcggtccgtgcgcttctgttcctccgcccccttccccaagcacaaaccttcagccaaactgagcgtgcgggacgctctcggggctcagaacgcgagtggggagcgcattaagatccagggatggattcgttctgtccgatcccagaaggaagtcttgttcctgcatgtaaatgatgggtcatctttggaaagccttcaggttgttgcagattcaggccttgacagtagagaattaaattttgggagttctgtggaagtacaagggcagctgataaaaagtccatccaaaaggcaaaatgtggaactgaaggcagaaaaaattaaagttattggaaattgtgatgccaaggatttccccatcaaatataaagagaggcatcctctggagtatctgcgacaatatcctcactttaggtgtaggactaacgttctgggttctatattgaggattcgcagtgaagcgacagctgctattcattctttctttaaggacagtggctttgtacatattcatactccaataatcacatccaatgactctgagggagctggagaactttttcaacttgaatggggtgctgacctacggactgaacatgaaaagtacctggtgaagcactgtggcaacatacctgtcttcgttattaattatccattaacactcaagcctttctacatgagggataatgaagatggccctca

SEQ ID NO: 109152 - DNA, 2137 bp, Homo sapiens
  Payload ID: 1441
  Gene Symbol: NARS2
  Gene Name: asparaginyl-tRNA synthetase 2, mitochondrial (putative)
  Uniprot ID: Q96I59
  ENST ID: ENST00000528850
  CDS Start-End: 938-1690
agggtctagctctgtcacccagactggagcgcagtgatgtgatctcagatgactacaacctccatctcccaggctcaagcaatcctcctgcctcggcctccagagtagctgaaactataggcatgcaccaccacactctataattttttaagttttttgtgaagatgagtctcactgtattgcccaggctggtctcaaactcctggactcaagcagtcctcctccttcggcatcccaaaatgctgggattacaggcataagcctggtagatgttgttataataaatacttattttttgagtaggttcttgctttgtcacccatgattgtactgacacagtcatggcttgccgttgcagtgatttctgttgtcctcacatatcctttactttttagcgggatggattcgttctgtccgatcccagaaggaagtcttgttcctgcatgtaaatgatgggtcatctttggaaagccttcaggttgttgcagattcaggccttgacagtagagaattaaattttgggagttctgtggaagtacaagggcagctgataaaaagtccatccaaaaggcaaaatgtggaactgaaggcagaaaaaattaaagttattggaaattgtgatgccaaggatttccccatcaaatataaagagaggcatcctctggagtatctgcgacaatatcctcactttaggtgtaggactaacgttctgggttctatattgaggattcgcagtgaagcgacagctgctattcattctttctttaaggacagtggctttgtacatattcatactccaataatcacatccaatgactctgagggagctggagaactttttcaacttgaaccttcaggcaaacttaaggtacctgaggagaatttcttcaatgttcctgctttcttaactgtctcaggacaacttcatctagaagtgatgtcaggagcttttactcaagtgtttacctttggtccgaccttccgagctgaaaattctcagagccggaggcacctggcagagttttatatgatagaagcagagatttcttttgttgacagccttcaagatcttatgcaggttatagaggaactgttcaaggctacaacaatgatggttctctcaaaatgtcctgaagatgttgaactctgtcacaaattcatagcacctggccaaaaggacagattagaacatatgctaaaaaacaactttttaatcatttcttatactgaagcagtggagatcttaaagcaagcatcccagaacttcacctttaccccagagtggggtgctgacctacggactgaacatgaaaagtacctggtgaagcactgtggcaacatacctgtcttcgttattaattatccattaacactcaagcctttctacatgagggataatgaagatggccctcagcacacggttgctgctgttgatcttctggttcctggagttggggaactctttggaggaggcctcagagaagaacgataccatttcttagaggagcgcttagccagatcgggacttacagaagtctaccaatggtatctggaccttcgtcgatttggatctgtgccacatggaggttttgggatgggatttgaacgctacctgcagtgcatcttgggtgttgacaatatcaaagatgttatccctttcccaaggtttcctcattcatgccttttatagctggaagattggttaaggaaaagcaccccccatggcagagacactgcacatgattgtgcatacagcagaatgcatgtttggattttagaaatgcagatttcaatatgtaattgttgtgccataagatatcatagaaaaaatataagtggttgtgattttcttagaaagttgagggtatttcacgtaaggatgagctcccgcaagaagaggtacttatagcaaggggactctcaaatccattacctcaattaagaaatgaagaaattgaattagtctcaaagtttcttttaaactctaaaacagaatgagataatgtattttacgttgtctataatcattaaatcactccctgtgtaatttgtgagaaccatctagtagctcgaaataaaataatgttgcatcttttctcccttgccatatactttgtgataaatccttatctcattt

SEQ ID NO: 109153 - DNA, 594 bp, Homo sapiens
  Payload ID: 1441
  Gene Symbol: NARS2
  Gene Name: asparaginyl-tRNA synthetase 2, mitochondrial (putative)
  ENST ID: ENST00000529571
  CDS Start-End: 587-594
cttcttccccgtagcgtgatgacgtaagcggcgttggcgtggtgtgggatggattcgttctgtccgatcccagaaggaagtcttgttcctgcatgtaaatgatgggtcatctttggaaagccttcaggttgttgcagattcaggccttgacagtagagaattaaattttgggagttctgtggaagtacaagggcagctgataaaaagtccatccaaaaggcaaaatgtggaactgaaggcagaaaaaattaaagttattggaaattgtgatgccaaggatttccccatcaaatataaagagaggcatcctctggagtatctgcgacaatatcctcactttaggtgtaggactaacgttctgggttctatattgaggattcgcagtgaagcgacagctgctattcattctttctttaaggacagtggctttgtacatattcatactccaataatcacatccaatgactctgagggagctggagaactttttcaacttgaaccttcaggcaaacttaaggtacctgaggagaatttcttcaatgttcctgctttcttaactgtctcaggacaacttcatctagaagtgatgtcagg

SEQ ID NO: 109154 - DNA, 725 bp, Homo sapiens
  Payload ID: 1441
  Gene Symbol: NARS2
  Gene Name: asparaginyl-tRNA synthetase 2, mitochondrial (putative)
  ENST ID: ENST00000529771
  CDS Start-End: 1-244
ggttgctgctgttgatcttctggttcctggagttggggaactctttggaggaggcctcagagaagaacgataccatttcttagaggagcgcttagccaggtatctggaccttcgtcgatttggatctgtgccacatggaggttttgggatgggatttgaacgctacctgcagtgcatcttgggtgttgacaatatcaaagatgttatccctttcccaaggtttcctcattcatgccttttatagctggaagattggttaaggaaaagcaccccccatggcagagacactgcacatgattgtgcatacagcagaatgcatgtttggattttagaaatgcagatttcaatatgtaattgttgtgccataagatatcatagaaaaaatataagtggttgtgattttcttagaaagttgagggtatttcacgtaaggatgagctcccgcaagaagaggtacttatagcaaggggactctcaaatccattacctcaattaagaaatgaagaaattgaattagtctcaaagtttcttttaaactctaaaacagaatgagataatgtattttacgttgtctataatcattaaatcactccctgtgtaatttgtgagaaccatctagtagctcgaaataaaataatgttgcatcttttctcccttgccatatactttgtgataaatccttatctcattttcagtacttcattaaacattgcagaaaaaaatat

SEQ ID NO: 109155 - DNA, 861 bp, Homo sapiens
  Payload ID: 1441
  Gene Symbol: NARS2
  Gene Name: asparaginyl-tRNA synthetase 2, mitochondrial (putative)
  ENST ID: ENST00000525345
  CDS Start-End: 1-319
ccccatcaaatataaagagaggcatcctctggagtatctgcgacaatatcctcactttaggtgtaggactaacgttctgggttctatattgaggattcgcagtgaagcgacagctgctattcattctttctttaaggacagtggctttgtacatattcatactccaataatcacatccaatgactctgagggagctggagaactttttcaacttgaaccttcaggcaaacttaaggtacctgaggagaatttcttcaatgttcctgctttcttaactgtctcaggacaacttcatctagaagtgatgtcagggttatagaggaactgttcaaggctacaacaatgatggttctctcaaaatgtcctgaagatgttgaactctgtcacaaattcatagcacctggccaaaaggacagattagaacatatgctaaaaaacaactttttaatcatttcttatactgaagcagtggagatcttaaagcaagcatcccagaacttcacctttaccccagagtggggtgctgacctacggactgaacatgaaaagtacctggtgaagcactgtggcaacatacctgtcttcgttattaattatccattaacactcaagcctttctacatgagggataatgaagatggccctcagcacacggttgctgctgttgatcttctggttcctggagttggggaactctttggaggaggcctcagagaagaacgataccatttcttagaggagcgcttagccagatcgggacttacagaagtctaccaatggtatctggaccttcgtcgatttggatctgtgccacatggaggttttgggatgggatttgaacgctacctgcagtgcatcttg

SEQ ID NO: 109156 - DNA, 3730 bp, Homo sapiens
  Payload ID: 1442
  Gene Symbol: ASPH
  Gene Name: aspartate beta-hydroxylase
  Uniprot ID: Q12797
  ENST ID: ENST00000356457
  CDS Start-End: 226-1167
agggagtcacaggttcgtacacgcgaggccgggcgcgcgcagccggcaggcgggtgaagtcttcccaggtgctgcaggcggtgctgaggcacagggtctgctgcaggagcagcggcccgaacccgctccagcggcccgccgccgccagcggttcccgcgtcgcgtgtgtacccccgcgcactgaaggaggtccgccagccctcaccagcccccgcggaccgtgcaatggcccagcgtaagaatgccaagagcagcggcaacagcagcagcagcggctccggcagcggtagcacgagtgcgggcagcagcagccccggggcccggagagagacaaagcatggaggacacaagaatgggaggaaaggcggactctcaggaacttcattcttcacgtggtttatggtgattgcattgctgggcgtctggacatctgtagctgtcgtttggtttgatcttgttgactatgaggaagttctaggaaaactaggaatctatgatgctgatggtgatggagattttgatgtggatgatgccaaagttttattaggacttaaagagagatctacttcagagccagcagtcccgccagaagaggctgagccacacactgagcccgaggagcaggttcctgtggaggcagaaccccagaatatcgaagatgaagcaaaagaacaaattcagtcccttctccatgaaatggtacacgcagaacatgttgagggagaagacttgcaacaagaagatggacccacaggagaaccacaacaagaggatgatgagtttcttatggcgactgatgtagatgatagatttgagaccctggaacctgaagtatctcatgaagaaaccgagcatagttaccacgtggaagagacagtttcacaagactgtaatcaggatatggaagagatgatgtctgagcaggaaaatccagattccagtgaaccagtagtagaagatgaaagattgcaccatgatacagatgatgtaacataccaagtctatgaggaacaagcagtatatgaacctctagaaaatgaagggatagaaatcacagaagtaactgctccccctgaggataatcctgtagaagattcacaggtaattgtagaagaagtaagcatttttcctgtggaagaacagcaggaagtaccaccagatacttaaagcttcaaaaagactgcccctaccaccacaggaggaccagcctaaccatacgctccaaaagatggctgtgatagatcttgtgaagcaattactgagcagatcaagatctttgggaaggaacactaaagatgttttgaatgaattatagtccactggcattttagtgtatttttttttctttttagaaacacacatttctaaaaatgtcatgttacattcctgcatgtcccttttgatagcattagtggatccattggatttcttttttctttttgtgagacagcttttagtcttacctgaatttatgtgtgtttttccgacagtggttaataattatattggtgatgtagcagcaattgtgttggcagggttttcatatattattagtaattaacactaactgttggactgacttgtgtacactgtgttaaacatgatttaaaagctattaagagtactttgtgttagcactcttaaaaacgctaacagagatcatcattagctgtgaagatttgagttgtatatacctgcactgatattcttatcaaaaatttctacattagctttaagtgttcagattaacacttttgaaatttttgtagcttttagctgattaattagaaaaatttaatatttcagtgaaagttttaaattatcatttatttatttttttaaatgagaggggaaagctgaaattccttgttaagacacaaggaaaaagaatggccctactattatcatgcaaaaatgctttgttggcacctcagattaatcatataatagctatagtctcttcagcatttgtttaaattttagaaaacctgtataaattactggtgcataacttaaagattattctgcctttggctaattgagtaattcccctccagcactagagaccgctcagtgctcttactagatgaactcagtaacgccttgagctgggttgattgaggatgtgtgaaaagctcacagagcccgatgcctgctgctatttcacggcaatgagcctttttctttctacactgaagattttcttcttatttaatgtggtttattttgggctcagaaataattgctctgttgaaaataatcctttgtcagaaaagaaggtagctaccacatcattttgaaaggaccatgagcaactataagcaaagccataagaagtggtttgatcgatatattaggggtagctcttgattttgttaacattaagataaggtgactttttccccctgcttttaggattaaaatcaaagatacttctatatttttatcactatagatcatagttattatacaatgtagtgagtcctgcatgggtactcgatgtgtaatgaaacctgaaataataagataataagaaaagcaataattttctaaagctgtgctgtcggtgatacagagatgatactcaaattataataaaactcttcattttgtgaattatagaagctactttttataaagccatatttttttagggaaactaaggagtgacatagaactgatgaatgagtaaaagtaagttttgctggatttttgtagaactctggacgttgaggattcattatgctgtggttaactttaaatatttttgaattccaaatatctgaattaatgagccttgtctttacaaatatgtgccattgtgcaacatcggtggattttctaaaaataatgtaaatgtcttctattaaatgttgagtgcaataaaatacagaagaattctctatattgtcattatttttgaagtataaggtatttttaatttgttacataataaaatcagttcattttatccttactagtattttagaagattatagcatttttgataactaaaatcacaaaggaataccttcagccagttaacgtatttctaacagataatgcttattttgcatttactatcatgctacattgccaggaagcaagattaaaattaaatagcccctgcagccatcctttgtagattttgtcctgcacctagaagttttgattattccctggacagcctgctccaccttttttccccaaatttttaatttttgtgagtatataatagatgtataaatttgactatatgagatatttcgatacagatatagaaaatgtacaataaattattgttggctatagtaactctgttttgctatcaaatactagatcttattcattgtatataactatatttttgtacccattaaccatcttcacctcctgctcccctctcccctcactacccttcccaacctctggtaaccatccttctaccctctacctctgtgagttcaattgttttaatttttagcacccacaaattagtgagaacatgtgatgtttatctttctgtgcctggcttatttcacctaacataatgacctccagttccatccatgttgtttcaaatggcaggatcttattcttttttatggctgagtagtactccattatatatgtaccacattttcttcattcgtctgttgacagacccttaagttgattccaaagcttagctattgtaaatagtgcaataaacatgagagtgcgtaaattt

SEQ ID NO: 109157 - DNA, 1603 bp, Homo sapiens
  Payload ID: 1442
  Gene Symbol: ASPH
  Gene Name: aspartate beta-hydroxylase
  Uniprot ID: Q12797
  ENST ID: ENST00000379449
  CDS Start-End: 176-787
cgggtgaagtcttcccaggtgctgcaggcggtgctgaggcacagggtctgctgcaggagcagcggcccgaacccgctccagcggcccgccgccgccagcggttcccgcgtcgcgtgtgtacccccgcgcactgaaggaggtccgccagccctcaccagcccccgcggaccgtgcaatggcccagcgtaagaatgccaagagcagcggcaacagcagcagcagcggctccggcagcggtagcacgagtgcgggcagcagcagccccggggcccggagagagacaaagcatggaggacacaagaatgggaggaaaggcggactctcaggaacttcattcttcacgtggtttatggtgattgcattgctgggcgtctggacatctgtagctgtcgtttggtttgatcttgttgactatgaggaagttctagccaaagcaaaggacttccgttataacttatcagaggtgcttcaaggaaaactaggaatctatgatgctgatggtgatggagattttgatgtggatgatgccaaagttttattaggcctgaccaaagatggcagtaatgaaaatattgattctcttgaggaagtccttaatattttagcagaggaaagttcagattggttttatggtttcctctcatttctctatgatataatgactccttttgaaatgctagaagaagaagaagaagaaagcgaaaccgcagatggtgttgatggtacgtcacagaatgaaggggttcagggaaagacttgtgtcatattggatttacataaccagtaaccttgattcagggactgaagtcattggctaatgaacacctgaagcagcctcctttttcttttctttccttggcttatgcagggcttaatgtgcagtggggtggttgtgatcttaccgtgcaagtcaaccatgtgatcttgcccagtacagctactagctagtcccttgctcgctcagctcccccaacttctattgaagaaaatggtactcctcattcttgtagtcagctacaaagtacactgaaaatgatgttcttggtggtataattggtttctgtatcgttttgtttcaactcatgtattcactgaactaaatttggacacttaacagcaaattgtgttgtggttaacccttgatgcttgtctttctaacacactattaattatgatgattctaatggatttcattataaaaatatttctggcatgatttttaagttaaatgcttctctgttctttaacatgactgatgtataaaatgatggttctttactaagctgatattttttattgtaatttgtttaggtttgtcagataggttcatacaaatttctatgtaaaattctgtgttaatggtgcttttaaaataatttaaaaataactccatgtttttgccttagagtaagttaacttactgttttcagatagtagcatgacatatttctgtctgtgaaagcaaaatttattttaaattttatttccaaatatacatccagagaaagtaatttgtattttttttaaagtaggcatattacacaagagggaacatgtgaatatgtatcttaatgttgtacatattaaaattattcatcctaaa

SEQ ID NO: 109158 - DNA, 5268 bp, Homo sapiens
  Payload ID: 1442
  Gene Symbol: ASPH
  Gene Name: aspartate beta-hydroxylase
  Uniprot ID: Q12797
  ENST ID: ENST00000379454
  CDS Start-End: 189-2465
cgcagccggcaggcgggtgaagtcttcccaggtgctgcaggcggtgctgaggcacagggtctgctgcaggagcagcggcccgaacccgctccagcggcccgccgccgccagcggttcccgcgtcgcgtgtgtacccccgcgcactgaaggaggtccgccagccctcaccagcccccgcggaccgtgcaatggcccagcgtaagaatgccaagagcagcggcaacagcagcagcagcggctccggcagcggtagcacgagtgcgggcagcagcagccccggggcccggagagagacaaagcatggaggacacaagaatgggaggaaaggcggactctcaggaacttcattcttcacgtggtttatggtgattgcattgctgggcgtctggacatctgtagctgtcgtttggtttgatcttgttgactatgaggaagttctaggaaaactaggaatctatgatgctgatggtgatggagattttgatgtggatgatgccaaagttttattaggacttaaagagagatctacttcagagccagcagtcccgccagaagaggctgagccacacactgagcccgaggagcaggttcctgtggaggcagaaccccagaatatcgaagatgaagcaaaagaacaaattcagtcccttctccatgaaatggtacacgcagaacatgttgagggagaagacttgcaacaagaagatggacccacaggagaaccacaacaagaggatgatgagtttcttatggcgactgatgtagatgatagatttgagaccctggaacctgaagtatctcatgaagaaaccgagcatagttaccacgtggaagagacagtttcacaagactgtaatcaggatatggaagagatgatgtctgagcaggaaaatccagattccagtgaaccagtagtagaagatgaaagattgcaccatgatacagatgatgtaacataccaagtctatgaggaacaagcagtatatgaacctctagaaaatgaagggatagaaatcacagaagtaactgctccccctgaggataatcctgtagaagattcacaggtaattgtagaagaagtaagcatttttcctgtggaagaacagcaggaagtaccaccagaaacaaatagaaaaacagatgatccagaacaaaaagcaaaagttaagaaaaagaagcctaaacttttaaataaatttgataagactattaaagctgaacttgatgctgcagaaaaactccgtaaaaggggaaaaattgaggaagcagtgaatgcatttaaagaactagtacgcaaataccctcagagtccacgagcaagatatgggaaggcgcagtgtgaggatgatttggctgagaagaggagaagtaatgaggtgctacgtggagccatcgagacctaccaagaggtggccagcctacctgatgtccctgcagacctgctgaagctgagtttgaagcgtcgctcagacaggcaacaatttctaggtcatatgagaggttccctgcttaccctgcagagattagttcaactatttcccaatgatacttccttaaaaaatgaccttggcgtgggatacctcttgataggagataatgacaatgcaaagaaagtttatgaagaggtgctgagtgtgacacctaatgatggctttgctaaagtccattatggcttcatcctgaaggcacagaacaaaattgctgagagcatcccatatttaaaggaaggaatagaatccggagatcctggcactgatgatgggagattttatttccacctgggggatgccatgcagagggttgggaacaaagaggcatataagtggtatgagcttgggcacaagagaggacactttgcatctgtctggcaacgctcactctacaatgtgaatggactgaaagcacagccttggtggaccccaaaagaaacgggctacacagagttagtaaagtctttagaaagaaactggaagttaatccgagatgaaggccttgcagtgatggataaagccaaaggtctcttcctgcctgaggatgaaaacctgagggaaaaaggggactggagccagttcacgctgtggcagcaaggaagaagaaatgaaaatgcctgcaaaggagctcctaaaacctgtaccttactagaaaagttccccgagacaacaggatgcagaagaggacagatcaaatattccatcatgcaccccgggactcacgtgtggccgcacacagggcccacaaactgcaggctccgaatgcacctgggcttggtgattcccaaggaaggctgcaagattcgatgtgccaacgagaccaagacctgggaggaaggcaaggtgctcatctttgatgactcctttgagcacgaggtatggcaggatgcctcatctttccggctgatattcatcgtggatgtgtggcatccggaactgacaccacagcagagacgcagccttccagcaatttagcatgaattcatgcaagcttgggaaactctggagagaggctgcctttctggttccatctccttgggtgtgaggatagaatttcgaacaccaagagtcaattcccttgacttgcagcccgagtaattcaaagcctcctcctagggtcagaagacactaaagggaatatttgcctcgctgcaattcatttaggaaacaccctgctgtgtgtcatctcatgacagcactggtcttctgccagtatttaaggtgaacatttgatagcttctaccttaccagccaaagatattttttccacatagaataggtctaattcaatgtataatgagaacatatgtagaaactgtgaatggattgctttagtttgtaatttttctatgcagttatatttttctagtgtagctagactattttgtcatcatgtaccactacatttttgtttattttaatgacaagctgtataaatgctttacttctagctatttaatggtagcattactggggaactcagacttccctcttttaattcttcttagtaaaagatactcatgaaaaaagcagttttattttcctaacaaaaaagaaagagctcattatgtcagtgtctatgaactgtacccatcccaactctcaaatcgtttggttttttttatcttgattgagatcctcttctcactatgctagtggtggagatattgacaaaatcctatttctttcaaagaggaacttttcacaccgaaaaaagagcatggaattattttatattgttataaaaatcccagatgcaaatttttttaatgccaattattagagcttctggggaaaaagtatagttcacggaaataaaactatgttctttcagggttgggtggataggtggctgctagggtgtctggctcctggcggctttgccatccatgaggcaagggctgggaacacagtgtctttgcctatggtagatccatgtgaatgtcaggaagccagctcttcagtcttggagatgatttctgctacaattctgtagaaagattaaggatggcagagtaaaaggttaccaagaatgccaggatgtttttcttgggcgtaggaggtccagattactttcctttttgatgaaagagtttggaagactgtcccatctctctggcttgagaaatctctgccattttaaacatcactgtgaaatagcaattattatcatctgtatttagttttaacattacccacaacatagaaataataggtaaaaatcgtcttgcctactcattccaaagatgatcaagtcattaatctagcaaagtattcatgtatcagattttgtatattttgaatcaaagctaactaggaatgttagatataagaatgtaatgatattcatgcactgaattctaagccaatatgaacaaaaatgctgcatgaatggcacatataggtcaccaaagttcattcacaggtagaaaaaacttgtgctttcttttccatctaaaaacaaaaggagactttctttatctcatttaaagaacagctctttgaaattgaaattgaccctttttgcttgaccttaaggagattagcttccagtagatgagtttgcaaaatacttttcctgttcttttgttttgctggtattgaaaacatcccactaaatcagatgaagaggcatgggaggaaaaatatccaaattaattactaaaatcgagaagagaaggcaaactcttgaaaagtaaaaaggtgtttgtgaccttcagtatttattgaacagaggaaataactgacaagggcaatacaattcaatgttcatgtagtaacattcatgtcacttgttgaatttggttctcatatgtatattgcatacacataaattcaaactataagtcgtcatttttgagccatcatcttacattcatgtaatgaaattatggaagagagtaaaaactagctcttaacttagtaaatataatatggtatttaaaatcaggtcactacagtaaggttctaagtattgccaattgaaaagctagaaatggtattactgttgcaaagtgttgtcaataattgactccaatagcattgtaaatacttgtatcccacaactattttaaacccaagcaataaaatggattttctaattcacttcaattctttatttctcttacctatctatgtcttggtacataagaaaagtgtttccatcactgcattggtagaattatttcagtgttattatttttgtgatttcgtatgtctacacaaaaatgaattagtttaatttatattgtgatacagttgtttgagaaatatttttaattctgtttcaactttatttctccaagtgtataatataaaaattacttctgttattgttctctaccaataggggaaaaaattaaaacattagatccattgagaaagagatgatgtaataaataattaagattagtaataatattatcaggggtgattatgaccagttgaataatctctttcccttgaattatttagctaacaaattaactctcccaaatatttaaaataatgtaaaatcatattttactgcccattattaactaaaatatttttgtttgactttgagcaccaactggtaatactaataaatacccatgtcatgcagatggctgggcgaataagagatgtctaaaaatatgcactggtcttggaaaacatggcacaagtaaggatatcatatatgatgtctgtttattttatgtctgatttcttttgaatgagtagttggggactccatttctaaggagactaggtaaataaaatgacctttgacatttca

SEQ ID NO: 109159 - DNA, 1290 bp, Homo sapiens
  Payload ID: 1442
  Gene Symbol: ASPH
  Gene Name: aspartate beta-hydroxylase
  Uniprot ID: Q12797
  ENST ID: ENST00000389204
  CDS Start-End: 87-764
ctaaaacctgccagcagtacttttgagtttttttttttgttttgttttactttagcatttattattcatggattgaagaaatcaaaatggctgaagataaagagacaaagcatggaggacacaagaatgggaggaaaggcggactctcaggaacttcattcttcacgtggtttatggtgattgcattgctgggcgtctggacatctgtagctgtcgtttggtttgatcttgttgactatgaggaagttctagccaaagcaaaggacttccgttataacttatcagaggtgcttcaaggaaaactaggaatctatgatgctgatggtgatggagattttgatgtggatgatgccaaagttttattagaaggacccagtggggtagccaagagaaaaactaaggctaaagttaaagaactcactaaagaagagctcaagaaggagaaagagaaacctgagtcaaggaaggaaagtaagaatgaagagagaaaaaaggggaagaaagaggatgtccgaaaggataagaaaattgctgatgcagacctatccaggaaggagtctcctaagggtaaaaaggacagagaaaaagagaaagtggacctagaaaaaagtgctaaaaccaaggaaaataggaaaaaatcaacaaatatgaaggatgtttctagtaaaatggcatcccgagacaaagatgacagaaaggaaagtagaagttctaccagatatgcacacttaacaaagggaaatacccagaaaagaaacggctaaagctctggcatcatcatcccagaacatggtcatgttccagattgcagtttgttacaaaaaagcatggaaaatgtaatattgctctgattggtgagggtgtgtaaattagccattgaatgtatcattggtgcttagcaagtaaattacctgaaatttaaatataccgtctcatacttctaaatgtaaaaacattttaaaaatgtcatagaatatgatgtaataacttctatttattgatcatgtattcagataaatgtatatgtatcatgaatttttatggattaatatattgaatactttcattgacgttaaataagaatattaagattttaaatgttatttctgtgcataatgccttgtaactttttcaagtatgctaaatactcagggagatggatttgctcgttgttttcttccctccttccccttcctgcttccctgtttttctctttcgtggacacctccccaggctcatgtgccaccaccttccctcctctccagccctcccagccctcccgcagccttt

SEQ ID NO: 109160 - DNA, 3717 bp, Homo sapiens
  Payload ID: 1442
  Gene Symbol: ASPH
  Gene Name: aspartate beta-hydroxylase
  ENST ID: ENST00000445642
  CDS Start-End: 270-1154
ggggcgtggccgtcgggcggcgagccgcgcgctctcgccccgggagggagtcacaggttcgtacacgcgaggccgggcgcgcgcagccggcaggcgggtgaagtcttcccaggtgctgcaggcggtgctgaggcacagggtctgctgcaggagcagcggcccgaacccgctccagcggcccgccgccgccagcggttcccgcgtcgcgtgtgtacccccgcgcactgaaggaggtccgccagccctcaccagcccccgcggaccgtgcaatggcccagcgtaagaatgccaagagcagcggcaacagcagcagcagcggctccggcagcggtagcacgagtgcgggcagcagcagccccggggcccggagagagacaaagcatggaggacacaagaatgggaggaaaggcggactctcaggaacttcattcttcacgtggtttatggtgattgcattgctgggcgtctggacatctgtagctgtcgtttggtttgatcttgttgactatgaggaagttctaggaaaactaggaatctatgatgctgatggtgatggagattttgatgtggatgatgccaaagttttattaggacttaaagagagatctacttcagagccagcagtcccgccagaagaggctgagccacacactgagcccgaggagcaggttcctgtggaggcagaaccccagaatatcgaagatgaagcaaaagaacaaattcagtcccttctccatgaaatggtacacgcagaacatgttgagggagaagacttgcaacaagaagatggacccacaggagaaccacaacaagaggatgatgagtttcttatggcgactgatgtagatgatagatttgagaccctggaacctgaagtatctcatgaagaaaccgagcatagttaccacgtggaagagacagattccagtgaaccagtagtagaagatgaaagattgcaccatgatacagatgatgtaacataccaagtctatgaggaacaagcagtatatgaacctctagaaaatgaagggatagaaatcacagaagtaactgctccccctgaggataatcctgtagaagattcacaggtaattgtagaagaagtaagcatttttcctgtggaagaacagcaggaagtaccaccagatacttaaagcttcaaaaagactgcccctaccaccacaggaggaccagcctaaccatacgctccaaaagatggctgtgatagatcttgtgaagcaattactgagcagatcaagatctttgggaaggaacactaaagatgttttgaatgaattatagtccactggcattttagtgtatttttttttctttttagaaacacacatttctaaaaatgtcatgttacattcctgcatgtcccttttgatagcattagtggatccattggatttcttttttctttttgtgagacagcttttagtcttacctgaatttatgtgtgtttttccgacagtggttaataattatattggtgatgtagcagcaattgtgttggcagggttttcatatattattagtaattaacactaactgttggactgacttgtgtacactgtgttaaacatgatttaaaagctattaagagtactttgtgttagcactcttaaaaacgctaacagagatcatcattagctgtgaagatttgagttgtatatacctgcactgatattcttatcaaaaatttctacattagctttaagtgttcagattaacacttttgaaatttttgtagcttttagctgattaattagaaaaatttaatatttcagtgaaagttttaaattatcatttatttatttttttaaatgagaggggaaagctgaaattccttgttaagacacaaggaaaaagaatggccctactattatcatgcaaaaatgctttgttggcacctcagattaatcatataatagctatagtctcttcagcatttgtttaaattttagaaaacctgtataaattactggtgcataacttaaagattattctgcctttggctaattgagtaattcccctccagcactagagaccgctcagtgctcttactagatgaactcagtaacgccttgagctgggttgattgaggatgtgtgaaaagctcacagagcccgatgcctgctgctatttcacggcaatgagcctttttctttctacactgaagattttcttcttatttaatgtggtttattttgggctcagaaataattgctctgttgaaaataatcctttgtcagaaaagaaggtagctaccacatcattttgaaaggaccatgagcaactataagcaaagccataagaagtggtttgatcgatatattaggggtagctcttgattttgttaacattaagataaggtgactttttccccctgcttttaggattaaaatcaaagatacttctatatttttatcactatagatcatagttattatacaatgtagtgagtcctgcatgggtactcgatgtgtaatgaaacctgaaataataagataataagaaaagcaataattttctaaagctgtgctgtcggtgatacagagatgatactcaaattataataaaactcttcattttgtgaattatagaagctactttttataaagccatatttttttagggaaactaaggagtgacatagaactgatgaatgagtaaaagtaagttttgctggatttttgtagaactctggacgttgaggattcattatgctgtggttaactttaaatatttttgaattccaaatatctgaattaatgagccttgtctttacaaatatgtgccattgtgcaacatcggtggattttctaaaaataatgtaaatgtcttctattaaatgttgagtgcaataaaatacagaagaattctctatattgtcattatttttgaagtataaggtatttttaatttgttacataataaaatcagttcattttatccttactagtattttagaagattatagcatttttgataactaaaatcacaaaggaataccttcagccagttaacgtatttctaacagataatgcttattttgcatttactatcatgctacattgccaggaagcaagattaaaattaaatagcccctgcagccatcctttgtagattttgtcctgcacctagaagttttgattattccctggacagcctgctccaccttttttccccaaatttttaatttttgtgagtatataatagatgtataaatttgactatatgagatatttcgatacagatatagaaaatgtacaataaattattgttggctatagtaactctgttttgctatcaaatactagatcttattcattgtatataactatatttttgtacccattaaccatcttcacctcctgctcccctctcccctcactacccttcccaacctctggtaaccatccttctaccctctacctctgtgagttcaattgttttaatttttagcacccacaaattagtgagaacatgtgatgtttatctttctgtgcctggcttatttcacctaacataatgacctccagttccatccatgttgtttcaaatggcaggatcttattcttttttatggctgagtagtactccattatatatgtaccacattttcttcattcgtctgttgacagacccttaagttgattccaaagcttagctattgtaaatagtgcaataaacatgagagtgcgtaaattt

SEQ ID NO: 109161 - DNA, 2874 bp, Homo sapiens
  Payload ID: 1442
  Gene Symbol: ASPH
  Gene Name: aspartate beta-hydroxylase
  ENST ID: ENST00000519234
  CDS Start-End: 155-1138
ctgcaggcggtgctgaggcacagggtctgctgcaggagcagcggcccgaacccgctccagcggcccgccgccgccagcggttcccgcgtcgcgtgtgtacccccgcgcactgaaggaggtccgccagccctcaccagcccccgcggaccgtgcaatggcccagcgtaagaatgccaagagcagcggcaacagcagcagcagcggctccggcagcggtagcacgagtgcgggcagcagcagccccggggcccggagagagacaaagcatggaggacacaagaatgggaggaaaggcggactctcaggaacttcattcttcacgtggtttatggtgattgcattgctgggcgtctggacatctgtagctgtcgtttggtttgatcttgttgactatgaggaagttctagccaaagcaaaggacttccgttataacttatcagaggtgcttcaaggaaaactaggaatctatgatgctgatggtgatggagattttgatgtggatgatgccaaagttttattaggacttaaagagagatctacttcagagccagcagtcccgccagaagaggctgagccacacactgagcccgaggagcaggttcctgtggaggcagaaccccagaatatcgaagatgaagcaaaagaacaaattcagtcccttctccatgaaatggtacacgcagaacatgttgagggagaagacttgcaacaagaagatggacccacaggagaaccacaacaagaggatgatgagtttcttatggcgactgatgtagatgatagatttgagaccctggaacctgaagtatctcatgaagaaaccgagcatagttaccacgtggaagagacagtttcacaagactgtaatcaggatatggaagagatgatgtctgagcaggaaaatccagattccagtgaaccagtagtagaagatgaaagattgcaccatgatacagatgatgtaacataccaagtctatgaggaacaagtatatgaacctctagaaaatgaagggatagaaatcacagaagtaactgctccccctgaggataatcctgtagaagattcacaggtaattgtagaagaagtaagcatttttcctgtggaagaacagcaggaagtaccaccagatacttaaagcttcaaaaagactgcccctaccaccacaggaggaccagcctaaccatacgctccaaaagatggctgtgatagatcttgtgaagcaattactgagcagatcaagatctttgggaaggaacactaaagatgttttgaatgaattatagtccactggcattttagtgtatttttttttctttttagaaacacacatttctaaaaatgtcatgttacattcctgcatgtcccttttgatagcattagtggatccattggatttcttttttctttttgtgagacagcttttagtcttacctgaatttatgtgtgtttttccgacagtggttaataattatattggtgatgtagcagcaattgtgttggcagggttttcatatattattagtaattaacactaactgttggactgacttgtgtacactgtgttaaacatgatttaaaagctattaagagtactttgtgttagcactcttaaaaacgctaacagagatcatcattagctgtgaagatttgagttgtatatacctgcactgatattcttatcaaaaatttctacattagctttaagtgttcagattaacacttttgaaatttttgtagcttttagctgattaattagaaaaatttaatatttcagtgaaagttttaaattatcatttatttatttttttaaatgagaggggaaagctgaaattccttgttaagacacaaggaaaaagaatggccctactattatcatgcaaaaatgctttgttggcacctcagattaatcatataatagctatagtctcttcagcatttgtttaaattttagaaaacctgtataaattactggtgcataacttaaagattattctgcctttggctaattgagtaattcccctccagcactagagaccgctcagtgctcttactagatgaactcagtaacgccttgagctgggttgattgaggatgtgtgaaaagctcacagagcccgatgcctgctgctatttcacggcaatgagcctttttctttctacactgaagattttcttcttatttaatgtggtttattttgggctcagaaataattgctctgttgaaaataatcctttgtcagaaaagaaggtagctaccacatcattttgaaaggaccatgagcaactataagcaaagccataagaagtggtttgatcgatatattaggggtagctcttgattttgttaacattaagataaggtgactttttccccctgcttttaggattaaaatcaaagatacttctatatttttatcactatagatcatagttattatacaatgtagtgagtcctgcatgggtactcgatgtgtaatgaaacctgaaataataagataataagaaaagcaataattttctaaagctgtgctgtcggtgatacagagatgatactcaaattataataaaactcttcattttgtgaattatagaagctactttttataaagccatatttttttagggaaactaaggagtgacatagaactgatgaatgagtaaaagtaagttttgctggatttttgtagaactctggacgttgaggattcattatgctgtggttaactttaaatatttttgaattccaaatatctgaattaatgagccttgtctttacaaatatgtgccattgtgcaacatcggtggattttctaaaaataatgtaaatgtcttctattaaatgttgagtgcaataaaatacagaagaattctc

SEQ ID NO: 109162 - DNA, 755 bp, Homo sapiens
  Payload ID: 1442
  Gene Symbol: ASPH
  Gene Name: aspartate beta-hydroxylase
  ENST ID: ENST00000518306
  CDS Start-End: 162-755
tttcagttctagaggcccttacagtgcagggattggccagtctcaagctctggtaggcaagtgcatgcagtgtgcctaaaacctgccagcagtacttttgagtttttttttttgttttgttttactttagcatttattattcatggattgaagaaatcaaaatggctgaagataaagagacaaagcatggaggacacaagaatgggaggaaaggcggactctcaggaacttcattcttcacgtggtttatggtgattgcattgctgggcgtctggacatctgtagctgtcgtttggtttgatcttgttgactatgaggaagttctaggaaaactaggaatctatgatgctgatggtgatggagattttgatgtggatgatgccaaagttttattaggacttaaagagagatctacttcagagccagcagtcccgccagaagaggctgagccacacactgagcccgaggagcaggttcctgtggaggcagaaccccagaatatcgaagatgaagcaaaagaacaaattcagtcccttctccatgaaatggtacacgcagaacatgaaaccgagcatagttaccacgtggaagagacagattccagtgaaccagtagtagaagatgaaagattgcaccatgatacagatgatgtaacataccaagtctatgaggaacaagcagtatatgaacctctagaaaatgaagggatagaaatcacagaagtaactgctccccctgaggataatcctgtagaa

SEQ ID NO: 109163 - DNA, 809 bp, Homo sapiens
  Payload ID: 1442
  Gene Symbol: ASPH
  Gene Name: aspartate beta-hydroxylase
  ENST ID: ENST00000517661
  CDS Start-End: 88-612
cctaaaacctgccagcagtacttttgagtttttttttttgttttgttttactttagcatttattattcatggattgaagaaatcaaaatggctgaagataaagagacaaagcatggaggacacaagaatgggaggaaaggcggactctcaggaacttcattcttcacgtggtttatggtgattgcattgctgggcgtctggacatctgtagctgtcgtttggtttgatcttgttgactatgaggaagttctagccaaagcaaaggacttccgttataacttatcagaggtgcttcaaggaaaactaggaatctatgatgctgatggtgatggagattttgatgtggatgatgccaaagttttattaggcctgaccaaagatggcagtaatgaaaatattgattctcttgaggaagtccttaatattttagcagaggaaagttcagattggttttatggtttcctctcatttctctatgatataatgactccttttgaaatgctagaagaagaagaagaagaaagcgaaaccgcagatggtgttgatggtacgtcacagaatgaaggggttcagggaaagacttgtgtcatattggatttacataaccagtaaccttgattcagggactgaagtcattggctaatgaacacctgaagcagcctcctttttcttttctttccttggcttatgcagggcttaatgtgcagtggggtggttgtgatcttaccgtgcaagtcaaccatgtgatcttgcccagtacagctactagctagtcccttgctcgctcagctcccccaacttctattgaa

SEQ ID NO: 109164 - DNA, 1258 bp, Homo sapiens
  Payload ID: 1442
  Gene Symbol: ASPH
  Gene Name: aspartate beta-hydroxylase
  Uniprot ID: Q12797
  ENST ID: ENST00000522835
  CDS Start-End: 125-895
cagtctcaagctctggtaggcaagtgcatgcagtgtgcctaaaacctgccagcagtacttttgagtttttttttttgttttgttttactttagcatttattattcatggattgaagaaatcaaaatggctgaagataaagagacaaagcatggaggacacaagaatgggaggaaaggcggactctcaggaacttcattcttcacgtggtttatggtgattgcattgctgggcgtctggacatctgtagctgtcgtttggtttgatcttgttgactatgaggaagttctagccaaagcaaaggacttccgttataacttatcagaggtgcttcaaggaaaactaggaatctatgatgctgatggtgatggagattttgatgtggatgatgccaaagttttattaggacttaaagagagatctacttcagagccagcagtcccgccagaagaggctgagccacacactgagcccgaggagcaggttcctgtggaggcagaaccccagaatatcgaagatgaagcaaaagaacaaattcagtcccttctccatgaaatggtacacgcagaacatgaaaccgagcatagttaccacgtggaagagacagtttcacaagactgtaatcaggatatggaagagatgatgtctgagcaggaaaatccagattccagtgaaccagtagtagaagatgaaagattgcaccatgatacagatgatgtaacataccaagtctatgaggaacaagcagtatatgaacctctagaaaatgaagggatagaaatcacagaagtaactgctccccctgaggataatcctgtagaagattcacaggtaattgtagaagaagtaagcatttttcctgtggaagaacagcaggaagtaccaccagatacttaaagcttcaaaaagactgcccctaccaccacaggaggaccagcctaaccatacgctccaaaagatggctgtgatagatcttgtgaagcaattactgagcagatcaagatctttgggaaggaacactaaagatgttttgaatgaattatagtccactggcattttagtgtatttttttttctttttagaaacacacatttctaaaaatgtcatgttacattcctgcatgtcccttttgatagcattagtggatccattggatttcttttttctttttgtgagacagcttttagtcttacctgaatttatgtgtgtttttccgacagtggttaataattatattggtgatgtagcagcaattgtgtt

SEQ ID NO: 109165 - DNA, 2744 bp, Homo sapiens
  Payload ID: 1442
  Gene Symbol: ASPH
  Gene Name: aspartate beta-hydroxylase
  Uniprot ID: Q12797
  ENST ID: ENST00000518068
  CDS Start-End: 198-1010
ccgggcgcgcgcagccggcaggcgggtgaagtcttcccaggtgctgcaggcggtgctgaggcacagggtctgctgcaggagcagcggcccgaacccgctccagcggcccgccgccgccagcggttcccgcgtcgcgtgtgtacccccgcgcactgaaggaggtccgccagccctcaccagcccccgcggaccgtgcaatggcccagcgtaagaatgccaagagcagcggcaacagcagcagcagcggctccggcagcggtagcacgagtgcgggcagcagcagccccggggcccggagagagacaaagcatggaggacacaagaatgggaggaaaggcggactctcaggaacttcattcttcacgtggtttatggtgattgcattgctgggcgtctggacatctgtagctgtcgtttggtttgatcttgttgactatgaggaagttctaggaaaactaggaatctatgatgctgatggtgatggagattttgatgtggatgatgccaaagttttattaggacttaaagagagatctacttcagagccagcagtcccgccagaagaggctgagccacacactgagcccgaggagcaggttcctgtggaggcagaaccccagaatatcgaagatgaagcaaaagaacaaattcagtcccttctccatgaaatggtacacgcagaacatgaaaccgagcatagttaccacgtggaagagacagtttcacaagactgtaatcaggatatggaagagatgatgtctgagcaggaaaatccagattccagtgaaccagtagtagaagatgaaagattgcaccatgatacagatgatgtaacataccaagtctatgaggaacaagcagtatatgaacctctagaaaatgaagggatagaaatcacagaagtaactgctccccctgaggataatcctgtagaagattcacaggtaattgtagaagaagtaagcatttttcctgtggaagaacagcaggaagtaccaccagatacttaaagcttcaaaaagactgcccctaccaccacaggaggaccagcctaaccatacgctccaaaagatggctgtgatagatcttgtgaagcaattactgagcagatcaagatctttgggaaggaacactaaagatgttttgaatgaattatagtccactggcattttagtgtatttttttttctttttagaaacacacatttctaaaaatgtcatgttacattcctgcatgtcccttttgatagcattagtggatccattggatttcttttttctttttgtgagacagcttttagtcttacctgaatttatgtgtgtttttccgacagtggttaataattatattggtgatgtagcagcaattgtgttggcagggttttcatatattattagtaattaacactaactgttggactgacttgtgtacactgtgttaaacatgatttaaaagctattaagagtactttgtgttagcactcttaaaaacgctaacagagatcatcattagctgtgaagatttgagttgtatatacctgcactgatattcttatcaaaaatttctacattagctttaagtgttcagattaacacttttgaaatttttgtagcttttagctgattaattagaaaaatttaatatttcagtgaaagttttaaattatcatttatttatttttttaaatgagaggggaaagctgaaattccttgttaagacacaaggaaaaagaatggccctactattatcatgcaaaaatgctttgttggcacctcagattaatcatataatagctatagtctcttcagcatttgtttaaattttagaaaacctgtataaattactggtgcataacttaaagattattctgcctttggctaattgagtaattcccctccagcactagagaccgctcagtgctcttactagatgaactcagtaacgccttgagctgggttgattgaggatgtgtgaaaagctcacagagcccgatgcctgctgctatttcacggcaatgagcctttttctttctacactgaagattttcttcttatttaatgtggtttattttgggctcagaaataattgctctgttgaaaataatcctttgtcagaaaagaaggtagctaccacatcattttgaaaggaccatgagcaactataagcaaagccataagaagtggtttgatcgatatattaggggtagctcttgattttgttaacattaagataaggtgactttttccccctgcttttaggattaaaatcaaagatacttctatatttttatcactatagatcatagttattatacaatgtagtgagtcctgcatgggtactcgatgtgtaatgaaacctgaaataataagataataagaaaagcaataattttctaaagctgtgctgtcggtgatacagagatgatactcaaattataataaaactcttcattttgtgaattatagaagctactttttataaagccatatttttttagggaaactaaggagtgacatagaactgatgaatgagtaaaagtaagttttgctggatttttgtagaactctggacgttgaggattcattatgctgtggttaactttaaatatttttgaattccaaatatctgaattaatgagccttgtctttacaaatatgtgccattgtgcaacatcggtggattttctaaaaataatgtaaatgtcttctattaaatgttgagtgcaataaaatacagaagaattc

SEQ ID NO: 109166 - DNA, 531 bp, Homo sapiens
  Payload ID: 1442
  Gene Symbol: ASPH
  Gene Name: aspartate beta-hydroxylase
  ENST ID: ENST00000522349
  CDS Start-End: 124-531
agtctcaagctctggtaggcaagtgcatgcagtgtgcctaaaacctgccagcagtacttttgagtttttttttttgttttgttttactttagcatttattattcatggattgaagaaatcaaaatggctgaagataaagagacaaagcatggaggacacaagaatgggaggaaaggcggactctcaggaacttcattcttcacgtggtttatggtgattgcattgctgggcgtctggacatctgtagctgtcgtttggtttgatcttgttgactatgaggaagttctaggaaaactaggaatctatgatgctgatggtgatggagattttgatgtggatgatgccaaagttttattagttaagaaaaagaagcctaaacttttaaataaatttgataagactattaaagctgaacttgatgctgcagaaaaactccgtaaaaggggaaaaattgaggaagcagtgaatgcatttaaagaactagtacgcaaataccctcagagtccacgagcaagatatgggaaggcgcag

SEQ ID NO: 109167 - DNA, 6337 bp, Homo sapiens
  Payload ID: 1442
  Gene Symbol: ASPH
  Gene Name: aspartate beta-hydroxylase
  ENST ID: ENST00000517856
  CDS Start-End: 217-558
caggttcgtacacgcgaggccgggcgcgcgcagccggcaggcgggtgaagtcttcccaggtgctgcaggcggtgctgaggcacagggtctgctgcaggagcagcggcccgaacccgctccagcggcccgccgccgccagcggttcccgcgtcgcgtgtgtacccccgcgcactgaaggaggtccgccagccctcaccagcccccgcggaccgtgcaatggcccagcgtaagaatgccaagagcagcggcaacagcagcagcagcggctccggcagcggtagcacgagtgcgggcagcagcagccccggggcccggagagagacaaagcatggaggacacaagaatgggaggaaaggcggactctcaggaacttcattcttcacgtggtttatggtgattgcattgctgggcgtctggacatctgtagctgtcgtttggtttgatcttgttgactatgaggaagttctaggaaaactaggaatctatgatgctgatggtgatggagattttgatgtggatgatgccaaagttttattaggtaatttgcattgtatatagatgatcgtctcaaaatttcacaatgagagactgatgaaattgacataaatcaatcagcatgaacacttgaattaatccagaggactacttaagttaattctgtaggtggttgctttattgagaatattttgtattatgacctgcttagctatgcaagtttgtaacttcagaggtcctcataatgatacttggataataaagattccccatagacacttccattgaaaaagaaaagaagtaaacaagtgtcatttgtaatttgaaatgttttaagttaactgtcatgttactgtccatgaaatggatctggtgacttaggctctatctcctgacattgatttctttctcctgtgtcctcaattatttcttctcctgttaatgcccactggtaataattctcaaaatcgattgctcagaatattccattgtaaaatgcaccttggaaatggttgttttcctcatttgtaaattgaagacaatgcctattcctcaaggtggttgtgagaaccagtcaatgttgcatatgtgtaaacagccagcacatggttgggcattcagtttccctttatcattggtagaataagaatagtaatactcaaccaaaacgtctcagtcaggggttaaaaacttggaagcactgaaactgtgcttcctattcctacttaggtcaacagattgcaaaacaaatatttcagtcctttatcctttgtaatgaatgtgtctttgtgaaatgagtatagtggagcctgatttattctattgagatcattgagggggcaaatgcaaataattataaatgttgcacatgagtgaagccgtaagaatgcttaatttttaaaagaatattgtgacaacctgaaaacacaagatatgaaggctagaaaaaaagttatgaaataaactatagccttaagtatatggtacaatcgagaagcctaataaccagcctaattgtgaaaaacttatgtttgttttgtattcagaacacatttttccatagatgagattttatggtcttcagagattttttttttactctggtccacaaaaattgatttaattctaatatccatttctgcaactctcattgtaactatgtttctatggaaaatgcatttatcattctgccttgggatattaggaatatatttagttttacttctgaatgttctccagaatttctttggttacatccatggtgttaaatccattcagataccttacatggacaaaaatcatggattggctcacataattgtaaagcccaggagtagttttggcttttttcttttgttatgctggatctaggtgcttgaacagtgttctcaacatccatctgtctatggaccctcaggaatgttggctttcttctcgggcagagtctcgtgtgctcatcttcaaccctactccttatggggtgggagataagaaagctgtgattggtgacaccctgggatatgtgagtgcccacttttaaactgttgggtaaagaaaaattggagtcctctaaggaagttagtgtgtttttaccagaaggaggaggaattgatgcactgaaagcaggcagatgatggagtttgtttcccctttttctacccatcccattcctacttctccccctgcccaaatacagagaggtgaatgggatgggccaaaataggtatttcaaaataagaagctgtggagctaaacattgggtactcatgggcataaagatggaaacaggagacactagaacttctagagaggggagagagggagggagacaagggttgaaaaactaactattggatactatgctcattacctgagtgatggaatcattcatattctaaatttcaatatcacgcaatatacccatgcagcaaacttgcacgtgctccttgaatctaaatagaagttgaagttatatttaaaaattaaaaaaaaaaaagctagggagaagagagagatctcattccaaacaattattggtcaacaatagttttagaccattgaaagaatataagagaatgttgacttgataataaatattgccatttagatgtcaggtgataaagtttattttgttgttaagctctctccattttgccccattcagtttaaaaggaaagtttttgtgtttaggaaactaaaggatgggtgatatgtagcagacccataaggttattttcatgaaaaacctagcttgggctaatctgaaagattcctcaataacagtctttggtgtcttatcctttcttctccatttgcctaagaatataattgtataagctggatgtttattccttggctatcgtttttacctaggaatcaatttctgcaagagctctgtaagccttacaaagcagaaagtcatccatttcttttttctttgttctcatttagtgcctcatttgatttcactttgtgtatctatttattgctccatgttaagtcaggtatgcatacatcatagaagtctgcctctcatttccatcttctttgccttatgtatcacttctcttgtgtcctattagagggagatgatctatgcttaaagctgttgggttatttttgataattatataacaccaacatgctgtgtctatagttcccatttattgattcaactaatatttctgagtatctacagcatgccgggactgggcaaggcatgggggatacaagagattgaggtggctgcaatccctccagtgaaatgctgcaaaataagcaaggggctgagagagaaagtaatgagactgaaacgattgtcagtacagcccactagtccctctgcctagaacgtgctcctgaatgtgctcctgctctgtgtggtgggctgcctttgtctctcccacgggacccagcccagtcatcacctctgcactcagacatctctgaccctcccaagtggctgcatcccacacactccagttatcgcactcatcaccttgcctcattcttggactttgctgccagactacgatttatctcgagcacctatcctagtaactgacactaataggcattcattgtttgtttattgaatggtgactatacaaaataaattatctaaaaatatttcaggtgtatatatactgttgaagaatattaggaagaagaaaaccgtgtgtgtgtgtttttgaagaacccaaaagattgttcagtaattgcagtgttttaactaccttggaagttacctgtgactggcagggaggggggtgtaaagattttttttagaagaaattaatgaaatggtaaatttttggaaaaatacttatttaaattatctcatttaattcttaaagcccttcttaggggtcctgttttgtcccctttttgcatttgtggaaaccaaaaagtgtagctgtggttaacactgagatagaattcaaatggaattcaaaggcatcctcttgtcccaggtgcctgaacttacacaccatgctgagttgcatgtccttgaactgtatttttcatgatgttaaagtgagtccactctcaccagtctttgttgagtcccttcattggtgctgaaaccaggctcttgggaaccttattggcagtgtttaattcttttgtaatttatgtctgtttgaaatctgtctgtccagcttgggttacttgaagatgctttgaatctggaatggctcttactgcatatcatggggcagctttgagtacctggtagtctcagaattttggtaagttccgagactgctgttggtatactgaggaagatctgtattcactgattacacaagccaggagcgacaacgaggattaacgtggttacctagtatgcatgcctttctggtgtattgattttccagaatatttctcaaatttcatatacctatgagccttattcttgggataaattgatttatactgctagactccttgcaattgaaacagtaccacttctgagcactcaccctgagcacagataaccatagctggagtaacctggattagtaaggacacgttttctttcatctgtacacctttgaattagtaaaccaaagattaaaacactaattttaaaaaactttttagctttttaatgggctaggtgtatgaaattgtatgaaacaaagtaagtttataattgtttcccaggttttgttgagggagtggcttgcttataactcttaggagaagtaaatcctttgtgttccctcaagtcacagcccttggatccagcatccagggcctttctgatatgcacacctctcttggtgcctcagtcacctttcttttccttggtgccaaatatgtgcccagttgaggaatttcgtacagtcacatgcctcatgctatcattttggttaaggatggactgcatgtatgatagtggtcccataagatcatagtgtcatatttatactgtaccttttctgtgtttagatacacaaacactttgtgttacaattgtctacagtattcggtacagtacgtgctgtacagttttgtagcctgggaacaataggatgttgcatacagtctaggtttgtggcaggctataccttctaagtttgcctgggcacactgcaatgttcccacagtggtaaaatttcctaatggcacatttcaacatgtatttccacacattcctcagaatgtatcgctgttgttaagcaacacatgactgaacttgcagttccctacccgaaacacacgtgtaacttacatagccacatccctgatttccttcagggtctgttcacatgttatcagtgagtccttttgccaaagtattatgaatagtccccacccccacttttccctaatgtgctccctgttctgtgtcttccccgtactatctgtccccatccaatatactctaaatagttcatgtttcttattttttaagtttctctctcccccggaaggtaggtgtgttgttttcatttactgtagaataatgccttgaattaataggtgctaaatatttgttgaacgattaaatacaacatacaatttagtaagtttacaactactgcatatttatggaaagaaatatattgattctttctcattatgggcagcagtgaataaagtaagctaatcctgggcttgggtatttgtgtcactcatatttgctatgagtggttgatttaaagtgctgatttcatttgcatttcatagcttcatctaattttaattaaaattggaggggcaattatatagtgattaaatgcaaatgttttataatttccaaatttatctgattaacctaaagaactaaaaccaaggtatgttttaagggaattaatgtgttttccaaatcatgttgtggccattgctgtggactggcagtatctattcaccatacataatgactggaaggcggctgtggacaccctgttcctcttggcagcacaggaatggaagtgggtcccagtcctgatgattaacactgaaaagggagactgctggtagcttctggaaaaaatttcctcaagcctaagaaagaagcagagcaagagatgctccttttgcttctggacatcgccttgtctgaaaaagaagcttgcagctggggagctctgattgccagcctgagggtgaagcttgacctgcgatgcagtcagccgcctccgcacttcttgtttagttagatgataaatttccttcctacccaaccattataagctggcagtttggtaactgcagccccaggaacatcgaaaccgacacatctcatgtcataacctaattttgaatatttatttcattgctacttcattgccacttgtacctcataataaatccatttttgaaaaccttt

SEQ ID NO: 109168 - DNA, 1947 bp, Homo sapiens
  Payload ID: 1442
  Gene Symbol: ASPH
  Gene Name: aspartate beta-hydroxylase
  Uniprot ID: Q12797
  ENST ID: ENST00000517847
  CDS Start-End: 81-980
cctgccagcagtacttttgagtttttttttttgttttgttttactttagcatttattattcatggattgaagaaatcaaaatggctgaagataaagagacaaagcatggaggacacaagaatgggaggaaaggcggactctcaggaacttcattcttcacgtggtttatggtgattgcattgctgggcgtctggacatctgtagctgtcgtttggtttgatcttgttgactatgaggaagttctagccaaagcaaaggacttccgttataacttatcagaggtgcttcaaggaaaactaggaatctatgatgctgatggtgatggagattttgatgtggatgatgccaaagttttattaggacttaaagagagatctacttcagagccagcagtcccgccagaagaggctgagccacacactgagcccgaggagcaggttcctgtggaggcagaaccccagaatatcgaagatgaagcaaaagaacaaattcagtcccttctccatgaaatggtacacgcagaacatgttgagggagaagacttgcaacaagaagatggacccacaggagaaccacaacaagaggatgatgagtttcttatggcgactgatgtagatgatagatttgagaccctggaacctgaagtatctcatgaagaaaccgagcatagttaccacgtggaagagacagtttcacaagactgtaatcaggatatggaagagatgatgtctgagcaggaaaatccagattccagtgaaccagtagtagaagatgaaagattgcaccatgatacagatgatgtaacataccaagtctatgaggaacaagcagtatatgaacctctagaaaatgaagggatagaaatcacagaagtaactgctccccctgaggataatcctgtagaagattcacaggtaattgtagaagaagtaagcatttttcctgtggaagaacagcaggaagtaccaccagatacttaaagcttcaaaaagactgcccctaccaccacaggaggaccagcctaaccatacgctccaaaagatggctgtgatagatcttgtgaagcaattactgagcagatcaagatctttgggaaggaacactaaagatgttttgaatgaattatagtccactggcattttagtgtatttttttttctttttagaaacacacatttctaaaaatgtcatgttacattcctgcatgtcccttttgatagcattagtggatccattggatttcttttttctttttgtgagacagcttttagtcttacctgaatttatgtgtgtttttccgacagtggttaataattatattggtgatgtagcagcaattgtgttggcagggttttcatatattattagtaattaacactaactgttggactgacttgtgtacactgtgttaaacatgatttaaaagctattaagagtactttgtgttagcactcttaaaaacgctaacagagatcatcattagctgtgaagatttgagttgtatatacctgcactgatattcttatcaaaaatttctacattagctttaagtgttcagattaacacttttgaaatttttgtagcttttagctgattaattagaaaaatttaatatttcagtgaaagttttaaattatcatttatttatttttttaaatgagaggggaaagctgaaattccttgttaagacacaaggaaaaagaatggccctactattatcatgcaaaaatgctttgttggcacctcagattaatcatataatagctatagtctcttcagcatttgtttaaattttagaaaacctgtataaattactggtgcataacttaaagattattctgcctttggctaattgagtaattcccctccagcactagagaccgctcagtgctcttactagatgaactcagtaacgccttgagctgggttgattgaggatgtgtgaaaa

SEQ ID NO: 109169 - DNA, 2658 bp, Homo sapiens
  Payload ID: 1442
  Gene Symbol: ASPH
  Gene Name: aspartate beta-hydroxylase
  Uniprot ID: Q12797
  ENST ID: ENST00000517903
  CDS Start-End: 92-988
tgtgcctaaaacctgccagcagtacttttgagtttttttttttgttttgttttactttagcatttattattcatggattgaagaaatcaaaatggctgaagataaagagacaaagcatggaggacacaagaatgggaggaaaggcggactctcaggaacttcattcttcacgtggtttatggtgattgcattgctgggcgtctggacatctgtagctgtcgtttggtttgatcttgttgactatgaggaagttctagccaaagcaaaggacttccgttataacttatcagaggtgcttcaaggaaaactaggaatctatgatgctgatggtgatggagattttgatgtggatgatgccaaagttttattaggacttaaagagagatctacttcagagccagcagtcccgccagaagaggctgagccacacactgagcccgaggagcaggttcctgtggaggcagaaccccagaatatcgaagatgaagcaaaagaacaaattcagtcccttctccatgaaatggtacacgcagaacatgttgagggagaagacttgcaacaagaagatggacccacaggagaaccacaacaagaggatgatgagtttcttatggcgactgatgtagatgatagatttgagaccctggaacctgaagtatctcatgaagaaaccgagcatagttaccacgtggaagagacagtttcacaagactgtaatcaggatatggaagagatgatgtctgagcaggaaaatccagattccagtgaaccagtagtagaagatgaaagattgcaccatgatacagatgatgtaacataccaagtctatgaggaacaagtatatgaacctctagaaaatgaagggatagaaatcacagaagtaactgctccccctgaggataatcctgtagaagattcacaggtaattgtagaagaagtaagcatttttcctgtggaagaacagcaggaagtaccaccagatacttaaagcttcaaaaagactgcccctaccaccacaggaggaccagcctaaccatacgctccaaaagatggctgtgatagatcttgtgaagcaattactgagcagatcaagatctttgggaaggaacactaaagatgttttgaatgaattatagtccactggcattttagtgtatttttttttctttttagaaacacacatttctaaaaatgtcatgttacattcctgcatgtcccttttgatagcattagtggatccattggatttcttttttctttttgtgagacagcttttagtcttacctgaatttatgtgtgtttttccgacagtggttaataattatattggtgatgtagcagcaattgtgttggcagggttttcatatattattagtaattaacactaactgttggactgacttgtgtacactgtgttaaacatgatttaaaagctattaagagtactttgtgttagcactcttaaaaacgctaacagagatcatcattagctgtgaagatttgagttgtatatacctgcactgatattcttatcaaaaatttctacattagctttaagtgttcagattaacacttttgaaatttttgtagcttttagctgattaattagaaaaatttaatatttcagtgaaagttttaaattatcatttatttatttttttaaatgagaggggaaagctgaaattccttgttaagacacaaggaaaaagaatggccctactattatcatgcaaaaatgctttgttggcacctcagattaatcatataatagctatagtctcttcagcatttgtttaaattttagaaaacctgtataaattactggtgcataacttaaagattattctgcctttggctaattgagtaattcccctccagcactagagaccgctcagtgctcttactagatgaactcagtaacgccttgagctgggttgattgaggatgtgtgaaaagctcacagagcccgatgcctgctgctatttcacggcaatgagcctttttctttctacactgaagattttcttcttatttaatgtggtttattttgggctcagaaataattgctctgttgaaaataatcctttgtcagaaaagaaggtagctaccacatcattttgaaaggaccatgagcaactataagcaaagccataagaagtggtttgatcgatatattaggggtagctcttgattttgttaacattaagataaggtgactttttccccctgcttttaggattaaaatcaaagatacttctatatttttatcactatagatcatagttattatacaatgtagtgagtcctgcatgggtactcgatgtgtaatgaaacctgaaataataagataataagaaaagcaataattttctaaagctgtgctgtcggtgatacagagatgatactcaaattataataaaactcttcattttgtgaattatagaagctactttttataaagccatatttttttagggaaactaaggagtgacatagaactgatgaatgagtaaaagtaagttttgctggatttttgtagaactctggacgttgaggattcattatgctgtggttaactttaaatatttttgaattccaaatatctgaattaatgagccttgtctttacaaatatgtgccattgtgcaacatcggtgga

SEQ ID NO: 109170 - DNA, 1277 bp, Homo sapiens
  Payload ID: 1442
  Gene Symbol: ASPH
  Gene Name: aspartate beta-hydroxylase
  ENST ID: ENST00000522919
  CDS Start-End: 1-492
atggcgactgatgtagatgatagatttgagaccctggaacctgaagtatctcatgaagaaaccgagcatagttaccacgtggaagagacagtttcacaagactgtaatcaggatatggaagagatgatgtctgagcaggaaaatccagattccagtgaaccagtagtagaagatgaaagattgcaccatgatacagatgatgtaacataccaagtctatgaggaacaagcagtatatgaacctctagaaaatgaagggatagaaatcacagaagtaactgctccccctgaggataatcctgtagaagattcacaggtaattgtagaagaagtaagcatttttcctgtggaagaacagcaggaagtaccaccagaaacaaatagaaaaacagatgatccagaacaaaaagcaaaagaggactcatttgcgtctggtgaaagccaggcggcttgcaccatgtcctgggacttcagccatcctttcatgtgttgacccttcttaaagaatggaagggggaactgaataaagaagataacagcttctagctaagaaggatgatgcattagtttgccaaatatataggctccttttgtgtgctatgctctgtggagcgctctgaaagcaaagcaagtaactacaatgtaaagaggtagagactatgaacaaaatgctgtgggaacaccaaggaggaaatgacacactgctggcaggagatggaaagcaactggagtcttcatggagcgatgacatttgagctggtcctcaagtagtgggtgaggattacatccatgcaagagccctgtgaacccagatactgaagtatgtctaatgacaaggatgataagttgatatggaaaaaaaatcacaggtgtttctgctcacagcaagcccagcagtactccaagagcagtacttaacttgggtgtcatgggctatgctctctatacagaagattacattagagtcttgtcttaaaaaccctttttgggaaaattatcataattcatttttttctaatatccaatgacttttacgcttttgctactttgattcatcagtacgttgatgataccttctcctctttgtcccattcctgcttcatgataatttaatgaaattaaagtaatggatttaattagcacctacatctatgattatatgtatatattatttatctgaaacctttggggtgggccagctaccacaattaaaatatcaacttgattcaagttgtgtgaagcacactttaaacttgaaataaaagtgaataaaatcta

SEQ ID NO: 109171 - DNA, 842 bp, Homo sapiens
  Payload ID: 1442
  Gene Symbol: ASPH
  Gene Name: aspartate beta-hydroxylase
  Uniprot ID: Q12797
  ENST ID: ENST00000522603
  CDS Start-End: 99-731
catgcagtgtgcctaaaacctgccagcagtacttttgagtttttttttttgttttgttttactttagcatttattattcatggattgaagaaatcaaaatggctgaagataaagagacaaagcatggaggacacaagaatgggaggaaaggcggactctcaggaacttcattcttcacgtggtttatggtgattgcattgctgggcgtctggacatctgtagctgtcgtttggtttgatcttgttgactatgaggaagttctaggaaaactaggaatctatgatgctgatggtgatggagattttgatgtggatgatgccaaagttttattagaaggacccagtggggtagccaagagaaaaactaaggctaaagttaaagaactcactaaagaagagctcaagaaggagaaagagaaacctgagtcaaggaaggaaagtaagaatgaagagagaaaaaaggggaagaaagaggatgtccgaaaggataagaaaattgctgatgcagacctatccaggaaggagtctcctaagggtaaaaaggacagagaaaaagagaaagtggacctagaaaaaagtgctaaaaccaaggaaaataggaaaaaatcaacaaatatgaaggatgtttctagtaaaatggcatcccgagacaaagatgacagaaaggaaagtagaagttctaccagatatgcacacttaacaaagggaaatacccagaaaagaaacggctaaagctctggcatcatcatcccagaacatggtcatgttccagattgcagtttgttacaaaaaagcatggaaaatgtaatattgctctgattggtgagggtgtgtaaattagcc

SEQ ID NO: 109172 - DNA, 5153 bp, Homo sapiens
  Payload ID: 1442
  Gene Symbol: ASPH
  Gene Name: aspartate beta-hydroxylase
  Uniprot ID: Q12797
  ENST ID: ENST00000541428
  CDS Start-End: 162-2351
tttcagttctagaggcccttacagtgcagggattggccagtctcaagctctggtaggcaagtgcatgcagtgtgcctaaaacctgccagcagtacttttgagtttttttttttgttttgttttactttagcatttattattcatggattgaagaaatcaaaatggctgaagataaagagacaaagcatggaggacacaagaatgggaggaaaggcggactctcaggaacttcattcttcacgtggtttatggtgattgcattgctgggcgtctggacatctgtagctgtcgtttggtttgatcttgttgactatgaggaagttctaggaaaactaggaatctatgatgctgatggtgatggagattttgatgtggatgatgccaaagttttattaggacttaaagagagatctacttcagagccagcagtcccgccagaagaggctgagccacacactgagcccgaggagcaggttcctgtggaggcagaaccccagaatatcgaagatgaagcaaaagaacaaattcagtcccttctccatgaaatggtacacgcagaacatgttgagggagaagacttgcaacaagaagatggacccacaggagaaccacaacaagaggatgatgagtttcttatggcgactgatgtagatgatagatttgagaccctggaacctgaagtatctcatgaagaaaccgagcatagttaccacgtggaagagacagtttcacaagactgtaatcaggatatggaagagatgatgtctgagcaggaaaatccagattccagtgaaccagtagtagaagatgaaagattgcaccatgatacagatgatgtaacataccaagtctatgaggaacaagcagtatatgaacctctagaaaatgaagggatagaaatcacagaagtaactgctccccctgaggataatcctgtagaagattcacaggtaattgtagaagaagtaagcatttttcctgtggaagaacagcaggaagtaccaccagaaacaaatagaaaaacagatgatccagaacaaaaagcaaaagttaagaaaaagaagcctaaacttttaaataaatttgataagactattaaagctgaacttgatgctgcagaaaaactccgtaaaaggggaaaaattgaggaagcagtgaatgcatttaaagaactagtacgcaaataccctcagagtccacgagcaagatatgggaaggcgcagtgtgaggatgatttggctgagaagaggagaagtaatgaggtgctacgtggagccatcgagacctaccaagaggtggccagcctacctgatgtccctgcagacctgctgaagctgagtttgaagcgtcgctcagacaggcaacaatttctaggtcatatgagaggttccctgcttaccctgcagagattagttcaactatttcccaatgatacttccttaaaaaatgaccttggcgtgggatacctcttgataggagataatgacaatgcaaagaaagtttatgaagaggtgctgagtgtgacacctaatgatggctttgctaaagtccattatggcttcatcctgaaggcacagaacaaaattgctgagagcatcccatatttaaaggaaggaatagaatccggagatcctggcactgatgatgggagattttatttccacctgggggatgccatgcagagggttgggaacaaagaggcatataagtggtatgagcttgggcacaagagaggacactttgcatctgtctggcaacgctcactctacaatgtgaatggactgaaagcacagccttggtggaccccaaaagaaacgggctacacagagttagtaaagtctttagaaagaaactggaagttaatccgagatgaaggccttgcagtgatggataaagccaaaggtctcttcctgcctgaggatgaaaacctgagggaaaaaggggactggagccagttcacgctgtggcagcaaggaagaagaaatgaaaatgcctgcaaaggagctcctaaaacctgtaccttactagaaaagttccccgagacaacaggatgcagaagaggacagatcaaatattccatcatgcaccccgggactcacgtgtggccgcacacagggcccacaaactgcaggctccgaatgcacctgggcttggtgattcccaaggaaggctgcaagattcgatgtgccaacgagaccaagacctgggaggaaggcaaggtgctcatctttgatgactcctttgagcacgaggtatggcaggatgcctcatctttccggctgatattcatcgtggatgtgtggcatccggaactgacaccacagcagagacgcagccttccagcaatttagcatgaattcatgcaagcttgggaaactctggagagaggctgcctttctggttccatctccttgggtgtgaggatagaatttcgaacaccaagagtcaattcccttgacttgcagcccgagtaattcaaagcctcctcctagggtcagaagacactaaagggaatatttgcctcgctgcaattcatttaggaaacaccctgctgtgtgtcatctcatgacagcactggtcttctgccagtatttaaggtgaacatttgatagcttctaccttaccagccaaagatattttttccacatagaataggtctaattcaatgtataatgagaacatatgtagaaactgtgaatggattgctttagtttgtaatttttctatgcagttatatttttctagtgtagctagactattttgtcatcatgtaccactacatttttgtttattttaatgacaagctgtataaatgctttacttctagctatttaatggtagcattactggggaactcagacttccctcttttaattcttcttagtaaaagatactcatgaaaaaagcagttttattttcctaacaaaaaagaaagagctcattatgtcagtgtctatgaactgtacccatcccaactctcaaatcgtttggttttttttatcttgattgagatcctcttctcactatgctagtggtggagatattgacaaaatcctatttctttcaaagaggaacttttcacaccgaaaaaagagcatggaattattttatattgttataaaaatcccagatgcaaatttttttaatgccaattattagagcttctggggaaaaagtatagttcacggaaataaaactatgttctttcagggttgggtggataggtggctgctagggtgtctggctcctggcggctttgccatccatgaggcaagggctgggaacacagtgtctttgcctatggtagatccatgtgaatgtcaggaagccagctcttcagtcttggagatgatttctgctacaattctgtagaaagattaaggatggcagagtaaaaggttaccaagaatgccaggatgtttttcttgggcgtaggaggtccagattactttcctttttgatgaaagagtttggaagactgtcccatctctctggcttgagaaatctctgccattttaaacatcactgtgaaatagcaattattatcatctgtatttagttttaacattacccacaacatagaaataataggtaaaaatcgtcttgcctactcattccaaagatgatcaagtcattaatctagcaaagtattcatgtatcagattttgtatattttgaatcaaagctaactaggaatgttagatataagaatgtaatgatattcatgcactgaattctaagccaatatgaacaaaaatgctgcatgaatggcacatataggtcaccaaagttcattcacaggtagaaaaaacttgtgctttcttttccatctaaaaacaaaaggagactttctttatctcatttaaagaacagctctttgaaattgaaattgaccctttttgcttgaccttaaggagattagcttccagtagatgagtttgcaaaatacttttcctgttcttttgttttgctggtattgaaaacatcccactaaatcagatgaagaggcatgggaggaaaaatatccaaattaattactaaaatcgagaagagaaggcaaactcttgaaaagtaaaaaggtgtttgtgaccttcagtatttattgaacagaggaaataactgacaagggcaatacaattcaatgttcatgtagtaacattcatgtcacttgttgaatttggttctcatatgtatattgcatacacataaattcaaactataagtcgtcatttttgagccatcatcttacattcatgtaatgaaattatggaagagagtaaaaactagctcttaacttagtaaatataatatggtatttaaaatcaggtcactacagtaaggttctaagtattgccaattgaaaagctagaaatggtattactgttgcaaagtgttgtcaataattgactccaatagcattgtaaatacttgtatcccacaactattttaaacccaagcaataaaatggattttctaattcacttcaattctttatttctcttacctatctatgtcttggtacataagaaaagtgtttccatcactgcattggtagaattatttcagtgttattatttttgtgatttcgtatgtctacacaaaaatgaattagtttaatttatattgtgatacagttgtttgagaaatatttttaattctgtttcaactttatttctccaagtgtataatataaaaattacttctgttattgttctctaccaataggggaaaaaattaaaacattagatccattgagaaagagatgatgtaataaataattaagattagtaataatattatcaggggtgattatgaccagttgaataatctctttcccttgaattatttagctaacaaattaactctcccaaatatttaaaataatgtaaaatcatattttactgcccattattaactaaaatatttttgtttgactttgagcaccaactggtaatactaataaatacccatgtcatgcagatggctgggcgaataagagatgtctaaaaatatgcactggtcttggaaaacatggcacaagtaaggatatcatatatgatgtctgtttattttatgtctgatttcttttgaatgagtagttggggactccatttctaaggagactaggtaaataaaatgacctttgacatttc

SEQ ID NO: 109173 - DNA, 556 bp, Homo sapiens
  Payload ID: 1442
  Gene Symbol: ASPH
  Gene Name: aspartate beta-hydroxylase
  ENST ID: ENST00000523927
  CDS Start-End: 1-556
ttttgatgtggatgatgccaaagttttattaggacttaaagagagatctacttcagagccagcagtcccgccagaagaggctgagccacacactgagcccgaggagcaggttcctgtggaggcagaaccccagaatatcgaagatgaagcaaaagaacaaattcagtcccttctccatgaaatggtacacgcagaacatgaaaccgagcatagttaccacgtggaagagacagtttcacaagactgtaatcaggatatggaagagatgatgtctgagcaggaaaatccagattccagtgaaccagtagtagaagatgaaagattgcaccatgatacagatgatgtaacataccaagtctatgaggaacaagcagtatatgaacctctagaaaatgaagggatagaaatcacagaagtaactgctccccctgaggataatcctgtagaagattcacaggtaattgtagaagttaagaaaaagaagcctaaacttttaaataaatttgataagactattaaagctgaacttgatgctgcagaaaaactccgtaaaagg

SEQ ID NO: 109174 - DNA, 337 bp, Homo sapiens
  Payload ID: 1442
  Gene Symbol: ASPH
  Gene Name: aspartate beta-hydroxylase
  ENST ID: ENST00000519264
  CDS Start-End: 1-135
gaggataatcctgtagaagattcacaggtaattgtagaagaagtaagcatttttcctgtggaagaacagcaggaagtaccaccaggctatttgatggagaatatggaatcagaattgccttgggatgaaagttgaatagtgtataaattgtgacattactcctcttcctctccattccccatctctcctgagagcatctttagtgctttgtgacagtccaggctgcccagtgcttgtcagtgtcccagggtgtttccttttagttcactgcattacatacttttccctgttttttcctactttcctctacctgagccctcttgtcaccagttaatat

SEQ ID NO: 109175 - DNA, 587 bp, Homo sapiens
  Payload ID: 1442
  Gene Symbol: ASPH
  Gene Name: aspartate beta-hydroxylase
  ENST ID: ENST00000524173
  CDS Start-End: 1-587
cagtcccttctccatgaaatggtacacgcagaacatgaaaccgagcatagttaccacgtggaagagacagtttcacaagactgtaatcaggatatggaagagatgatgtctgagcaggaaaatccagattccagtgaaccagtagtagaagatgaaagattgcaccatgatacagatgatgtaacataccaagtctatgaggaacaagcagtatatgaacctctagaaaatgaagggatagaaatcacagaagtaactgctccccctgaggataatcctgtagaagattcacaggtaattgtagaagaagtaagcatttttcctgtggaagaacagcaggaagtaccaccagttaagaaaaagaagcctaaacttttaaataaatttgataagactattaaagctgaacttgatgctgcagaaaaactccgtaaaaggggaaaaattgaggaagcagtgaatgcatttaaagaactagtacgcaaataccctcagagtccacgagcaagatatgggaaggcgcagtgtgaggatgatttggctgagaagaggagaagtaatgaggtgctacgtggagccatcgagac

SEQ ID NO: 109176 - DNA, 536 bp, Homo sapiens
  Payload ID: 1442
  Gene Symbol: ASPH
  Gene Name: aspartate beta-hydroxylase
  ENST ID: ENST00000519678
  CDS Start-End: 1-404
gagaagacttgcaacaagaagatggacccacaggagaaccacaacaagaggatgatgagtttcttatggcgactgatgtagatgatagatttgagaccctggaacctgaagtatctcatgaagaaaccgagcatagttaccacgtggaagagacagtttcacaagactgtaatcaggatatggaagagatgatgtctgagcaggaaaatccagattccagtgaaccagtagtagaagatgaaagattgcaccatgatacagatgatgtaacataccaagtctatgaggaacaagaagtaactgctccccctgaggataatcctgtagaagattcacaggtaattgtagaagaagtaagcatttttcctgtggaagaacagcaggaagtaccaccagatacttaaagcttcaaaaagactgcccctaccaccacaggaggaccagcctaaccatacgctccaaaagatggctgtgatagatcttgtgaagcaattactgagcagatcaagatctttgggaaggaacactaaagatgt

SEQ ID NO: 109177 - DNA, 1584 bp, Homo sapiens
  Payload ID: 1443
  Gene Symbol: ASPHD1
  Gene Name: aspartate beta-hydroxylase domain containing 1
  Uniprot ID: Q5U4P2
  ENST ID: ENST00000308748
  CDS Start-End: 253-1425
cgggactgcaggtccaggcagggtaggaaccgctgcccaggggagctaggaggaagcggggagagagagcgagcgaaaagcgggggtggggaggaaagggggagattgaggtgggagagagaagcagagcgagagagaggaggctgctggaaggagaaagaagagggtgaggaggcgacagagggagaggaggaagaagaggtagaaggagagagaaaggggagagaaaggagagaggagggttggaggtgcatgaaggaggggagagggagcttcagcgtggagagaggaccgcggaaggagagagagacagcccagagtggaatgtggaagggaaacagtccagcggggagccagggggcagccatggaagggacaggtggggagctggggggacaggggaactggggtccggaggacgccccaggcctcttggccagggcctccctgatcatgctcccgtggccactacccctggcctcctcggccctcaccttgctcttcggggccctcacttccctgttcctctggtactgctaccgcctgggctcccaagacatgcaggccctaggggctgggagccgagctgggggtgttcgtggtgggcctgtgggatgctcggaggccggcgggccaagcccagggggtcctggggatcccggggaaggacctaggacggaaggcctagtgagccggcggcttcgggcctacgcaaggcgctactcctgggctgggatgggtagagtgaggcgggcagctcagggtggcccaggccctgggagagggccaggggtcctaggtattcagcgcccaggcctgcttttcctaccagacctgccttcagccccctttgtgccgcgggacgcccagcggcacgacgtggagctcctggagagcagcttccctgccattttgcgggacttcggggctgtgagctgggacttctcagggactacccctccgcctcggggctggtccccacctctggcccccgggtgctaccagctcctgctgtaccaagcaggccggtgccaacccagcaactgccgccggtgcccgggggcctatcgggcactgagggggcttcgaagctttatgagtgccaacaccttcggcaatgccggcttttccgttctcctgcctggggcccggctcgagggccgctgtgggcccaccaatgcccgggtcagatgccatctgggcctaaagatccctcctggctgtgagctggtggtcggcggtgagccccagtgctgggctgaggggcactgtctactggtggacgactcttttctacacacagtggctcacaatggctcccccgaagatgggcctcgagtggtcttcatcgtggacctctggcaccccaacgtggcaggggctgagcgccaggccctcgactttgtcttcgccccagacccttgaaggaaggtgctcccttcacacacccaggctggagagacactgcgctcagggacggcttgatggtagccaggacctcctctctactgcgggggtgggcgggggcggaggatgggaactggctagtgagcactgaaatataaattctgaatcctctcctaa

SEQ ID NO: 109178 - DNA, 1451 bp, Homo sapiens
  Payload ID: 1443
  Gene Symbol: ASPHD1
  Gene Name: aspartate beta-hydroxylase domain containing 1
  Uniprot ID: Q5U4P2
  ENST ID: ENST00000414952
  CDS Start-End: 115-1287
ggaggctgctggaaggagaaagaagagggtgaggaggcgacagagggagaggaggaagaagaggtagaaggagagagaaaggggagagaaaggagagaggagggttggaggtgcatgaaggaggggagagggagcttcagcgtggagagaggaccgcggaaggagagagagacagcccagagtggaatgtggaagggaaacagtccagcggggagccagggggcagccatggaagggacaggtggggagctggggggacaggggaactggggtccggaggacgccccaggcctcttggccagggcctccctgatcatgctcccgtggccactacccctggcctcctcggccctcaccttgctcttcggggccctcacttccctgttcctctggtactgctaccgcctgggctcccaagacatgcaggccctaggggctgggagccgagctgggggtgttcgtggtgggcctgtgggatgctcggaggccggcgggccaagcccagggggtcctggggatcccggggaaggacctaggacggaaggcctagtgagccggcggcttcgggcctacgcaaggcgctactcctgggctgggatgggtagagtgaggcgggcagctcagggtggcccaggccctgggagagggccaggggtcctaggtattcagcgcccaggcctgcttttcctaccagacctgccttcagccccctttgtgccgcgggacgcccagcggcacgacgtggagctcctggagagcagcttccctgccattttgcgggacttcggggctgtgagctgggacttctcagggactacccctccgcctcggggctggtccccacctctggcccccgggtgctaccagctcctgctgtaccaagcaggccggtgccaacccagcaactgccgccggtgcccgggggcctatcgggcactgagggggcttcgaagctttatgagtgccaacaccttcggcaatgccggcttttccgttctcctgcctggggcccggctcgagggccgctgtgggcccaccaatgcccgggtcagatgccatctgggcctaaagatccctcctggctgtgagctggtggtcggcggtgagccccagtgctgggctgaggggcactgtctactggtggacgactcttttctacacacagtggctcacaatggctcccccgaagatgggcctcgagtggtcttcatcgtggacctctggcaccccaacgtggcaggggctgagcgccaggccctcgactttgtcttcgccccagacccttgaaggaaggtgctcccttcacacacccaggctggagagacactgcgctcagggacggcttgatgataaccagatgcaacgtgaagatctagactggaccctggtttgatgaaccagctgtaaaaacacatttctggaacaactggagaaaccggagtatgccctgg

SEQ ID NO: 109179 - DNA, 1732 bp, Homo sapiens
  Payload ID: 1443
  Gene Symbol: ASPHD1
  Gene Name: aspartate beta-hydroxylase domain containing 1
  Uniprot ID: Q5U4P2
  ENST ID: ENST00000566693
  CDS Start-End: 115-1287
ggaggctgctggaaggagaaagaagagggtgaggaggcgacagagggagaggaggaagaagaggtagaaggagagagaaaggggagagaaaggagagaggagggttggaggtgcatgaaggaggggagagggagcttcagcgtggagagaggaccgcggaaggagagagagacagcccagagtggaatgtggaagggaaacagtccagcggggagccagggggcagccatggaagggacaggtggggagctggggggacaggggaactggggtccggaggacgccccaggcctcttggccagggcctccctgatcatgctcccgtggccactacccctggcctcctcggccctcaccttgctcttcggggccctcacttccctgttcctctggtactgctaccgcctgggctcccaagacatgcaggccctaggggctgggagccgagctgggggtgttcgtggtgggcctgtgggatgctcggaggccggcgggccaagcccagggggtcctggggatcccggggaaggacctaggacggaaggcctagtgagccggcggcttcgggcctacgcaaggcgctactcctgggctgggatgggtagagtgaggcgggcagctcagggtggcccaggccctgggagagggccaggggtcctaggtattcagcgcccaggcctgcttttcctaccagacctgccttcagccccctttgtgccgcgggacgcccagcggcacgacgtggagctcctggagagcagcttccctgccattttgcgggacttcggggctgtgagctgggacttctcagggactacccctccgcctcggggctggtccccacctctggcccccgggtgctaccagctcctgctgtaccaagcaggccggtgccaacccagcaactgccgccggtgcccgggggcctatcgggcactgagggggcttcgaagctttatgagtgccaacaccttcggcaatgccggcttttccgttctcctgcctggggcccggctcgagggccgctgtgggcccaccaatgcccgggtcagatgccatctgggcctaaagatccctcctggctgtgagctggtggtcggcggtgagccccagtgctgggctgaggggcactgtctactggtggacgactcttttctacacacagtggctcacaatggctcccccgaagatgggcctcgagtggtcttcatcgtggacctctggcaccccaacgtggcaggggctgagcgccaggccctcgactttgtcttcgccccagacccttgaaggaaggtgctcccttcacacacccaggctggagagacactgcgctcagggacggcttgatgggagaggctggggcagggccttatgtcttctcctagtacaaccaaacagataaccagatgcaacgtgaagatctagactggaccctggtttgatgaaccagctgtaaaaacacatttctggaacaactggagaaaccggagtatgccctggactggatattaaataaaaatttattgacatgtaaagatggcaattattaacaacaacaaaaaacagattataaaacatttcatacaacacgattgtattttggcaagcaaacacacacacacacacatactctcacacaggaaacgacctggaagaatatttggtgcttttattttttagattatttgtgtttctgaaatttctacaattaataaatactgctttaaaataa

SEQ ID NO: 109180 - DNA, 1115 bp, Homo sapiens
  Payload ID: 1443
  Gene Symbol: ASPHD1
  Gene Name: aspartate beta-hydroxylase domain containing 1
  ENST ID: ENST00000483405
  CDS Start-End: 627-956
cgggacggctggaggctggcaccgtggcccctgcgccccacgtggcgccctttccgggcggggggggtggggaggcacctccagcgacaactctcccccctcccccggcacccggctgatttgctgtgccactgggagggttcgggggtggctgagctgagagggctccgggaaggagtgacgtcagggtgagtgggagcccaggaaggagcgagtaggagagagggagcgagagccaggcaggaccgcagggtcggggctagtgaggagcgagggcaaggagagagcagtgaggccggagagaaagaagctgccgcggaggaagacaggctgcgggttcccgggactgcaggtccaggcaggacctgccttcagccccctttgtgccgcgggacgcccagcggcacgacgtggagctcctggagagcagcttccctgccattttgcgggacttcggggctgtgagctgggacttctcagggactacccctccgcctcggggctggtccccacctctggcccccgggtgctaccagctcctgctgtaccaagcaggccggtgccaacccagcaactgccgccggtgcccgggggcctatcgggcactgagggggcttcgaagctttatgagtgccaacaccttcggcaatgccggcttttccgttctcctgcctggggcccggctcgagggccgctgtgggcccaccaatgcccgggtcagatgccatctgggcctaaagatccctcctggctgtgagctggtggtcggcggtgagccccagtgctgggctgaggggcactgtctactggtggacgactcttttctacacacagtggctcacaatggctcccccgaagatgggcctcgagtggtcttcatcgtggacctctggcaccccaacgtggcaggggctgagcgccaggccctcgactttgtcttcgccccagacccttgaaggaaggtgctcccttcacacacccaggctggagagacactgcgctcagggacggcttgatggtagccaggacctcctctctactgcgggggtgggcgggggcggaggatgggaactggctagtgagcactgaaatataaattctgaatcctctcctaa

SEQ ID NO: 109181 - DNA, 775 bp, Homo sapiens
  Payload ID: 1443
  Gene Symbol: ASPHD1
  Gene Name: aspartate beta-hydroxylase domain containing 1
  ENST ID: ENST00000563177
  CDS Start-End: 456-775
attgcgggacggctggaggctggcaccgtggcccctgcgccccacgtggcgccctttccgggcggggggggtggggaggcacctccagcgacaactctcccccctcccccggcacccggctgatttgctgtgccactgggagggttcgggggtggctgagctgagagggctccgggaaggagtgacgtcaggacctgccttcagccccctttgtgccgcgggacgcccagcggcacgacgtggagctcctggagagcagcttccctgccattttgcgggacttcggggctgtgagctgggacttctcagggactacccctccgcctcggggctggtccccacctctggcccccgggtgctaccagctcctgctgtaccaagcaggccggtgccaacccagcaactgccgccggtgcccgggggcctatcgggcactgagggggcttcgaagctttatgagtgccaacaccttcggcaatgccggcttttccgttctcctgcctggggcccggctcgagggccgctgtgggcccaccaatgcccgggtcagatgccatctgggcctaaagatccctcctggctgtgagctggtggtcggcggtgagccccagtgctgggctgaggggcactgtctactggtggacgactcttttctacacacagtggctcacaatggctcccccgaagatgggcctcgagtggtcttcatcgtggacctctggcaccccaacgtggcaggggctgagcgccaggccctcgactttgtcttcgcccc

SEQ ID NO: 109182 - DNA, 3357 bp, Homo sapiens
  Payload ID: 1444
  Gene Symbol: ASPHD2
  Gene Name: aspartate beta-hydroxylase domain containing 2
  Uniprot ID: Q6ICH7
  ENST ID: ENST00000215906
  CDS Start-End: 439-1548
gcggccccgcggagcgcagcgcggcgtcggcaccggcaggggcaccggcgcggcttaggctcgggctcgggctccggctcgggctcccgcggcgtgggctgggcagcagccaggcggcggctccgcggcgccgggcaggggccgtccgcgggtccgcgccctcgggcggcggcgtctcctgggtcccggcagccgtccgcgcgcccgggcgcaggtttggttttcctaaacaaatcctttcacagggaccgacggcacttgataatgtgacaaaaaccagcctcttccaccccactgcagtgacttttgccggaaagtggagcagtgggcacggccaaccttgtcgttcatcaatgccgcccctggcagtatctgaggatcggtggcagccatgcctccccctgccccagccgctccttcccccccacgctaatctgcatggtgtgggcgcccttgggacccccgaggactgattgtctgaccttgcttcacacgcccagtaaggactcccccaagatgtcgctcgagtggctggtggcctggagctggtcgctggatggcctgagggactgcatcgccaccggcatccagtccgtgcgggactgcgacaccaccgctgtcatcactgtggcctgcctcctggtcctcttcgtgtggtactgttatcacgtgggcagggagcagccccggccctacgtctccgtcaactccctcatgcaggctgccgatgccaacgggctgcagaatggctacgtgtactgccagtcccctgagtgcgtgcgctgcacccacaacgagggcctcaaccagaagctgtaccacaacctgcaggagtacgccaagcgctactcctggtccggcatgggccgcatccacaagggcatccgcgagcagggccggtacctcaacagccggccctccatccagaagcccgaggtcttcttcctgcccgacctgcccaccacgccctatttctcccgggacgcacagaaacatgatgtggaagtgctggaacggaacttccagaccatcctgtgtgagtttgagaccctctacaaagctttctcaaactgcagcctcccgcaaggatggaaaatgaacagcacccccagcggggagtggttcaccttttacttggtcaatcagggggtttgtgttcccaggaactgtaggaagtgcccacggacgtaccgcttgctcggaagccttcggacctgtattgggaacaatgtttttgggaacgcgtgcatctctgtgctgagccctgggactgtgataacggagcactatggacccaccaacatccgcatccgatgccatttaggtctgaaaactccaaatggctgtgagctggtggtggggggagagccccagtgctgggcagaagggcgctgccttctctttgatgactctttcctgcatgctgcgttccatgaaggttcagcagaggatggcccacgggtggttttcatggtggatttgtggcatccaaacgtcgcagcggccgaacggcaggctcttgatttcatctttgctccgggacgatgagagtatttcccatgctggagtcggcgagaagggccgaggcggggcctgggcagactgtggtccggtccagtccctaccggtgttgtttccatgctcagaaacctgcctcagcggaaagctcttatttgggattttatatcatgtcgggtccctctttcccttggttattgtaaatggaaacttttcggcttgtatttccttagattttttttttttccttccaatcatttgcttcagagactcctttctggcctaacagcgcattcctttgattggtccttgagtgaccagagacttagtgcccttgtaagtctgtcttctgttgctacttgtttttttcagtgctctgaaatagagtaactaaatggttatttgtctgaatataataatgtaaaacttcttgtggtcatcttaaaaaaaaaaaaaaaaaactaaaaactgcaaaccagagagctagagaacttggcctctgatgctggcacactggggacccttcagccacctgacggcagggggacagtctgcagcccccacacctgactggcttcagtagccaggtggaggggctgccagacacagtcagggtggcacacagtgtccaggcccagggatactgtcaccatcgctcacctcattctaaaccttgtcaggtccctgatggcaaaagcattgggccagtaggactggaggctactctttaaacatggctttcctgcaaagctgaagctggtgtcccccagcaccaagctgcggctcacacagatcagccacggaacgtgtgatccgcttacctcactgcctacagaagccctactgccaaactgggcctggaaaattcccagttttaggtgttttgagtccacagtgatgaacgttaaggccaccaggttggctgataggagctgtagggggataggaccgcgctcacccagcgacatttggggaaagcctttctctggcaaaactggaataatagatctgaccaaagtttctgttttgctttggagttctgttgcctatgtttttttttttttcatttatttgtctgtacataaatgttcaaacactagacttggagatagtggaagagttggccctgtgtctttgtcatggcacaaaggtgtgcactgcgtgacaatgacccaagccagtgtgtgctagtgaggagacagagaagacctacatgcccagaggacccgtggccgttgtgctggttttctggtctcctgtgaagaacatgtggatctcttcccgaaggaaaaggtcccaggagaccagtttgaggcactcactctagaaatagcctgtgttagctgatgtgtgaaagcgtagccggccagccacactagagatgccttttctgaataatgtattatgagcagtgtcagatttataaagccgaggagtggtttggaatatacagctggtcgcaggtgcaggtccagtgtttagatccaaatggaaaacagcagcttctaagaggtacaactgttggaagaaaacacagttgaaatgcaccaggcaggtactagcaagtgtgcaaagagcacgtctacatttgagtaaaatgtctacacagatatttgtcagtgatgagaatgcaggaaaaggcagacatttcaaacatacctgaagtctttttactcattatcttgttaaagaatcactgaggtgcatgatttctacacatcgtgactgctctgctctgcgtttacaaaaccaacagcccgcgcaggtacctagctacctgcattcatgtgacatgtctggggaacagaagataaataaaggatcttgctgaaaaccaga

SEQ ID NO: 109183 - DNA, 848 bp, Homo sapiens
  Payload ID: 1445
  Gene Symbol: ASPDH
  Gene Name: aspartate dehydrogenase domain containing
  Uniprot ID: A6ND91
  ENST ID: ENST00000376916
  CDS Start-End: 182-718
gctgccgcagcctgcgccatttccgatgccaggcaccctcaaggcacagaggctggggctcatgttgggggcacttggcctctccaggcctcgaaggcttctcctgggctgacgcgagctggggaacgggagggacggacgtgggagcgagaacgtcacactggaggcagctggtggcacgatgggggacagagtgaaaggtagcaagtcaaggcgccctgatctggttgtggaagtggcccatcccaaaataatccatgaatctggggcacaaatcctgcgccatgccaatctcctgagccttcgtgtcaccatggccacacaccccgatggcttccggcttgagggacccctggctgcagcccacagccctgggccttgcactgtgctctacgaaggccctgtccgtgggctctgcccctttgccccgcgaaattccaacaccatggcggcggctgccctggctgcccccagcctgggcttcgatggggtgattggggtgctcgtggctgataccagcctcacggacatgcacgtggtggatgtagagctgagcggaccccggggccccacgggccgaagctttgctgtgcacacccgcagagagaaccctgccgagccaggcgcggtcaccggctccgccaccgtcacggccttctggcagagcctcctggcctgctgccagctcccctccaggccggggatccatctctgctgagaagcctcctccctcccgagacaagatcatctgcctggcctctcaccaccaccatcccacccctgccctgccccacttccccagggtctcccttctgactcagtaaagatcaccgctgcctccccccgca

SEQ ID NO: 109184 - DNA, 1040 bp, Homo sapiens
  Payload ID: 1445
  Gene Symbol: ASPDH
  Gene Name: aspartate dehydrogenase domain containing
  Uniprot ID: A6ND91
  ENST ID: ENST00000389208
  CDS Start-End: 63-914
gccttgtgcagcgggcagcgagcagcccagggagccaggccccagacaccgcactcagggccatggccgacaggggcccgtggagggtgggcgtggtgggctatggccgcctcggacagtccctcgtctcccgcctcttggctcagggaccagaacttggcctagaacttgtttttgtctggaatcgtgacccaggacgaatggcagggagcgtgcccccttccctgcagctccagaaccttgctgcccttggggaaaggcgccctgatctggttgtggaagtggcccatcccaaaataatccatgaatctggggcacaaatcctgcgccatgccaatctcctggtggggtccccctcagctctaagtgaccagaccacagagcggcagctcttggaggcctcacagcactgggaccacgccgtgtttgtggcccgaggggccctgtggggcgctgaggacatcaggagattggatgcagctgggggcctccggagccttcgtgtcaccatggccacacaccccgatggcttccggcttgagggacccctggctgcagcccacagccctgggccttgcactgtgctctacgaaggccctgtccgtgggctctgcccctttgccccgcgaaattccaacaccatggcggcggctgccctggctgcccccagcctgggcttcgatggggtgattggggtgctcgtggctgataccagcctcacggacatgcacgtggtggatgtagagctgagcggaccccggggccccacgggccgaagctttgctgtgcacacccgcagagagaaccctgccgagccaggcgcggtcaccggctccgccaccgtcacggccttctggcagagcctcctggcctgctgccagctcccctccaggccggggatccatctctgctgagaagcctcctccctcccgagacaagatcatctgcctggcctctcaccaccaccatcccacccctgccctgccccacttccccagggtctcccttctgactcagtaaagatcaccgctgcctccccc

SEQ ID NO: 109185 - DNA, 310 bp, Homo sapiens
  Payload ID: 1445
  Gene Symbol: ASPDH
  Gene Name: aspartate dehydrogenase domain containing
  ENST ID: ENST00000598657
  CDS Start-End: 156-310
tgccaggcaccctcaaggcacagaggctggggctcatgttgggggcacttggcctctccaggcctcgaaggcttctcctgggctgacgcgagctggggaacgggagggacggacgtgggagcgagaacgtcacactggaggcagctggtggcacgatgggggacagagtgaaaggtagcaagtcaaggcgccctgatctggttgtggaagtggcccatcccaaaataatccatgaatctggggcacaaatcctgcgccatgccaatctcctggtggggtccccctcagctctaagtgaccagaccacaga

SEQ ID NO: 109186 - DNA, 637 bp, Homo sapiens
  Payload ID: 1445
  Gene Symbol: ASPDH
  Gene Name: aspartate dehydrogenase domain containing
  ENST ID: ENST00000601207
  CDS Start-End: 235-637
gggggcacttggcctctccaggcctcgaaggcttctcctgggctgacgcgagctggggaacgggagggacggacgtgggagcgagaacgtcacactggaggcagctggtggcacgatgggggacagagtgaaaggcgccctgatctggttgtggaagtggcccatcccaaaataatccatgaatctggggcacaaatcctgcgccatgccaatctcctgagccttcgtgtcaccatggccacacaccccgatggcttccggcttgagggacccctggctgcagcccacagccctgggccttgcactgtgctctacgaaggccctgtccgtgggctctgcccctttgccccgcgaaattccaacaccatggcggcggctgccctggctgcccccagcctgggcttcgatggggtgattggggtgctcgtggctgataccagcctcacggacatgcacgtggtggatgtagagctgagcggaccccggggccccacgggccgaagctttgctgtgcacacccgcagagagaaccctgccgagccaggcgcggtcaccggctccgccaccgtcacggccttctggcagagcctcctggcctgctgccagctcccctccaggccggggatccatctctgct

SEQ ID NO: 109187 - DNA, 1300 bp, Homo sapiens
  Payload ID: 1446
  Gene Symbol: DRICH1
  Gene Name: aspartate-rich 1
  Uniprot ID: Q6PGQ1
  ENST ID: ENST00000317749
  CDS Start-End: 299-988
agtcagtagctcgcagtggagggaggaggagctccaactgtgctctttgatggcagtttttgcacctttgggtgcttgtcatgttcgtttatttttcaaagaagacagcaggtccctgacctcatagaccagctagtttgggaggtggcggcagaataagggctgaggacccagatctgcctggggtcaggctgcttctaaaagtgcagggccaccctcagtagtgtggctgctagggcagcacagttacaatttcgctgaaggctgaggcaggagtggagaggcatggagaggccccatggggaatatactgacctgttgtatcaactcccactgtggctggcccagggggaaggacgcaccctgttatgaatctgatactgatatttatgagactgtggctgctgcaacatcagaatccactactgtagagcctggcaagctggatgtgggagccacggagggccaagacctgcagcacatcagcaaccaaaagatgcccacaggtccccctgaggaccgcctgagtttaaaatttctgccatcaagtgaggaagacaatgatgatgccaagattttaccatcacctgtccagggttcttctgaggacaacctgagtttagtatgcctaccacgaagtgaagatgatgactgtgatgatgatgatgatgatgatgcccagattttaccgtcacgtgtccagggtggctgttaccggtttgatagcagttcttgttcttctgaggacaacctgagtttagtatgcctaccacgaagtgaagatgatgactgtgatgatgatgatgatgatgcccagattttaccgtcacctgtccaggcttgttctgaagatagcctgtttttaagatgctcactgagacacaaagatgaagaagaagaagatgatgatgacatccacataacagctcggatagaaagtgacttgacgctggagagtctaagtgatgaagagattcatccagggtgaagcccttctgtggagctgaccagggtgctgacccaaagggcaggccagcgcgtgctgcagggtccccagctttgcccctggaggtctcaatcctctctacattctgaggaaaactcttggtcccagcagagagaaaaagtccaaggctgcttcccacccaccgccagcactaggtttggcctgtaccatccaggacccagtgcttctgggcctggcatttctcctttggcaagagagtgagaagagacgtgactgtgctccacgagcagaaagtgccattcccacttgaaataaagagactgagtgcattta

SEQ ID NO: 109188 - DNA, 687 bp, Homo sapiens
  Payload ID: 1446
  Gene Symbol: DRICH1
  Gene Name: aspartate-rich 1
  Uniprot ID: Q6PGQ1
  ENST ID: ENST00000614553
  CDS Start-End: 1-687
atggggaatatactgacctgttgtatcaactcccactgtggctggcccagggggaaggacgcaccctgttatgaatctgatactgatatttatgagactgtggctgctgcaacatcagaatccactactgtagagcctggcaagctggatgtgggagccacggagggccaagacctgcagcacatcagcaaccaaaagatgcccacaggtccccctgaggaccgcctgagtttaaaatttctgccatcaagtgaggaagacaatgatgatgccaagattttaccatcacctgtccagggttcttctgaggacaacctgagtttagtatgcctaccacgaagtgaagatgatgactgtgatgatgatgatgatgatgatgcccagattttaccgtcacgtgtccagggtggctgttaccggtttgatagcagttcttgttcttctgaggacaacctgagtttagtatgcctaccacgaagtgaagatgatgactgtgatgatgatgatgatgatgcccagattttaccgtcacctgtccaggcttgttctgaagatagcctgtttttaagatgctcactgagacacaaagatgaagaagaagaagatgatgatgacatccacataacagctcggatagaaagtgacttgacgctggagagtctaagtgatgaagagattcatccaggt

SEQ ID NO: 109189 - DNA, 2177 bp, Homo sapiens
  Payload ID: 1447
  Gene Symbol: ASPRV1
  Gene Name: aspartic peptidase, retroviral-like 1
  Uniprot ID: Q53RT3
  ENST ID: ENST00000320256
  CDS Start-End: 578-1609
gcagcagttgagtccatgtaagatgattgtgcacgtgtgtgtgtgtgtgtgtgtgtgtgtgtgtgtcctcactcacttaaaaaagaccatttctgtgcattctttatgctggaaccctcctctgcctccctctccaggaaatcccataggatcccatacctgctttagaatgtgtgtgagacacttcccagtgcctggcatgtggtaggagctcagtacatgtaaactgttttcctttgaccactcaaagtagtcacttgttggggaggccaatggcggcttccccggtctctgagctgatgggcgtctggtccctgcctccccttccttcactggctgatgacaaatacctgaatgtcatcacatcctccgtgtcctcatctgttattctggaacacaggccagggagggtacagggtagtcccccttcaacagaggctggcctttcttgggatgtgggctggctggtgttggtccaaggatggatgcagagggtgaggcacccatcctgctagtccggccggatgctggcaggagggcggggtgaggaggggcggagcttccagaacaaaggagaatggggagcccaggggccagcctaggcatcaaaaaggctctgcagagtgaacaggccacagcactgcctgcctctgccccagcagtcagccagccgaccgcgcctgctccctcctgcttgcccaaggccgggcaagtcatccccactctgcttcgagaggccccgttttccagcgtgattgcgccgacactgctctgtgggtttctcttcttggcgtgggttgctgctgaggttccagaggagagcagcaggatggccgggagcggagccaggagtgaggaaggccgccggcagcatgccttcgtcccggaaccttttgatggggccaatgtcgtcccaaacctctggctgcacagctttgaagtcatcaatgacctcaaccattgggaccatatcaccaagctaaggttcctgaaagagtccctcagaggagaggccctgggtgtctacaataggctcagtccccaggaccagggagactatgggactgtgaaagaggccctcctgaaggcctttggggtccctggggctgcccccagccacctgcccaaagagatcgtctttgccaacagcatgggtaagggctactatctcaaggggaagattggcaaagtgcccgtgaggttcctggtggactctggggcccaggtctctgtggtccacccaaacttgtgggaggaggtcactgatggcgatctggacaccctgcagccctttgagaatgtggtaaaggtggccaatggtgctgaaatgaagatcctgggtgtctgggatacagcggtgtccctaggcaagctgaagctgaaggcacagttcctagtggccaatgcgagtgccgaggaagccatcattggcactgatgtgctccaggaccacaatgctatcctggactttgagcaccgcacatgcaccctgaaagggaagaagtttcgccttctgcctgtgggagggtccctggaagatgagtttgacctggagctcatagaggaggacccctcctcagaagaagggcggcaggagctatcccactgagaagccaccttttctttaacctcctaaatattggtgggaagacccaccgctgtggggggggttgcatatcctcatgggggtcactgggcttggccagtctgcttatcaactcttgctcttctctcccctttgcctccctctgcaggggccttaatctgcccctggtaggggaggcttccactgaacaggcacaggtgagggagagcaggctggcttagagggacagggtccccatggtcatcaagctgctgttgatgacaaagactcaaaggctggaagagctcccaaggaagctagaaatgcttgtctttgaaagaactgtgggaccccttcagattccctgaggtatggcttggtcactctcaggtcctcaaagcctgtcttagttgggctgggtcctagctgcagggtctttgtgagggtcacagttgctctgggacacctccctgaagagcctttccacctgtacaatcgtattttctttctgtcatttgctttgaagcccattgtgccttatgccaataattcaattgctgcaaacaccaataaagattgattcatggaaaaa

SEQ ID NO: 109190 - DNA, 5431 bp, Homo sapiens
  Payload ID: 1448
  Gene Symbol: ASPA
  Gene Name: aspartoacylase
  Uniprot ID: P45381
  ENST ID: ENST00000263080
  CDS Start-End: 159-1100
ttgtaacagaaaattaaaatatactccactcaagggaattctgtactttgccctttgggtaaagtctcatttacatttctaaacctttcttaagaaaatcgaatttcctttgatctctcttctgaattgcagaaatcagataaaaactacttggtgaaatgacttcttgtcacattgctgaagaacatatacaaaaggttgctatctttggaggaacccatgggaatgagctaaccggagtatttctggttaagcattggctagagaatggcgctgagattcagagaacagggctggaggtaaaaccatttattactaaccccagagcagtgaagaagtgtaccagatatattgactgtgacctgaatcgcatttttgaccttgaaaatcttggcaaaaaaatgtcagaagatttgccatatgaagtgagaagggctcaagaaataaatcatttatttggtccaaaagacagtgaagattcctatgacattatttttgaccttcacaacaccacctctaacatggggtgcactcttattcttgaggattccaggaataactttttaattcagatgtttcattacattaagacttctctggctccactaccctgctacgtttatctgattgagcatccttccctcaaatatgcgaccactcgttccatagccaagtatcctgtgggtatagaagttggtcctcagcctcaaggggttctgagagctgatatcttggatcaaatgagaaaaatgattaaacatgctcttgattttatacatcatttcaatgaaggaaaagaatttcctccctgcgccattgaggtctataaaattatagagaaagttgattacccccgggatgaaaatggagaaattgctgctatcatccatcctaatctgcaggatcaagactggaaaccactgcatcctggggatcccatgtttttaactcttgatgggaagacgatcccactgggcggagactgtaccgtgtaccccgtgtttgtgaatgaggccgcatattacgaaaagaaagaagcttttgcaaagacaactaaactaacgctcaatgcaaaaagtattcgctgctgtttacattagaaatcacttccagcttacatcttacacggtgtcttacaaattctgctagtctgtaagctccttaagagtagggttgtgccttattcaactgcatacatagctcctagcacagtgccttattcggtaggcatctaagcacatttcttaaattaattaatatatctttaaagatatcatattttatgtatgtagcttattcaaagaagtgtttcctatttctatatagtttattatacatgatacttgggtagctcaacattcttaataaacagcctttgtattcagaatataaaattgaaatagatatatataaagttatttgttttattgtgctttgccttactacacttcacggatactgtacttgtactttttttccaaattgaaggtttttggcaaccctgtgtctagaaagtctaacagtgccatgtttccaacagcatgtgctcactccttgtctctgtgtcaccctttgataatatttcaagcttttttatgatttatttattatatctgctatggtgatctgtgatcagtggcctttgatgttactgttgttaagtgttttggggcaccatgaatcgtgcccatgtgagactgcgaacttagtgaatgttgtgtgagttctaactgctctactgaccggccatttccttgtctctctccctgtcctctggcctccctgttccttgagacacaataattaataagtctacagcagactctgtgtgttcaagtgaaagaaagggtcatacttctagaaattaagcttagtaaggaaggcatgtcaaaagctgagacaggctgaaagctaggcctcttgcactggttagccaagttgtgaattcaaagaaaaggatcttgaagaaaattaaaaattctactccagtgcacacacacaaatgataagaaagcaaaacaaccttattgctgatatggagacagttttagtggtctggatagaagatcaaaccagccacacattaagccaaagcatgacccacagcaaggccctaactctcttcaattctgtgaaggctgagagaggtgaggaagctgcaggaagctgggagaggttggttcacaaggtttaaggaaagaagacagctctaaaacctacaagtggaaagcgaaccagcaagttgctgatgtggaagctgtagcaagttatccagaagatgtagctaaaatcattgacaaagatggctacactaaacaacggatcttcagtgtagttgaaacagccttctattggaagaagatgctatctaggactttcctagctagaggggagaaatgaatgcctagcttcaaagcttcaaaggacagcctgactctcttaagagctaacacagctggtgactttgggttaaagccaaagctcattaactgtttcaaaaatcctaaaactcttgttttttgttttttttttgagacggagtcttgctctgtcgtccaggctggagtgcagtggcgcaatctcggctcactgcaagctccgcctcccaggttcatgccattctcctgcctcagcctccccagtagctgagattacaggtgcctgccaccacgcccggctaattttttgcatttttttagtagagatggggtttcactctgctagccaggatggtctcgatctcctgacctcatgatccgcctgcctcggcctcccaaagtgctgggattacaggcatgagccaccacgcccggcccaaaaatcgtaggactctgaagactgatgctaaacctgctgtgtctgagctctataaatggaacaacaaagcctcgctggcagcacatctgtttgcggcatggtttactgtatattttaagcccactgttgagacctactgcttgggaaaaaaaaaaattcctttcaaaatactactgctgattgacaatacaccatgttacccaagagctctgctggagatgtgcgaagagattagcattgttttcgcgcctgctaccacgacatccagccgaagcccatggatcaaggcgtcattgtgactttcaaatctaactatttaagaaatacatttcaggctgggggaggggagaaaaaagaaaaaaaagaaaggaagaaaaaaatcatttcataaggctatagctgccatagatagtgattcctctgatggagctgggcaaagtaaacagaaaacctctggaaaggattcagcattccagatgccattaagaacattcaggatccgtgggaggagatcaaaatatcaacattaacaggagtttggaaaaagtgaattccaaccctcttggatgactctgaggaattcgagacttgagtaaaggaagtcatgcagatgtacagcaagagaatgagaagtggagcctgaagatgtaactgaactgctgcaatctcatgatcacacttgaatggatgaggagtcgcttcttataaatgagcaaaaaagtggtttcttggctgcaatcaactcttgttgcagatgctgtgaacactgttgaaatgacaaaggatttagaatattacgtaaacatagttgataaagcagcagcagggtttaagaggattgactcctattttgaaatgagttcggctgggagaagtggctcatgcctgtcgtcctagcactttgggaggccaaggcagacagagcacctgaggtaaggagttcgagaccagcctggccaacatggtgaaaccccctctctactaaaaataccaacatattagccaggcgtggtggcacgtgcctgtagtcccagctacttgggaggctgaggcagaaggatcacttgaacccaggaggcagaggttgcagtaagccaagactgcgccactgcactccagcctggtggacacagcaagcctccatctcaaaaaaaaaaaaaaaaaaaaaatgagttctactgtgaataaaatgttattaaacagcatttcatgctacagagaaatctttcacgaaaggaagagtcaatcaatgcagcgaacttgttgttttattttaagaaattgtcacggccatcccaaccctcagtgcccaaccaccctgatcaggcagccatcatcaaggcaaggccctccaccagcaaaaagatcatgaattgctgaaagctcaaatgatggttagcttttttagcaataaagcatttttaatgaaggaatgtacatgttttagatataatgctattacacatttaacatactacatatagtgtgagcataacttttacacgtactggaaaatcaaaaaatatgtgtggctcatctgttataatgtttgttttattgtggtgatctggagccaaggctgaaatatctctgaggtatgcctgtaatgtataagtgctagtagaaatgagttgtgcagaattgctatttttttcaatttttatatttgggttaatggtaatatactaagcgtccagtctataaacttcagcattcgttgcgaaatccagaggagacttttaagtgctgttttgtagatgaaatatgaaagagaaacaagggcttaatggtaaagatgacatatgactatattaagaaactgaatggccctttgtccacaaacagtaacccacacagcattgctactgtggcatgcccactgctctgcactgacctcatggagcagagaacctccttcagacacctcacgcaccccctgaggagctaatgtttcttcccaacatggaaaatttggaagaggcctattcttcacagctgtcacttctcattttgaaagaatatgcccacccttattcgcaggcaaggtgtgaggaggtctttgggctccagctgttgccagcagaggtggtgaaagtcaacaacagggcactggacacacatagaaatgtgacccacagctatggtttgcaaatacagtctttcaagaagtcctgccatgtcctaaatgcccaaaccccttgcctcccatgattcttctcctcaaaggaccttctgctggacgccgccccctccctctccagccccaccagggccctccccgccatcctcttaggccacagcagccaataaagagtgtttttattccatgatctgtacccccaatgaatccataatcatagtttcaaatgtatttaccaaaaatactaacattatctggaatgaatgaatgaatgaatgaatgaataaatattatatatttatacattttcattcttccaaagtgaaccccactatgccagttttactccatactcagtgttctggaaagcccatattctttctaaatttttcagcatttttttctatttttgtactttaccaaaattatttacattggaataaactctcttccttctgaattctgtagtaaaaa

SEQ ID NO: 109191 - DNA, 1090 bp, Homo sapiens
  Payload ID: 1448
  Gene Symbol: ASPA
  Gene Name: aspartoacylase
  Uniprot ID: P45381
  ENST ID: ENST00000456349
  CDS Start-End: 149-1090
tttcggaagttaacttggtataagagtatgaaaagcctctgttgctctacttctgaggaaatgctctcctttttcctaataaagctttccacagaagacaaactctgtacacaaaaaacaagaaatcagataaaaactacttggtgaaatgacttcttgtcacattgctgaagaacatatacaaaaggttgctatctttggaggaacccatgggaatgagctaaccggagtatttctggttaagcattggctagagaatggcgctgagattcagagaacagggctggaggtaaaaccatttattactaaccccagagcagtgaagaagtgtaccagatatattgactgtgacctgaatcgcatttttgaccttgaaaatcttggcaaaaaaatgtcagaagatttgccatatgaagtgagaagggctcaagaaataaatcatttatttggtccaaaagacagtgaagattcctatgacattatttttgaccttcacaacaccacctctaacatggggtgcactcttattcttgaggattccaggaataactttttaattcagatgtttcattacattaagacttctctggctccactaccctgctacgtttatctgattgagcatccttccctcaaatatgcgaccactcgttccatagccaagtatcctgtgggtatagaagttggtcctcagcctcaaggggttctgagagctgatatcttggatcaaatgagaaaaatgattaaacatgctcttgattttatacatcatttcaatgaaggaaaagaatttcctccctgcgccattgaggtctataaaattatagagaaagttgattacccccgggatgaaaatggagaaattgctgctatcatccatcctaatctgcaggatcaagactggaaaccactgcatcctggggatcccatgtttttaactcttgatgggaagacgatcccactgggcggagactgtaccgtgtaccccgtgtttgtgaatgaggccgcatattacgaaaagaaagaagcttttgcaaagacaactaaactaacgctcaatgcaaaaagtattcgctgctgtttacattag

SEQ ID NO: 109192 - DNA, 563 bp, Homo sapiens
  Payload ID: 1448
  Gene Symbol: ASPA
  Gene Name: aspartoacylase
  ENST ID: ENST00000577034
  CDS Start-End: 328-563
aggggaagccgcgtggtgtgcgaccctgggcgttgagctccaggcttcctggcaaagaggactgtggattcctggccctgtgaccttgggcaaaaaatgaggaagattcataagtaagttaacacagaattaccaaaaacctcatgagaaagaaatgaagggatgtttcagggtagcttttcgagtcccaagtgatcattgatttggcccttctgtttctgattgtgaaaaagcattctgaaagaatgggcgccggttcaagaggaggtctctgagggtcagcctttggctgtttatagagaaatcagataaaaactacttggtgaaatgacttcttgtcacattgctgaagaacatatacaaaaggttgctatctttggaggaacccatgggaatgagctaaccggagtatttctggttaagcattggctagagaatggcgctgagattcagagaacagggctggaggtaaaaccatttattactaaccccagagcagtgaagaagtgtaccagatatattgactgtgacctgaatcgcatttttgaccttgaaaatcttgg

SEQ ID NO: 109193 - DNA, 584 bp, Homo sapiens
  Payload ID: 1448
  Gene Symbol: ASPA
  Gene Name: aspartoacylase
  ENST ID: ENST00000571278
  CDS Start-End: 137-307
actccactcaagggaattctgtactttgccctttgggtaaagtctcatttacatttctaaacctttcttaagaaaatcgaatttcctttgatctctcttctgaattgcagaaatcagataaaaactacttggtgaaatgacttcttgtcacattgctgaagaacatatacaaaaggttgctatctttggaggaacccatgggaatgagctaaccggagtatttctggttaagcattggctagagaatggcgctgagattcagagaacagggctggagcaaaaaaatgtcagaagatttgccatatgaagtgagaagggctcaagaaataaatcatttatttggtccaaaagacagtgaagattcctatgacattatttttgaccttcacaacaccacctctaacatggggtgcactcttattcttgaggattccaggaataactttttaattcagatgtttcattacattaagacttctctggctccactaccctgctacgtttatctgattgagcatccttccctcaaatatgcgaccactcgttccatagccaagtatcctgtgggtatagaagttggtcct

SEQ ID NO: 109194 - DNA, 2425 bp, Homo sapiens
  Payload ID: 1449
  Gene Symbol: DNPEP
  Gene Name: aspartyl aminopeptidase
  Uniprot ID: Q9ULA0
  ENST ID: ENST00000273075
  CDS Start-End: 222-1679
gcccgccgaggggcggggctgaccgaggtgggcggggcggatgccgaggggcggggagaggtgggcggggaggccaaacatggggcggggcggcgcggccggggaagcgtgatgaaggcctacgagtgcggcgcggcctgaaggggcacgcgggggacctgcaaagctagtgaggggcggggcaggcggcgcggtgggggcgggccgagcccggaggccagatgagcggacacagccccacgcgcggggccatgcaggtggccatgaacggtaaggcccgcaaagaggcggtgcagactgcggctaaggaactcctcaagttcgtgaaccggagtccctctcctttccatgctgtggctgaatgccgcaaccgccttctccaggctggcttcagtgaactcaaggagactgagaaatggaatattaagcccgagagcaagtacttcatgaccaggaactcctccaccatcatagcttttgctgtagggggccagtacgttcctggcaatggcttcagcctcatcggggcccacacggacagcccctgcctccgggtgaaacgtcggtctcgccgcagccaggtgggcttccagcaagtcggtgtggagacctatggtggtgggatctggagcacctggtttgaccgtgacctgactctggctggacgcgtcattgtcaagtgccctacctcaggtcggctggagcagcagctggtgcacgtggagcggcccattcttcgcatcccacacctggccatccatctgcagcgaaatatcaacgagaactttgggcccaacacagagatgcatctagtccccattcttgccacagccatccaggaggagctggagaaggggactcctgagccagggcctctcaatgctgtggatgagcggcaccattcggtcctcatgtccctgctctgtgcccatctggggctgagccccaaggacatagtggagatggagctctgccttgcagacacccagcctgcggtcttgggtggtgcctatgatgagttcatctttgctcctcggctggacaatctgcacagctgcttctgtgccctgcaggccttgatagattcctgtgcaggccctggctccctggccacagagcctcacgtgcgcatggtcacactctatgacaacgaagaggtggggtctgagagtgcacagggagcacagtcactgctgacagagctggtgctgcggcggatctcagcctcgtgccagcacccgacagccttcgaggaagccatacccaagtccttcatgatcagcgcagacatggcccatgctgtgcatcccaactacctggacaagcatgaggagaaccaccggcctttattccacaagggccccgtgatcaaggtgaacagcaagcaacgctatgcttcaaacgcggtgtcagaggccctgatccgagaggtggccaacaaagtcaaggtccccctgcaggatctcatggtccggaatgacaccccctgtggaaccaccattggacctatcttggcttctcggctggggctgcgggtgctggatttaggcagcccccaactggccatgcactctatccgggagatggcctgcaccacaggagtcctccagaccctcaccctcttcaagggcttctttgagctgttcccttctctaagccataatctcttagtggattgagccctcttggaaagacttctctgccatccctttgcacctgagaggggaagttctcagctgagctgaagctggattattaaagtggattgtcactcagactctccgtgctacgcttatttggagactagaggagtgggagttgagcctggcttgaacctttggaaccagaaaagttggggagcaggtggaggaggccacactcctgggagctgatggttttaaatctggttttaaatctcttctctgtctcaagtccatgtctgaagtgggtgaagggtggactggatcctcaagcagaaggtcacttctcccacccctagtcctccacctgggaaatggcctcaacggtcttccctctttccatccccagaatgggtgtcccgctctgccttcagagatcctgttctgcactgggccaccttcagagctgctctgggcagacaaagctgtttctcaccctcccaaaatcccttcccatcccctctcaggagctgcaaagagaagggcacagtctataccttatcacccttcatcatccacttctcagcagtccctggtattacttgattgtgaacatattatcaggaaaaaagattatcattgaaaaaattggaaaagtcaaagtctggccgggtgcagcggctcacatctgtattcccagcattttgggaggccaaggcaggtggatcacttgaggtcagagttcaagaccagccttgccaacatggtgaaacccatctctactt

SEQ ID NO: 109195 - DNA, 925 bp, Homo sapiens
  Payload ID: 1449
  Gene Symbol: DNPEP
  Gene Name: aspartyl aminopeptidase
  ENST ID: ENST00000322176
  CDS Start-End: 114-925
gtgatgaaggcctacgagtgcggcgcggcctgaaggggcacgcgggggacctgcaaagctagtgaggggcggggcaggcggcgcggtgggggcgggccgagcccggaggccagatgagcggacacagccccacgcgcggggccatgcaggtggccatgaacggtaaggcccgcaaagaggcggtgcagactgcggctaaggaactcctcaagttcgtgaaccggagtccctctcctttccatgctgtggctgaatgccgcaaccgccttctccaggctggcttcagtgaactcaaggagactgagaaatggaatattaagcccgagagcaagtacttcatgaccaggaactcctccaccatcatagcttttgctgtagggggccagtacgttcctggcaatggcttcagcctcatcggggcccacacggacagcccctgcctccgggtgaaacgtcggtctcgccgcagccaggtgggcttccagcaagtcggtgtggagacctatggtggtgggatctggagcacctggtttgaccgtgacctgactctggctggacgcgtcattgtcaagtgccctacctcaggtcggctggagcagcagctggtgcacgtggagcggcccattcttcgcatcccacacctggccatccatctgcagcgaaatatcaacgagaactttgggcccaacacagagatgcatctctgtgccctcctcgcaatccccccacaacccacgtctccccacagagtccccattcttgccacagccatccaggaggagctggagaaggggactcctgagccagggcctctcaatgctgtggatgagcggcaccattcggtcctcatgtccctgctctgtgcccatctggggctgagccccaaggacatagtggagatggagctctgccttgcagacaccca

SEQ ID NO: 109196 - DNA, 1657 bp, Homo sapiens
  Payload ID: 1449
  Gene Symbol: DNPEP
  Gene Name: aspartyl aminopeptidase
  ENST ID: ENST00000373963
  CDS Start-End: 136-279
ggggcggcgcggccggggaagcgtgatgaaggcctacgagtgcggcgcggcctgaaggggcacgcgggggacctgcaaagctagtgaggggcggggcaggcggcgcggtgggggcgggccgagcccggaggccagatgagcggacacagccccacgcgcggggccatgcaggtggccatgaacggtaaggcccgcaaagaggcggtgcagactgcggctaaggaactcctcaagttcgtgaaccggagtccctctcctttccatggctggcttcagtgaactcaaggagactgagaaatggaatattaagcccgagagcaagtacttcatgaccaggaactcctccaccatcatagcttttgctgtagggggccagtacgttcctggcaatggcttcagcctcatcggggcccacacggacagcccctgcctccgggtgaaacgtcggtctcgccgcagccaggtgggcttccagcaagtcggtgtggagacctatggtggtgggatctggagcacctggtttgaccgtgacctgactctggctggacgcgtcattgtcaagtgccctacctcaggtcggctggagcagcagctggtgcacgtggagcggcccattcttcgcatcccacacctggccatccatctgcagcgaaatatcaacgagaactttgggcccaacacagagatgcatctagtccccattcttgccacagccatccaggaggagctggagaaggggactcctgagccagggcctctcaatgctgtggatgagcggcaccattcggtcctcatgtccctgctctgtgcccatctggggctgagccccaaggacatagtggagatggagctctgccttgcagacacccagcctgcggtcttgggtggtgcctatgatgagttcatctttgctcctcggctggacaatctgcacagctgcttctgtgccctgcaggccttgatagattcctgtgcaggccctggctccctggccacagagcctcacgtgcgcatggtcacactctatgacaacgaagaggtggggtctgagagtgcacagggagcacagtcactgctgacagagctggtgctgcggcggatctcagcctcgtgccagcacccgacagccttcgaggaagccatacccaagtccttcatgatcagcgcagacatggcccatgctgtgcatcccaactacctggacaagcatgaggagaaccaccggcctttattccacaagggccccgtgatcaaggtgaacagcaagcaacgctatgcttcaaacgcggtgtcagaggccctgatccgagaggtggccaacaaagtcaaggtccccctgcaggatctcatggtccggaatgacaccccctgtggaaccaccattggacctatcttggcttctcggctggggctgcgggtgctggatttaggcagcccccaactggccatgcactctatccgggagatggcctgcaccacaggagtcctccagaccctcaccctcttcaagggcttctttgagctgttcccttctctaagccataatctcttagtggattgagccctcttggaaagacttctctgccatccctttgcacctgagaggggaagttctcagctgagctgaagctggattattaaagtggattgtcactca

SEQ ID NO: 109197 - DNA, 1875 bp, Homo sapiens
  Payload ID: 1449
  Gene Symbol: DNPEP
  Gene Name: aspartyl aminopeptidase
  ENST ID: ENST00000373966
  CDS Start-End: 139-249
ggcggggcggcgcggccggggaagcgtgatgaaggcctacgagtgcggcgcggcctgaaggggcacgcgggggacctgcaaagctagtgaggggcggggcaggcggcgcggtgggggcgggccgagcccggaggccagatgagcggacacagccccacgcgcggggccatgcaggtaagtggctcccgacggccccacttgaatttcgatcccagaccgggtccggcgccctccggggcccaagcttagcgcggtgctgcagtggggccgcctgacccaaagcgaaaccgaaagccccgcggagggtgacctgacgactttcccgggactggaagggggagtcctgcgagagactaggtggccatgaacggtaaggcccgcaaagaggcggtgcagactgcggctaaggaactcctcaagttcgtgaaccggagtccctctcctttccatgctgtggctgaatgccgcaaccgccttctccaggctggcttcagtgaactcaaggagactgagaaatggaatattaagcccgagagcaagtacttcatgaccaggaactcctccaccatcatagcttttgctgtagggggccagtacgttcctggcaatggcttcagcctcatcggggcccacacggacagcccctgcctccgggtgaaacgtcggtctcgccgcagccaggtgggcttccagcaagtcggtgtggagacctatggtggtgggatctggagcacctggtttgaccgtgacctgactctggctggacgcgtcattgtcaagtgccctacctcaggtcggctggagcagcagctggtgcacgtggagcggcccattcttcgcatcccacacctggccatccatctgcagcgaaatatcaacgagaactttgggcccaacacagagatgcatctagtccccattcttgccacagccatccaggaggagctggagaaggggactcctgagccagggcctctcaatgctgtggatgagcggcaccattcggtcctcatgtccctgctctgtgcccatctggggctgagccccaaggacatagtggagatggagctctgccttgcagacacccagcctgcggtcttgggtggtgcctatgatgagttcatctttgctcctcggctggacaatctgcacagctgcttctgtgccctgcaggccttgatagattcctgtgcaggccctggctccctggccacagagcctcacgtgcgcatggtcacactctatgacaacgaagaggtggggtctgagagtgcacagggagcacagtcactgctgacagagctggtgctgcggcggatctcagcctcgtgccagcacccgacagccttcgaggaagccatacccaagtccttcatgatcagcgcagacatggcccatgctgtgcatcccaactacctggacaagcatgaggagaaccaccggcctttattccacaagggccccgtgatcaaggtgaacagcaagcaacgctatgcttcaaacgcggtgtcagaggccctgatccgagaggtggccaacaaagtcaaggtccccctgcaggatctcatggtccggaatgacaccccctgtggaaccaccattggacctatcttggcttctcggctggggctgcgggtgctggatttaggcagcccccaactggccatgcactctatccgggagatggcctgcaccacaggagtcctccagaccctcaccctcttcaagggcttctttgagctgttcccttctctaagccataatctcttagtggattgagccctcttggaaagacttctctgccatccctttgcacctgagaggggaagttctcagctgagctgaagctggattattaaagtggattgtcactca

SEQ ID NO: 109198 - DNA, 1578 bp, Homo sapiens
  Payload ID: 1449
  Gene Symbol: DNPEP
  Gene Name: aspartyl aminopeptidase
  ENST ID: ENST00000373972
  CDS Start-End: 248-1480
taagagtacatagttgatggggcagttgtgaagattaaacgaggtggctgtggcgagagacagcactttgtaccgtacccgtcggacccggtggccatgaacggtaaggcccgcaaagaggcggtgcagactgcggctaaggaactcctcaagttcgtgaaccggagtccctctcctttccatggctggcttcagtgaactcaaggagactgagaaatggaatattaagcccgagagcaagtacttcatgaccaggaactcctccaccatcatagcttttgctgtagggggccagtacgttcctggcaatggcttcagcctcatcggggcccacacggacagcccctgcctccgggtgaaacgtcggtctcgccgcagccaggtgggcttccagcaagtcggtgtggagacctatggtggtgggatctggagcacctggtttgaccgtgacctgactctggctggacgcgtcattgtcaagtgccctacctcaggtcggctggagcagcagctggtgcacgtggagcggcccattcttcgcatcccacacctggccatccatctgcagcgaaatatcaacgagaactttgggcccaacacagagatgcatctagtccccattcttgccacagccatccaggaggagctggagaaggggactcctgagccagggcctctcaatgctgtggatgagcggcaccattcggtcctcatgtccctgctctgtgcccatctggggctgagccccaaggacatagtggagatggagctctgccttgcagacacccagcctgcggtcttgggtggtgcctatgatgagttcatctttgctcctcggctggacaatctgcacagctgcttctgtgccctgcaggccttgatagattcctgtgcaggccctggctccctggccacagagcctcacgtgcgcatggtcacactctatgacaacgaagaggtggggtctgagagtgcacagggagcacagtcactgctgacagagctggtgctgcggcggatctcagcctcgtgccagcacccgacagccttcgaggaagccatacccaagtccttcatgatcagcgcagacatggcccatgctgtgcatcccaactacctggacaagcatgaggagaaccaccggcctttattccacaagggccccgtgatcaaggtgaacagcaagcaacgctatgcttcaaacgcggtgtcagaggccctgatccgagaggtggccaacaaagtcaaggtccccctgcaggatctcatggtccggaatgacaccccctgtggaaccaccattggacctatcttggcttctcggctggggctgcgggtgctggatttaggcagcccccaactggccatgcactctatccgggagatggcctgcaccacaggagtcctccagaccctcaccctcttcaagggcttctttgagctgttcccttctctaagccataatctcttagtggattgagccctcttggaaagacttctctgccatccctttgcacctgagaggggaagttctcagctgagctgaagctggattattaaagtggattgtcactcaga

SEQ ID NO: 109199 - DNA, 896 bp, Homo sapiens
  Payload ID: 1449
  Gene Symbol: DNPEP
  Gene Name: aspartyl aminopeptidase
  ENST ID: ENST00000429013
  CDS Start-End: 77-896
cgggctgaagctttcaacggagtttcagccctgggtttgggtctctcggtggggacgggcggaagcagaggtggccatgaacggtaaggcccgcaaagaggcggtgcagactgcggctaaggaactcctcaagttcgtgaaccggagtccctctcctttccatgctgtggctgaatgccgcaaccgccttctccaggctggcttcagtgaactcaaggagactgagaaatggaatattaagcccgagagcaagtacttcatgaccaggaactcctccaccatcatagcttttgctgtagggggccagtacgttcctggcaatggcttcagcctcatcggggcccacacggacagcccctgcctccgggtgaaacgtcggtctcgccgcagccaggtgggcttccagcaagtcggtgtggagacctatggtggtgggatctggagcacctggtttgaccgtgacctgactctggctggacgcgtcattgtcaagtgccctacctcaggtcggctggagcagcagctggtgcacgtggagcggcccattcttcgcatcccacacctggccatccatctgcagcgaaatatcaacgagaactttgggcccaacacagagatgcatctagtccccattcttgccacagccatccaggaggagctggagaaggggactcctgagccagggcctctcaatgctgtggatgagcggcaccattcggtcctcatgtccctgctctgtgcccatctggggctgagccccaaggacatagtggagatggagctctgccttgcagacacccagcctgcggtcttgggtggtgcctatgatgagttcatctttgctcctcggctggacaatctgcacagctgcttctgtgccctgcaggccttgatag

SEQ ID NO: 109200 - DNA, 1091 bp, Homo sapiens
  Payload ID: 1449
  Gene Symbol: DNPEP
  Gene Name: aspartyl aminopeptidase
  ENST ID: ENST00000457935
  CDS Start-End: 98-1091
tgcaagttggggcccaaggcaggggaaggatccggcaaaaaaggcacacggttcaggcctgtccactccagccttgggaggaggtgagcaggtcaccatggctcggagcctctccatcatgttcgtccccaacagctggctcaatggctaccacaaggtggccatgaacggtaaggcccgcaaagaggcggtgcagactgcggctaaggaactcctcaagttcgtgaaccggagtccctctcctttccatgctgtggctgaatgccgcaaccgccttctccaggctggcttcagtgaactcaaggagactgagaaatggaatattaagcccgagagcaagtacttcatgaccaggaactcctccaccatcatagcttttgctgtagggggccagtacgttcctggcaatggcttcagcctcatcggggcccacacggacagcccctgcctccgggtgaaacgtcggtctcgccgcagccaggtgggcttccagcaagtcggtgtggagacctatggtggtgggatctggagcacctggtttgaccgtgacctgactctggctggacgcgtcattgtcaagtgccctacctcaggtcggctggagcagcagctggtgcacgtggagcggcccattcttcgcatcccacacctggccatccatctgcagcgaaatatcaacgagaactttgggcccaacacagagatgcatctagtccccattcttgccacagccatccaggaggagctggagaaggggactcctgagccagggcctctcaatgctgtggtcttgggtggtgcctatgatgagttcatctttgctcctcggctggacaatctgcacagctgcttctgtgccctgcaggccttgatagattcctgtgcaggccctggctccctggccacagagcctcacgtgcgcatggtcacactctatgacaacgaagaggtggggtctgagagtgcacagggagcacagtcactgctgacagagctggtgctgcggcggatctcagcctcgtgccagcacccgacagccttcgaggaagccatacccaagtccttcatgatcagcgcagacatggcccatg

SEQ ID NO: 109201 - DNA, 638 bp, Homo sapiens
  Payload ID: 1449
  Gene Symbol: DNPEP
  Gene Name: aspartyl aminopeptidase
  ENST ID: ENST00000434339
  CDS Start-End: 226-638
aaggcaggggaaggatccggcaaaaaaggcacacggttcaggcctgtccactccagccttgggaggaggtggccatgaacggtaaggcccgcaaagaggcggtgcagactgcggctaaggaactcctcaagttcgtgaaccggagtccctctcctttccatggctggcttcagtgaactcaaggagactgagaaatggaatattaagcccgagagcaagtacttcatgaccaggaactcctccaccatcatagcttttgctgtagggggccagtacgttcctggcaatggcttcagcctcatcggggcccacacggacagcccctgcctccgggtgaaacgtcggtctcgccgcagccaggtgggcttccagcaagtcggtgtggagacctatggtggtgggatctggagcacctggtttgaccgtgacctgactctggctggacgcgtcattgtcaagtgccctacctcaggtcggctggagcagcagctggtgcacgtggagcggcccattcttcgcatcccacacctggccatccatctgcagcgaaatatcaacgagaactttgggcccaacacagagatgcatctagtccccattcttgccacagccatccaggaggagctggagaaggggac

SEQ ID NO: 109202 - DNA, 577 bp, Homo sapiens
  Payload ID: 1449
  Gene Symbol: DNPEP
  Gene Name: aspartyl aminopeptidase
  ENST ID: ENST00000430206
  CDS Start-End: 227-577
gggctgaagctttcaacggagtttcagccctgggtttgggtctctcggtggggacgggcggaagcagaggtggccatgaacggtaaggcccgcaaagaggcggtgcagactgcggctaaggaactcctcaagttcgtgaaccggagtccctctcctttccatggctggcttcagtgaactcaaggagactgagaaatggaatattaagcccgagagcaagtacttcatgaccaggaactcctccaccatcatagcttttgctgtagggggccagtacgttcctggcaatggcttcagcctcatcggggcccacacggacagcccctgcctccgggtgaaacgtcggtctcgccgcagccaggtgggcttccagcaagtcggtgtggagacctatggtggtgggatctggagcacctggtttgaccgtgacctgactctggctggacgcgtcattgtcaagtgccctacctcaggtcggctggagcagcagctggtgcacgtggagcggcccattcttcgcatcccacacctggccatccatctgcagcgaaatatcaacgagaactttgggcccaac

SEQ ID NO: 109203 - DNA, 482 bp, Homo sapiens
  Payload ID: 1449
  Gene Symbol: DNPEP
  Gene Name: aspartyl aminopeptidase
  ENST ID: ENST00000519698
  CDS Start-End: 82-219
aggcaggggaaggatccggcaaaaaaggcacacggttcaggcctgtccactccagccttgggaggaggtgagcaggtcaccatggctcggagcctctccatcatgttcgtccccaacagctggctcaatggctaccacaagcacctgttaaaagtggagatccctgggcctcagcccaaatcttccaaatcaggagtttcaggtggccatgaacggtaaggcccgcaaagaggcggtgcagactgcggctaaggaactcctcaagttcgtgaaccggagtccctctcctttccatgctgtggctgaatgccgcaaccgccttctccaggctggcttcagtgaactcaaggagactgagaaatggaatattaagcccgagagcaagtacttcatgaccaggaactcctccaccatcatagcttttgctgtagggggccagtacgttcctggcaatggcttcagcctcatcggggcccacacgg

SEQ ID NO: 109204 - DNA, 673 bp, Homo sapiens
  Payload ID: 1449
  Gene Symbol: DNPEP
  Gene Name: aspartyl aminopeptidase
  ENST ID: ENST00000520694
  CDS Start-End: 3-113
agatgagcggacacagccccacgcgcggggccatgcaggtaagtggctcccgacggccccacttgaatttcgatcccagaccgggtccggcgccctccggggcccaagcttagcgcggtgctgcagtggggccgcctgacccaaagcgaaaccgaaagccccgcggagggtgacctgacgactttcccgggactggaagggggagtcctgcgagagactaggtggccatgaacggtaaggcccgcaaagaggcggtgcagactgcggctaaggaactcctcaagttcgtgaaccggagtccctctcctttccatggctggcttcagtgaactcaaggagactgagaaatggaatattaagcccgagagcaagtacttcatgaccaggaactcctccaccatcatagcttttgctgtagggggccagtacgttcctggcaatggcttcagcctcatcggggcccacacggacagcccctgcctccgggtgaaacgtcggtctcgccgcagccaggtgggcttccagcaagtcggtgtggagacctatggtggtgggatctggagcacctggtttgaccgtgacctgactctggctggacgcgtcattgtcaagtgccctacctcaggtcggctggagcagcagctggtgcacgtggagcggcccattcttcgca

SEQ ID NO: 109205 - DNA, 714 bp, Homo sapiens
  Payload ID: 1449
  Gene Symbol: DNPEP
  Gene Name: aspartyl aminopeptidase
  ENST ID: ENST00000521459
  CDS Start-End: 41-714
gcaggcggcgcggtgggggcgggccgagcccggaggccagatgagcggacacagccccacgcgcggggccatgcaggtggccatgaacggtaaggcccgcaaagaggcggtgcagactgcggctaaggaactcctcaagttcgtgaaccggagtccctctcctttccatgctgtggctgaatgccgcaaccgccttctccaggctggcttcagtgaactcaaggagactgagaaatggaatattaagcccgagagcaagtacttcatgaccaggaactcctccaccatcatagcttttgctgtagggggccagtacgttcctggcaatggcttcagcctcatcggggcccacacggacagcccctgcctccgggtgaaacgtcggtctcgccgcagccaggtgggcttccagcaagtcggtgtggagacctatggtggtgggatctggagcacctggtttgaccgtgacctgactctggctggacgcgtcattgtcaagtgccctacctcaggtcggctggagcagcagctggtgcacgtggagcggcccattcttcgcatcccacacctggccatccatctgcagcgaaatatcaacgagaactttgggcccaacacagagatgcatctgtcttgggtggtgcctatgatgagttcatctttgctcctcggctggacaatctgcacagctgcttctgtgccctgcaggccttg

SEQ ID NO: 109206 - DNA, 576 bp, Homo sapiens
  Payload ID: 1449
  Gene Symbol: DNPEP
  Gene Name: aspartyl aminopeptidase
  ENST ID: ENST00000519905
  CDS Start-End: 308-576
aggcacacggttcaggcctgtccactccagccttgggaggaggtgagcaggtcaccatggctcggagcctctccatcatgttcgtccccaacagctggctcaatggctaccacaagtaaaatgggaaccatggtcctcggctgagagtggggatggaggaagacactggatgaaactctcctccaggaaagcaaagaagcaaatggcccaggagatgcaataggacctctgggcagtacaaagaacacacttaggtggctgtggcgagagacagcactttgtaccgtacccgtcggacccggtggccatgaacggtaaggcccgcaaagaggcggtgcagactgcggctaaggaactcctcaagttcgtgaaccggagtccctctcctttccatgctgtggctgaatgccgcaaccgccttctccaggctggcttcagtgaactcaaggagactgagaaatggaatattaagcccgagagcaagtacttcatgaccaggaactcctccaccatcatagcttttgctgtagggggccagtacgttcctggcaatggcttcagcctcatcggggccca

SEQ ID NO: 109207 - DNA, 1662 bp, Homo sapiens
  Payload ID: 1449
  Gene Symbol: DNPEP
  Gene Name: aspartyl aminopeptidase
  ENST ID: ENST00000523282
  CDS Start-End: 83-1564
aaggcaggggaaggatccggcaaaaaaggcacacggttcaggcctgtccactccagccttgggaggaggtgagcaggtcaccatggctcggagcctctccatcatgttcgtccccaacagctggctcaatggctaccacaaggtggccatgaacggtaaggcccgcaaagaggcggtgcagactgcggctaaggaactcctcaagttcgtgaaccggagtccctctcctttccatgctgtggctgaatgccgcaaccgccttctccaggctggcttcagtgaactcaaggagactgagaaatggaatattaagcccgagagcaagtacttcatgaccaggaactcctccaccatcatagcttttgctgtagggggccagtacgttcctggcaatggcttcagcctcatcggggcccacacggacagcccctgcctccgggtgaaacgtcggtctcgccgcagccaggtgggcttccagcaagtcggtgtggagacctatggtggtgggatctggagcacctggtttgaccgtgacctgactctggctggacgcgtcattgtcaagtgccctacctcaggtcggctggagcagcagctggtgcacgtggagcggcccattcttcgcatcccacacctggccatccatctgcagcgaaatatcaacgagaactttgggcccaacacagagatgcatctagtccccattcttgccacagccatccaggaggagctggagaaggggactcctgagccagggcctctcaatgctgtggatgagcggcaccattcggtcctcatgtccctgctctgtgcccatctggggctgagccccaaggacatagtggagatggagctctgccttgcagacacccagcctgcggtcttgggtggtgcctatgatgagttcatctttgctcctcggctggacaatctgcacagctgcttctgtgccctgcaggccttgatagattcctgtgcaggccctggctccctggccacagagcctcacgtgcgcatggtcacactctatgacaacgaagaggtggggtctgagagtgcacagggagcacagtcactgctgacagagctggtgctgcggcggatctcagcctcgtgccagcacccgacagccttcgaggaagccatacccaagtccttcatgatcagcgcagacatggcccatgctgtgcatcccaactacctggacaagcatgaggagaaccaccggcctttattccacaagggccccgtgatcaaggtgaacagcaagcaacgctatgcttcaaacgcggtgtcagaggccctgatccgagaggtggccaacaaagtcaaggtccccctgcaggatctcatggtccggaatgacaccccctgtggaaccaccattggacctatcttggcttctcggctggggctgcgggtgctggatttaggcagcccccaactggccatgcactctatccgggagatggcctgcaccacaggagtcctccagaccctcaccctcttcaagggcttctttgagctgttcccttctctaagccataatctcttagtggattgagccctcttggaaagacttctctgccatccctttgcacctgagaggggaagttctcagctgagctgaagctggattattaaagtggattgtcactcaga

SEQ ID NO: 109208 - DNA, 2107 bp, Homo sapiens
  Payload ID: 1450
  Gene Symbol: AGA
  Gene Name: aspartylglucosaminidase
  Uniprot ID: P20933
  ENST ID: ENST00000264595
  CDS Start-End: 129-1169
agggacgcctgagcgaacccccgagagagcgggcgtgggcgccaggcgggcggggcactggggattaattgttcggcgatcgctggctgccgggacttttctcgcgctggtctcttcggtggtcagggatggcgcggaagtcgaacttgcctgtgcttctcgtgccgtttctgctctgccaggccctagtgcgctgctccagccctctgcccctggtcgtcaacacttggccctttaagaatgcaaccgaagcagcgtggagggcattagcatctggaggctctgccctggatgcagtggagagcggctgtgccatgtgtgagagagagcagtgtgacggctctgtaggctttggaggaagtcctgatgaacttggagaaaccacactagatgccatgatcatggatggcactactatggatgtaggagcagtaggagatctcagacgaattaaaaatgctattggtgtggcacggaaagtactggaacatacaacacacacacttttagtaggagagtcagccaccacatttgctcaaagtatggggtttatcaatgaagacttatctaccactgcttctcaagctcttcattcagattggcttgctcggaattgccagccaaattattggaggaatgttataccagatccctcaaaatactgcggaccctacaaaccacctggtatcttaaagcaggatattcctatccataaagaaacagaagatgatcgtggtcatgacactattggcatggttgtaatccataagacaggacatattgctgctggtacatctacaaatggtataaaattcaaaatacatggccgtgtaggagactcaccaatacctggagctggagcctatgctgacgatactgcaggggcagccgcagccactgggaatggtgatatattgatgcgcttcctgccaagctaccaagctgtagaatacatgagaagaggagaagatccaaccatagcttgccaaaaagtgatttcaagaatccagaagcattttccagaattctttggggctgttatatgtgccaatgtgactggaagttacggtgctgcttgcaataaactttcaacatttactcagtttagtttcatggtttataattccgaaaaaaatcagccaactgaggaaaaagtggactgcatctaatccatctttactgtcaacatctgtatttaaagaagaaagaaacaaaggctgaaaaggctgctcactctcatcatctagtgttcctcatgtgttctaaagtctttttgtaaaataaacacaaaaataaatttatgttgaattggcactttctatatctgaaattgtattatctatttttatttaacctttcttatattatctgaagatgaatatgtatgtggctgtattttgtatatatttaagttttaagtgacacttggatttctgatcagtgttgcaaaaaattgctactttgagatttatttccacagtgatatattaaacccaaaaggaatcatcatatttggatgcttaaaatagagtatacaagttttttagacccaaagaaaaaaacagcagagtctcagcatgatcagtcctgattgaatttcattatgtcacagtgatgcatgtcttagcactgattattggttttacttaatattccctaaaaacttgaggaaggaagatgatagaacatgagatactctttgttttgtacatactagaaaatacagctatcttctgatgagcaattgtgttgattttctttgcttttttcctcttatggagctctcagtgtgtgaaagttctaaagccacaagaatcaatgatgttttagctgctaatatttagtattgatcgtttcttttaaaaatgatttggggaacttgatctgtactgtaattttactaattccttgtgcagaggtgggtatggcaattagaagtcaagaaatgggttgtttagcttggtttgtttccctaacttctgattaactctctgtatgacaactctacagaagttgtgcgcgtgctttctcagcagcatttttccttcaaaatcatctttttaatcaacagtcattaataaatgtacatgtacgatattcaaacttt

SEQ ID NO: 109209 - DNA, 414 bp, Homo sapiens
  Payload ID: 1450
  Gene Symbol: AGA
  Gene Name: aspartylglucosaminidase
  ENST ID: ENST00000510635
  CDS Start-End: 1-414
taggagatctcagacgaattaaaaatgctattggtgtggcacggaaagtactggaacatacaacacacacacttttagtaggagagtcagccaccacatttgctcaaagtatggggtttatcaatgaagacttatctaccactgcttctcaagctcttcattcagattggcttgctcggaattgccagccaaattattggaggaatgttataccagatccctcaaaatactgcggaccctacaaaccacctggtatcttaaagcaggatattcctatccataaagaaacagaagatgatcgtggtcatgacactattggcatggttgtaatccataagacaggacatattgctgctggtacatctacaaatggagactcaccaatacctggagctggagcctatgctgacgata

SEQ ID NO: 109210 - DNA, 464 bp, Homo sapiens
  Payload ID: 1450
  Gene Symbol: AGA
  Gene Name: aspartylglucosaminidase
  ENST ID: ENST00000502310
  CDS Start-End: 1-464
cggaaagtactggaacatacaacacacacacttttagtaggagagtcagccaccacatttgctcaaagtatggggtttatcaatgaagacttatctaccactgcttctcaagctcttcattcagattggcttgctcggaattgccagccaaattattggaggaatgttataccagatccctcaaaatactgcggaccctacaaaccacctggtatcttaaagcaggatattcctatccataaagaaacagaagatgatcgtggtcatgacactattggagactcaccaatacctggagctggagcctatgctgacgatactgcaggggcagccgcagccactgggaatggtgatatattgatgcgcttcctgccaagctaccaagctgtagaatacatgagaagaggagaagatccaaccatagcttgccaaaaagtgatttcaagaatccagaagcattttcc

SEQ ID NO: 109211 - DNA, 2361 bp, Homo sapiens
  Payload ID: 1451
  Gene Symbol: DARS
  Gene Name: aspartyl-tRNA synthetase
  Uniprot ID: P14868
  ENST ID: ENST00000264161
  CDS Start-End: 217-1722
gagaccctgcgcgcggccgccagcgctccgggatctcgagatagccgcagctctcgcgatctttctggagccgcacctccacgcggagtccgagcgcgtgtgctgagaccccagggtcgggagggcggagactgggagggagggagaagcccctttggcctgccttacggaagcctgcgagggagggtggtgtccactgcccagttccgtgtcccgatgcccagcgccagcgccagccgcaagagtcaggagaagccgcgggagatcatggacgcggcggaagattatgctaaagagagatatggaatatcttcaatgatacaatcacaagaaaaaccagatcgagttttggttcgggttagagacttgacaatacaaaaagctgatgaagttgtttgggtacgtgcaagagttcatacaagcagagctaaagggaaacagtgcttcttagtcctacgtcagcagcagtttaatgtccaggctcttgtggcggtgggagaccatgcaagcaagcagatggttaaatttgctgccaacatcaacaaagagagcattgtggatgtagaaggtgttgtgagaaaagtgaatcagaaaattggaagctgtacacagcaagacgttgagttacatgttcagaagatttatgtgatcagtttggctgaaccccgtctgcccctgcagctggatgatgctgttcggcctgaggcagaaggagaagaggaaggaagagctactgttaaccaggatacaagattagacaacagagtcattgatcttaggacatcaactagtcaggcagtcttccgtctccagtctggcatctgccatctcttccgagaaactttaattaacaaaggttttgtggaaatccaaactcctaaaattatttcagctgccagtgaaggaggagccaatgtttttactgtgtcatattttaaaaataatgcatacctggctcagtccccacagctatataagcaaatgtgcatttgtgctgattttgagaaggttttctctattggaccagtattcagagcggaagactctaatacccatagacatctaactgagtttgttggtttggacattgaaatggcttttaattaccattaccacgaagttatggaagaaattgctgacaccatggtacaaatattcaaaggacttcaagaaaggtttcagactgaaattcaaacagtgaataaacagttcccatgtgagccattcaaatttttggagccaactctaagactagaatattgtgaagcattggctatgcttagggaagctggagtcgaaatgggagatgaagacgatctgagcacaccaaatgaaaagctgttgggtcatttggtaaaggaaaagtatgatacagatttttatattcttgataaatatccattggctgtaagacctttctataccatgcctgacccaagaaatcccaaacagtccaactcttacgatatgttcatgagaggagaagaaatattgtcaggagctcaaagaatacatgatcctcaactgctaacagagagagctttacatcatggaattgatttggagaaaattaaggcttacattgattccttccgctttggagcccctcctcatgctggtggaggcattggattggaacgagttactatgctgtttctgggattgcataatgttcgtcagacctccatgttccctcgtgatcccaaacgactcactccttaaattcacactttgccacttaactccagtgtggatgacagagcgagaccctgcctcaaaaaaaaaaaaaaaaaaagaaagccacacttattcttttcagtaacctgctagtgcacaggctgtactttaggtacttaaaatatgcactagaataaatttgcaaggccctaaaatatcactgttatttttggagtaattcagtataggttcgtttaaaagagatttttataacttcagacatgcatcagtaggaaataacttgagaaattcatatggttatgttacaaattcatattctgttactacagtaaacgttaagagttttaaacagttaagattgtacaatttttcttcttttctatattacaagggccccagtgttaatgtcttagattttcagtatttgaacttatttttttaaattctgtcattgagataagaataattcaggtagcatctgaaattttaatgaatgtataattggcatatcatggaaaattaaccagaaagtatcagttcttaaaagttatgcctagaaattatgtaaagctaaactactggttagaaagtattcagtgtaatattgtattaatttgttaaattctaaacttgaatttcaataaaattttaaagctaattgta

SEQ ID NO: 109212 - DNA, 623 bp, Homo sapiens
  Payload ID: 1451
  Gene Symbol: DARS
  Gene Name: aspartyl-tRNA synthetase
  ENST ID: ENST00000422708
  CDS Start-End: 1-567
gttggtttggacattgaaatggcttttaattaccattaccacgaagttatggaagaaattgctgacaccatggtacaaatattcaaaggacttcaagaaaggtttcagactgaaattcaaacagtgaataaacagttcccatgtgagccattcaaatttttggagccaactctaagactagaatattgtgaagcattggctatgcttagggaagctggagtcgaaatgggagatgaagacgatctgagcacaccaaatgaaaagctgttgggtcatttggtaaaggaaaagaaacagtccaactcttacgatatgttcatgagaggagaagaaatattgtcaggagctcaaagaatacatgatcctcaactgctaacagagagagctttacatcatggaattgatttggagaaaattaaggcttacattgattccttccgctttggagcccctcctcatgctggtggaggcattggattggaacgagttactatgctgtttctgggattgcataatgttcgtcagacctccatgttccctcgtgatcccaaacgactcactccttaaattcacactttgccacttaactccagtgtggatgacagagcgagaccctgcctcaa

SEQ ID NO: 109213 - DNA, 543 bp, Homo sapiens
  Payload ID: 1451
  Gene Symbol: DARS
  Gene Name: aspartyl-tRNA synthetase
  ENST ID: ENST00000449218
  CDS Start-End: 138-543
gccgagcggagttgaaagggctgttagaagaatggagcagaagtcgcagttgggacgaagctgaagagagctggcattcgcccaggtctacagccagccacctggattatgctaaagagagatatggaatatcttcaatgatacaatcacaagaaaaaccagatcgagttttggttcgggttagagacttgacaatacaaaaagctgatgaagttgtttgggtacgtgcaagagttcatacaagcagagctaaagggaaacagtgcttcttagtcctacgtcagcagcagtttaatgtccaggctcttgtggcggtgggagaccatgcaagcaagcagatggttaaatttgctgccaacatcaacaaagagagcattgtggatgtagaaggtgttgtgagaaaagtgaatcagaaaattggaagctgtacacagcaagacgttgagttacatgttcagaagatttatgtgatcagtttggctgaaccccgtctgcccctgcagctggatgatgctgttcggcctgaggcagaaggagaagagg

SEQ ID NO: 109214 - DNA, 651 bp, Homo sapiens
  Payload ID: 1451
  Gene Symbol: DARS
  Gene Name: aspartyl-tRNA synthetase
  ENST ID: ENST00000441323
  CDS Start-End: 106-651
gaaagggctgttagaagaatggagcagaagtcgcagttgggacgaagctgaagagagctggcattcgcccaggattatgctaaagagagatatggaatatcttcaatgatacaatcacaagaaaaaccagatcgagttttggttcgggttagagacttgacaatacaaaaagctgatgaagttgtttgggtacgtgcaagagttcatacaagcagagctaaagggaaacagtgcttcttagtcctacgtcagcagcagtttaatgtccaggctcttgtggcggtgggagaccatgcaagcaagcagatggttaaatttgctgccaacatcaacaaagagagcattgtggatgtagaaggtgttgtgagaaaagtgaatcagaaaattggaagctgtacacagcaagacgttgagttacatgttcagaagatttatgtgatcagtttggctgaaccccgtctgcccctgcagctggatgatgctgttcggcctgaggcagaaggagaagaggaaggaagagctactgttaaccaggatacaagattagacaacagagtcattgatcttaggacatcaactagtcaggcagtcttccgtctccagtctggcatctgccatctcttccgagaaactttaattaacaaaggtttt

SEQ ID NO: 109215 - DNA, 731 bp, Homo sapiens
  Payload ID: 1451
  Gene Symbol: DARS
  Gene Name: aspartyl-tRNA synthetase
  ENST ID: ENST00000456565
  CDS Start-End: 205-731
acagggactggtaacccatgctgccttggcaagccaactgcactcctctgtcccaacaagcagggcaatggattgcgaagaggcctcctccgtccccaagcagctacgtcgcccaggggaagagagaaggcgggaaagtccaagagaggagaaaccaaggcccgcgcttaggattatgctaaagagagatatggaatatcttcaatgatacaatcacaagaaaaaccagatcgagttttggttcgggttagagacttgacaatacaaaaagctgatgaagttgtttgggtacgtgcaagagttcatacaagcagagctaaagggaaacagtgcttcttagtcctacgtcagcagcagtttaatgtccaggctcttgtggcggtgggagaccatgcaagcaagcagatggttaaatttgctgccaacatcaacaaagagagcattgtggatgtagaaggtgttgtgagaaaagtgaatcagaaaattggaagctgtacacagcaagacgttgagttacatgttcagaagatttatgtgatcagtttggctgaaccccgtctgcccctgcagctggatgatgctgttcggcctgaggcagaaggagaagaggaaggaagagctactgttaaccaggatacaagattagacaacagagtcattgatcttaggacatcaactagtcaggcagtcttccgtctccagtctggcatctgccatctcttccgagaaac

SEQ ID NO: 109216 - DNA, 717 bp, Homo sapiens
  Payload ID: 1451
  Gene Symbol: DARS
  Gene Name: aspartyl-tRNA synthetase
  ENST ID: ENST00000435076
  CDS Start-End: 1-539
agggcggagactgggagggagggagaagcccctttggcctgccttacggaagcctgcgagggagggtggtgtccactgcccagttccgtgtcccgatgcccagcgccagcgccagccgcaagagtcaggagaagccgcgggagatcatggacgcggcggaagattatgctaaagagagatatggaatatcttcaatgatacaatcacaagaaaaaccagatcgagttttggttcgggttagagacttgacaatacaaaaagctgatgaagttgtttgggtacgtgcaagagttcatacaagcagagctaaagggaaacagtgcttcttagtcctacgtcagcagcagtttaatgtccaggctcttgtggcggtgggagaccatgcaagcaagcagatggttaaatttgctgccaacatcaacaaagagagcattgtggatgtagaaggtgttgtgagaaaagtgaatcagaaaattggaagctgtacacagcaagacgttgagttacatgttcagaaggtaagttttttcaaaatataaaatcgcatatagaaatagatttgggttctaatagttttcatgtcaaatttatatgttcttactaattaatgtaaaatactgaggtttataaattagttactgaatcaattagcttttgttatataacaaatcaccccagtacttagtgacttgaaacaacaaacatttatttgcttac

SEQ ID NO: 109217 - DNA, 3506 bp, Homo sapiens
  Payload ID: 1452
  Gene Symbol: DARS2
  Gene Name: aspartyl-tRNA synthetase 2, mitochondrial
  Uniprot ID: Q6PI48
  ENST ID: ENST00000361951
  CDS Start-End: 728-2665
cacttaaccactatcgtcaacctttccaatcgtgctcggttgctcctcagttttcctaccggtgcgaagctttctctcaaatttccgcccgtagtaggcatggcggcggcacctcaccactgattcgttgaattccttcccggtaatcttgggcactagcgggcggagttgaagggcgcttggaccccagcggcgatctgtgtttgggttcgcgctctgggagaattttggctttgctcgccttcctctttcagaagactcgaaatcggccagcaggtctgcgagatttgaaacgcgactgttactccttgttttccggttctggccgcgggagcctctcgagaagcgtggaaagaggagaagggcgtataccttgtgaccgcctctggttgtcttgggctcgcgcctggcgccgctacgtggagtcgctctctcgtcgtcacttttggctgccgacttgttgagtagaagtgcagactgatgctttaagactcagggagaggtctttcccttatctccaccccagcaagcaccccagagaccttggagatttgtcttgtttctagacacgtgtactccaatgttgtgcggaggaggccttaaatattcgagaagagagtgggaactcctggaattttaagggatttctgtgtatttccaaaactgacttttaactaccggcagcgtgggatttcgtgattgtttttcgccatcgtgtggctccaacatgtacttcccttcttggttaagtcagctgtacaggggtttatccagacccatcagaaggaccacccaaccgatctggggttctctctacagaagtctgttgcagagttcacagaggagaattccagaattcagtagctttgttgtccggaccaacacatgtggagagttgcgttcgtctcacttaggccaagaagtcaccttgtgtggatggattcagtaccgaaggcaaaacacattcttggtcctaagagatttcgatgggcttgttcaagttatcattccccaggatgagtcggcagcctctgtgaagaagattttatgtgaagcccctgtggaatctgtggtgcaagtgtctggtacagtcatttcccgtcctgcaggacaagagaatccaaaaatgccaacaggtgagattgaaatcaaagttaaaacagctgagcttctgaatgcctgcaagaagctgccctttgaaattaagaacttcgtgaagaaaacagaggctcttcggttgcagtatcgctacttagacttgcgtagtttccaaatgcagtataacctgcgactgaggtcccagatggtcatgaaaatgcgggaatatctctgtaatctgcatgggtttgtggatatagaaacccccacattgtttaagaggaccccagggggtgccaaagagtttttagtaccatccagggaacctggaaagttttattctctccctcagagtcctcaacagtttaagcaacttctgatggttggcggtttagacagatattttcaggttgcccgatgttatcgagatgaaggttcaagaccagacagacagcctgagtttactcagattgacatagagatgtcatttgtagaccagactgggatccagagtttaattgagggtttgctccagtattcctggcccaatgacaaagatcctgtggttgttccttttcctactatgacttttgctgaggtgctggccacctatggaactgataaacctgacactcgctttggaatgaagattatagatatcagtgatgtgtttagaaacacagagattggatttcttcaagatgcacttagtaagccccatggaactgtgaaagccatatgtatccctgaaggagcaaaatacttaaaaaggaaagacattgaatccattagaaactttgcagctgaccattttaatcaggaaatcttacctgtattccttaacgccaatagaaactggaattctccagttgctaatttcataatggagtcacaaagactggaattaatcagactaatggagacccaagaggaagatgtggtcctactaactgctggagagcacaataaagcatgctctttgttaggaaaattacgactggaatgtgctgaccttctagaaacaagaggagtggtgctccgtgaccccactctgttctctttcctttgggtggtagatttcccactcttcctgcccaaggaggaaaatcccagagagctggaatcggcccaccacccatttactgctccccaccccagtgacatacatctcctgtacactgagcccaaaaaggcccgtagccaacactatgacttggttttaaatggcaatgaaataggaggtggttcaattcgaattcacaatgcagagctgcagcgttatatcctggcaaccttactaaaggaggatgtgaaaatgctctcccatctgctccaggctttagattatggggcaccccctcatggaggaattgccttagggttagacagactgatatgccttgtcactggatctccaagcatcagagatgtcatagccttcccaaagtccttccggggacatgacctcatgagcaataccccagattctgtccctcctgaggaactgaagccctatcatatccgagtctccaagccaacagactccaaagcagaaagagctcattgaatcatgcataccatgcagaaagttgagcttttaggttttgtcctctttgcttccccaaggctaaagtcagatctagagttctgccacaggtctaacaatcaagtctttagatggaaggaatccaggcaacattcttcaccacaacgaagaaacagataaaagatacccaattttgacttgatttcatgcatcatttggattttttttggttaggactttttttgaagttcctttttacttaggtgtgaaagatggttctttgttgaaataatatagtggtttagtgttttcaaatcatgtttctcatacccagatagtagattattcacttaggacagaggtaatcaaattatgtgtgaaatgtaggaaaatgcttgcccctgtaaactagtgagttgatggagcatttgcttcatcatcctcatcaagagaatcatataaattaagctttataatgacatttcaaccatcaacataatatagtgaggagtagcataatattttttaataatgcagaaaacatcactgaaatgagagtcacaaatttttcttcagtgtttcagcctgagtaagttacataaacctcgcttagcctcccttcctgctaatgtgtaaaatacatacttgccctggctacctcaccgggctgttattgctggaatcagaggagataacatatatggaagataaagtgaataaaagtactttgaaaaactataaagcattccacaaatatgagatgatggtattatccatccataaataggtagatatatctctattttatagtttcagattaaacaaaactgatatcaatagtaaaagtcattttacttatcaa

SEQ ID NO: 109218 - DNA, 2237 bp, Homo sapiens
  Payload ID: 1453
  Gene Symbol: ASPN
  Gene Name: asporin
  ENST ID: ENST00000375543
  CDS Start-End: 245-976
agtactaacatggactaatctgtgggagcagtttattccagtatcacccagggtgcagccacaccaggactgtgttgaagggtgttttttttcttttaaatgtaatacctcctcatcttttcttcttacacagtgtctgagaacatttacattatagataagtagtacatggtggataacttctacttttaggaggactactctcttctgacagtcctagactggtcttctacactaagacaccatgaaggagtatgtgctcctattattcctggctttgtgctctgccaaacccttctttagcccttcacacatcgcactgaagaatatgatgctgaaggatatggaagacacagatgatgatgatgatgatgatgatgatgatgatgatgatgatgaggacaactctctttttccaacaagagagccaagaagccatttttttccatttgatctgtttccaatgtgtccatttggatgtcagtgctattcacgagttgtacattgctcagatttaggtttgacctcagtcccaaccaacattccatttgatactcgaatgcttgatcttcaaaacaataaaattaaggaaatcaaagaaaatgattttaaaggactcacttcactttatggtctgatcctgaacaacaacaagctaacgaagattcacccaaaagcctttctaaccacaaagaagttgcgaaggctgtatctgtcccacaatcaactaagtgaaataccacttaatcttcccaaatcattagcagaactcagaattcatgaaaataaagttaagaaaatacaaaaggacacattcaaaggaatgaatgctttacacgttttggaaatgagtgcaaaccctcttgataataatgggatagagccaggggcatttgaaggggtgacggtgttccatatcagaattgcagaagcaaaactgacctcagttcctaaagataatcttccttcattctaattcaattgcaagagtgggagtaaatgacttctgtccaacagtgccaaagatgaagaaatctttatacagtgcaataagtttattcaacaacccggtgaaatactgggaaatgcaacctgcaacatttcgttgtgttttgagcagaatgagcgttcagcttgggaactttggaatgtaataattagtaattggtaatgtccatttaatataagattcaaaaatccctacatttggaatacttgaactctattaataatggtagtattatatatacaagcaaatatctattctcaagtggtaagtccactgacttattttatgacaagaaatttcaacggaattttgccaaactattgatacataagggttgagagaaacaagcatctattgcagtttctttttgcgtacaaatgatcttacataaatctcatgcttgaccattcctttcttcataacaaaaaagtaagatattcggtatttaacactttgttatcaagcatattttaaaaagaactgtactgtaaatggaatgcttgacttagcaaaatttgtgctctttcatttgctgttagaaaaacagaattaacaaagacagtaatgtgaagagtgcattacactattcttattctttagtaacttgggtagtactgtaatatttttaatcatcttaaagtatgatttgatataatcttattgaaattaccttatcatgtcttagagcccgtctttatgtttaaaactaatttcttaaaataaagccttcagtaaatgttcattaccaacttgataaatgctactcataagagctggtttggggctatagcatatgcttttttttttttaattattacctgatttaaaaatctctgtaaaaacgtgtagtgtttcataaaatctgtaactcgcattttaatgatccgctattataagcttttaatagcatgaaaattgttaggctatataacattgccacttcaactctaaggaatatttttgagatatccctttggaagaccttgcttggaagagcctggacactaacaattctacaccaaattgtctcttcaaatacgtatggactggataactctgagaaacacatctagtataactgaataagcagagcatcaaattaaacagacagaaaccgaaagctctatataaatgctcagagttctttatgtatttcttattggcattcaacatatgtaaaatcagaaaacagggaaattttcattaaaaatattggtttgaaataaaa

SEQ ID NO: 109219 - DNA, 2470 bp, Homo sapiens
  Payload ID: 1453
  Gene Symbol: ASPN
  Gene Name: asporin
  Uniprot ID: Q9BXN1
  ENST ID: ENST00000375544
  CDS Start-End: 245-1387
agtactaacatggactaatctgtgggagcagtttattccagtatcacccagggtgcagccacaccaggactgtgttgaagggtgttttttttcttttaaatgtaatacctcctcatcttttcttcttacacagtgtctgagaacatttacattatagataagtagtacatggtggataacttctacttttaggaggactactctcttctgacagtcctagactggtcttctacactaagacaccatgaaggagtatgtgctcctattattcctggctttgtgctctgccaaacccttctttagcccttcacacatcgcactgaagaatatgatgctgaaggatatggaagacacagatgatgatgatgatgatgatgatgatgatgatgatgatgatgaggacaactctctttttccaacaagagagccaagaagccatttttttccatttgatctgtttccaatgtgtccatttggatgtcagtgctattcacgagttgtacattgctcagatttaggtttgacctcagtcccaaccaacattccatttgatactcgaatgcttgatcttcaaaacaataaaattaaggaaatcaaagaaaatgattttaaaggactcacttcactttatggtctgatcctgaacaacaacaagctaacgaagattcacccaaaagcctttctaaccacaaagaagttgcgaaggctgtatctgtcccacaatcaactaagtgaaataccacttaatcttcccaaatcattagcagaactcagaattcatgaaaataaagttaagaaaatacaaaaggacacattcaaaggaatgaatgctttacacgttttggaaatgagtgcaaaccctcttgataataatgggatagagccaggggcatttgaaggggtgacggtgttccatatcagaattgcagaagcaaaactgacctcagttcctaaaggcttaccaccaactttattggagcttcacttagattataataaaatttcaacagtggaacttgaggattttaaacgatacaaagaactacaaaggctgggcctaggaaacaacaaaatcacagatatcgaaaatgggagtcttgctaacataccacgtgtgagagaaatacatttggaaaacaataaactaaaaaaaatcccttcaggattaccagagttgaaatacctccagataatcttccttcattctaattcaattgcaagagtgggagtaaatgacttctgtccaacagtgccaaagatgaagaaatctttatacagtgcaataagtttattcaacaacccggtgaaatactgggaaatgcaacctgcaacatttcgttgtgttttgagcagaatgagcgttcagcttgggaactttggaatgtaataattagtaattggtaatgtccatttaatataagattcaaaaatccctacatttggaatacttgaactctattaataatggtagtattatatatacaagcaaatatctattctcaagtggtaagtccactgacttattttatgacaagaaatttcaacggaattttgccaaactattgatacataagggttgagagaaacaagcatctattgcagtttctttttgcgtacaaatgatcttacataaatctcatgcttgaccattcctttcttcataacaaaaaagtaagatattcggtatttaacactttgttatcaagcatattttaaaaagaactgtactgtaaatggaatgcttgacttagcaaaatttgtgctctttcatttgctgttagaaaaacagaattaacaaagacagtaatgtgaagagtgcattacactattcttattctttagtaacttgggtagtactgtaatatttttaatcatcttaaagtatgatttgatataatcttattgaaattaccttatcatgtcttagagcccgtctttatgtttaaaactaatttcttaaaataaagccttcagtaaatgttcattaccaacttgataaatgctactcataagagctggtttggggctatagcatatgcttttttttttttaattattacctgatttaaaaatctctgtaaaaacgtgtagtgtttcataaaatctgtaactcgcattttaatgatccgctattataagcttttaatagcatgaaaattgttaggctatataacattgccacttcaactctaaggaatatttttgagatatccctttggaagaccttgcttggaagagcctggacactaacaattctacaccaaattgtctcttcaaatacgtatggactggataactctgagaaacacatctagtataactgaataagcagagcatcaaattaaacagacagaaaccgaaagctctatataaatgctcagagttctttatgtatttcttattggcattcaacatatgtaaaatcagaaaacagggaaattttcattaaaaatattggtttgaaataaaa

SEQ ID NO: 109220 - DNA, 1296 bp, Homo sapiens
  Payload ID: 1454
  Gene Symbol: ASTL
  Gene Name: astacin-like metallo-endopeptidase (M12 family)
  Uniprot ID: Q6HA08
  ENST ID: ENST00000342380
  CDS Start-End: 1-1296
atggagggtgtagggggtctctggccttgggtgctgggtctgctctccttgccaggtgtgatcctaggagcgcccctggcctccagctgcgcaggagcctgtggtaccagcttcccagatggcctcacccctgagggaacccaggcctccggggacaaggacattcctgcaattaaccaagggctcatcctggaagaaaccccagagagcagcttcctcatcgagggggacatcatccggccgagtcccttccgactgctgtcagcaaccagcaacaaatggcccatgggtggtagtggtgtcgtggaggtccccttcctgctctccagcaagtacgatgagcccagccgccaggtcatcctggaggctcttgcggagtttgaacgttccacgtgcatcaggtttgtcacctatcaggaccagagagacttcatttccatcatccccatgtatgggtgcttctcgagtgtggggcgcagtggagggatgcaggtggtctccctggcgcccacgtgtctccagaagggccggggcattgtccttcatgagctcatgcatgtgctgggcttctggcacgagcacacgcgggccgaccgggaccgctatatccgtgtcaactggaacgagatcctgccaggctttgaaatcaacttcatcaagtctcagagcagcaacatgctgacgccctatgactactcctctgtgatgcactatgggaggctcgccttcagccggcgtgggctgcccaccatcacaccactttgggcccccagtgtccacatcggccagcgatggaacctgagtgcctcggacatcacccgggtcctcaaactctacggctgcagcccaagtggccccaggccccgtgggagagggtcccatgcccacagcactggtaggagccccgctccggcctccctatctctgcagcggcttttggaggcactgtcggcggaatccaggagccccgaccccagtggttccagtgcgggaggccagcccgttcctgcagggcctggggagagcccacatgggtgggagtcccctgccctgaaaaagctcagtgcagaggcctcggcaaggcagcctcagaccctagcttcctccccaagatcaaggcctggagcaggtgcccccggtgttgctcaggagcagtcctggctggccggagtgtccaccaagcccacagtcccatcttcagaagcaggaatccagccagtccctgtccagggaagcccagctctgccagggggctgtgtacctagaaatcatttcaaggggatgtccgaagattaa

SEQ ID NO: 109221 - DNA, 2664 bp, Homo sapiens
  Payload ID: 1455
  Gene Symbol: ASTE1
  Gene Name: asteroid homolog 1 (Drosophila)
  Uniprot ID: Q2TB18
  ENST ID: ENST00000264992
  CDS Start-End: 443-2482
aagtaggcggagaaagcagaggaggaccggcgggccaagctttcctagcctgacagcagccatttcggaacgtacgtcccagccctctttagctacttagcgcctctgggcccgagaacacctgctccttggctcagtctggcgccaccggcatcacggaactgtacttcccagagacgtcacaccgggagacttccgattcccgctcttgagattggactctcacgtgcaggagccagtcctcgctgggctctagcgggcttctgatggaggagctactcctctgggaggacagaaattagcagcagcctctgtcaccatccaaagattacaacccatgaaaccattgaatttgtgccttgtatcagaaagcaaaggagaatgaaaaagcacagctaacattgcttgaggatctaggcgattaattctttagactgtcatcatgggtatccgaggactaatgagttttgtggaagatcatagtaatgagttcttcactgatttgaagttgcgggacacaaaaattgtcattgatggttatgctcttttccaccgtctttgcttcagttcaaacttggatctccggtatggaggggactatgattcttttgcagatgttgtacaaaaattctttgaatcactgtttgcttgtaatatatgcccatatgttgtattagatggaggatgtgacatttcagataaaaagcttacaactttaaaggatagagctagagagaagatccagatggcccattccctttctgttggtgggagtgggtacgtatgtcccttactcatccgggaagtattcatacaggttttgatcaagctgcgggtgtgttttgtccagtgcttttcagaagcagatcgggacattatgacacttgctaaccattggaattgccctgtgttatcatcagatagtgacttttgcatttttgacctgaaaactgggttttgcccattgaatagctttcagtggagaaatatgaacactattaagggcacacaaaactatatccctgccaaatgcttttcccttgatgcattctgccatcacttcagcaatatgaataaagctctactacctctctttgcggtgctatgtggaaatgaccatgttaatctacccatcatggagacattcttaagtaaagcgcgtcttcctcttggagctaccagttctaaagggaggagacaccaccgaatcctgggacttctgaattggttgtctcattttgccaaccctaccgaagcactagataatgttctgaaatacctcccaaaaaaggatcgagaaaatgttaaggaacttctctgctgttccatggaagaataccaacagtcccaggtgaagctacaggacttcttccagtgtggtacttatgtctgtccagatgccttgaatcttggtttaccagaatgggtattagtggctttagctaaaggccagctatctcctttcatcagtgatgctttggtcctaagacggaccattcttcccacacaggtggaaaacatgcagcaaccaaatgcccacagaatatctcagcccatcaggcaaatcatctatgggcttcttttaaatgcctcaccacatctggacaagacatcctggaatgcattgcctcctcagcctctagctttcagtgaagtggaaaggattaataaaaatatcagaacctcaatcattgatgcagtagaactggccaaggatcattctgacttaagcagattgactgagctctccttgaggaggcggcagatgcttctgttagaaaccctgaaggtgaaacagaccattctggagccaatccctacttcactgaagttgcccattgctgtcagttgctactggttgcagcacaccgagaccaaagcaaagctacatcatctacaatccttactgctcacaatgctagtggggcccttgattgccataatcaacagccctggtaaggaagagctgcaggaagatggtgctaagatgttgtatgcagagttccaaagagtgaaggcgcagacacggctgggcacaagactggacttagacacagctcacatcttctgtcagtggcagtcctgtctccagatggggatgtatctcaaccagctgctgtccactcctctcccagagccagacctaactcgactgtacagtggaagcctggtgcacggactatgccagcaactgctagcatcgacctctgtagaaagtctcctgagcatatgtcctgaggctaagcaactttatgaatatctattcaatgccacaaggtcatatgcccccgctgaaatattcctaccaaaaggtagatcaaattcaaaaaaaaaaaggcagaagaaacagaataccagctgttctaagaacagagggagaaccactgcacacaccaagtgttggtatgagggaaacaaccggtttgggttgttaatggttgaaaacttagaggaacatagtgaggcctccaacattgaataaaactcagtttgcatcaaactagatgtatttaatataatccttacttaaaattcttccgttaccacccttgaaacaattagctttttctttaggactgacctgttaggggataaacatcacaataatctgaattccaagttattttgtattttgtttttaataaatacaacctgatttaagaa

SEQ ID NO: 109222 - DNA, 2669 bp, Homo sapiens
  Payload ID: 1455
  Gene Symbol: ASTE1
  Gene Name: asteroid homolog 1 (Drosophila)
  Uniprot ID: Q2TB18
  ENST ID: ENST00000507978
  CDS Start-End: 495-2057
atactgggaagtcggggcgaggcggcaccaaggcggaagtgttcgccgacccaagtaggcggagaaagcagaggaggaccggcgggccaagctttcctagcctgacagcagccatttcggaacgtacgtcccagccctctttagctacttagcgcctctgggcccgagaacacctgctccttggctcagtctggcgccaccggcatcacggaactgtacttcccagagacgtcacaccgggagacttccgattcccgctcttgagattggactctcacgtgcaggagccagtcctcgctgggctctagcgggcttctgatggaggagctactcctctgggaggacagaaattagcagcagcctctgtcaccatccaaagattacaacccatgaaaccattgaatttgtgccttgtatcagaaagcaaaggagaatgaaaaagcacagctaacattgcttgaggatctaggcgattaattctttagactgtcatcatgggtatccgaggactaatgagttttgtggaagatcatagtaatgagttcttcactgatttgaagttgcgggacacaaaaattgtcattgatggttatgctcttttccaccgtctttgcttcagttcaaacttggatctccggtatggaggggactatgattcttttgcagatgttgtacaaaaattctttgaatcactgtttgcttgtaatatatgcccatatgttgtattagatggaggatgtgacatttcagataaaaagcttacaactttaaaggatagagctagagagaagatccagatggcccattccctttctgttggtgggagtgggtacgtatgtcccttactcatccgggaagtattcatacaggttttgatcaagctgcgggtgtgttttgtccagtgcttttcagaagcagatcgggacattatgacacttgctaaccattggaattgccctgtgttatcatcagatagtgacttttgcatttttgacctgaaaactgggttttgcccattgaatagctttcagtggagaaatatgaacactattaagggcacacaaaactatatccctgccaaatgcttttcccttgatgcattctgccatcacttcagcaatatgaataaagctctactacctctctttgcggtgctatgtggaaatgaccatgttaatctacccatcatggagacattcttaagtaaagcgcgtcttcctcttggagctaccagttctaaagggaggagacaccaccgaatcctgggacttctgaattggttgtctcattttgccaaccctaccgaagcactagataatgttctgaaatacctcccaaaaaaggatcgagaaaatgttaaggaacttctctgctgttccatggaagaataccaacagtcccaggtgaagctacaggacttcttccagtgtggtacttatgtctgtccagatgccttgaatcttggtttaccagaatgggtattagtggctttagctaaaggccagctatctcctttcatcagtgatgctttggtcctaagacggaccattcttcccacacaggtggaaaacatgcagcaaccaaatgcccacagaatatctcagcccatcaggcaaatcatctatgggcttcttttaaatgcctcaccacatctggacaagacatcctggaatgcattgcctcctcagcctctagctttcagtgaagtggaaaggattaataaaaatatcagaacctcaatcattgatgcagtagaactggccaaggatcattctgacttaagcagattgactgagctctccttgaggaggcggcagatgcttctgttagaaaccctgaaggtgaaacagaccattctggagccaatccctacttcactgaagttgcccattgctgtcagttgctactggttgcagcacaccgagaccaaagcaaagctacatcatctacaatccttactgctcacaatgctagtggggcccttgattgccataatcaacagccctggaaatgtggaccctgtacccaggcaggctcagtgtcttgctcctcgctagttggtaaaaggtaaggaagagctgcaggaagatggtgctaagatgttgtatgcagagttccaaagagtgaaggcgcagacacggctgggcacaagactggacttagacacagctcacatcttctgtcagtggcagtcctgtctccagatggggatgtatctcaaccagctgctgtccactcctctcccagagccagacctaactcgactgtacagtggaagcctggtgcacggactatgccagcaactgctagcatcgacctctgtagaaagtctcctgagcatatgtcctgaggctaagcaactttatgaatatctattcaatgccacaaggtcatatgcccccgctgaaatattcctaccaaaaggtagatcaaattcaaaaaaaaaaaggcagaagaaacagaataccagctgttctaagaacagagggagaaccactgcacacaccaagtgttggtatgagggaaacaaccggtttgggttgttaatggttgaaaacttagaggaacatagtgaggcctccaacattgaataaaactcagtttgcatcaaactagatgtatttaatataatccttacttaaaattcttccgttaccacccttgaaaca

SEQ ID NO: 109223 - DNA, 569 bp, Homo sapiens
  Payload ID: 1455
  Gene Symbol: ASTE1
  Gene Name: asteroid homolog 1 (Drosophila)
  ENST ID: ENST00000504725
  CDS Start-End: 425-569
ggactctcacgtgcaggagccagtcctcgctgggctctagcgggcttctgatggaggagctactcctctgggaggacagagtaggtgggctctgctgcaggtccgggcggcgggttgtgagggccgaggtggcacggtgtatgaaggcctgtgtttgaagacttaggtcagaccttttgcccgcctttcccctatgcagctctatgcaactgtctgtgcaaggtcctgtaatttgcgtaggacgccttgacacagtctctgcttatggacgctttacaaaactatcttgcaaagaaataagtactatacaggataaggttctgagatactgacagggctggaactagggtgagataagtgtaaaatgtaaatggatgccaataaaattcagtaatcaaggcgattaattctttagactgtcatcatgggtatccgaggactaatgagttttgtggaagatcatagtaatgagttcttcactgatttgaagttgcgggacacaaaaattgtcattgatggttatgctcttttccaccgtctttgcttcagttcaaacttggatctccggt

SEQ ID NO: 109224 - DNA, 292 bp, Homo sapiens
  Payload ID: 1455
  Gene Symbol: ASTE1
  Gene Name: asteroid homolog 1 (Drosophila)
  ENST ID: ENST00000505290
  CDS Start-End: 1-292
aaaatgttaaggaacttctctgctgttccatggaagaataccaacagtcccagatgcttctgttagaaaccctgaaggtgaaacagaccattctggagccaatccctacttcactgaagttgcccattgctgtcagttgctactggttgcagcacaccgagaccaaagcaaagctacatcatctacaatccttactgctcacaatgctagtggggcccttgattgccataatcaacagccctggtaaggaagagctgcaggaagatggtgctaagatgttgtatgcagagtt

SEQ ID NO: 109225 - DNA, 551 bp, Homo sapiens
  Payload ID: 1455
  Gene Symbol: ASTE1
  Gene Name: asteroid homolog 1 (Drosophila)
  ENST ID: ENST00000505545
  CDS Start-End: 403-551
acttgacaacacgctccccctcgaggtttgagtgaacttgggcactgcgaacacatcttctttatttctgcatccccaatccctggcatacctcctggcatatactaggtgtttaacaaaccttgttaaggcaagtaagtgtccagcagatcaactgccgcccaaaggagagaaaaaaggtaataagaggaaggcaatttgtcaccagtttctgctacagcacaaatctacctttaaagtaaatcttaaccttaagaattagcagcagcctctgtcaccatccaaagattacaacccatgaaaccattgaatttgtgccttgtatcagaaagcaaaggagaatgaaaaagcacagctaacattgcttgaggatctaggcgattaattctttagactgtcatcatgggtatccgaggactaatgagttttgtggaagatcatagtaatgagttcttcactgatttgaagttgcgggacacaaaaattgtcattgatggttatgctcttttccaccgtctttgcttcagttcaaacttggatctccggtatgg

SEQ ID NO: 109226 - DNA, 680 bp, Homo sapiens
  Payload ID: 1455
  Gene Symbol: ASTE1
  Gene Name: asteroid homolog 1 (Drosophila)
  ENST ID: ENST00000504964
  CDS Start-End: 92-310
tttgtgccttgtatcagaaagcaaaggagaatgaaaaagcacagctaacattgcttgaggatctaggcgattaattctttagactgtcatcatgggtatccgaggactaatgagttttgtggaagatcatagtaatgagttcttcactgatttgaagttgcgggacacaaaaattgtcattgatggttatgctcttttccaccgtctttgcttcagttcaaacttggatctccggtggaaaacatgcagcaaccaaatgcccacagaatatctcagcccatcaggcaaatcatctatgggcttcttttaaatgcctcaccacatctggacaagacatcctggaatgcattgcctcctcagcctctagctttcagtgaagtggaaaggattaataaaaatatcagaacctcaatcattgatgcagtagaactggccaaggatcattctgacttaagcagattgactgagctctccttgaggaggcggcagatgcttctgttagaaaccctgaaggtgaaacagaccattctggagccaatccctacttcactgaagttgcccattgctgtcagttgctactggttgcagcacaccgagaccaaagcaaagctacatcatctacaatccttactgctcacaatgctagtggggcccttgattgccataatcaacagccctgg

SEQ ID NO: 109227 - DNA, 2504 bp, Homo sapiens
  Payload ID: 1455
  Gene Symbol: ASTE1
  Gene Name: asteroid homolog 1 (Drosophila)
  ENST ID: ENST00000514044
  CDS Start-End: 208-2322
agaaagcagaggaggaccggcgggccaagctttcctagcctgacagcagccatttcggaacaattagcagcagcctctgtcaccatccaaagattacaacccatgaaaccattgaatttgtgccttgtatcagaaagcaaaggagaatgaaaaagcacagctaacattgcttgaggatctaggcgattaattctttagactgtcatcatgggtatccgaggactaatgagttttgtggaagatcatagtaatgagttcttcactgatttgaagttgcgggacacaaaaattgtcattgatggttatgctcttttccaccgtctttgcttcagttcaaacttggatctccggtatggaggggactatgattcttttgcagatgttgtacaaaaattctttgaatcactgtttgcttgtaatatatgcccatatgttgtattagatggaggatgtgacatttcagataaaaagcttacaactttaaaggatagagctagagagaagatccagatggcccattccctttctgttggtgggagtgggtacgtatgtcccttactcatccgggaagtattcatacaggttttgatcaagctgcgggtgtgttttgtccagtgcttttcagaagcagatcgggacattatgacacttgctaaccattggaattgccctgtgttatcatcagatagtgacttttgcatttttgacctgaaaactgggttttgcccattgaatagctttcagtggagaaatatgaacactattaagggcacacaaaactatatccctgccaaatgcttttcccttgatgcattctgccatcacttcagcaatatgaataaagctctactacctctctttgcggtgctatgtggaaatgaccatgttaatctacccatcatggagacattcttaagtaaagcgcgtcttcctcttggagctaccagttctaaagggaggagacaccaccgaatcctgggacttctgaattggttgtctcattttgccaaccctaccgaagcactagataatgttctgaaatacctcccaaaaaaggatcgagaaaatgttaaggaacttctctgctgttccatggaagaataccaacagtcccaggtgaagctacaggacttcttccagtgtggtacttatgtctgtccagatgccttgaatcttggtttaccagaatgggtattagtggctttagctaaaggccagctatctcctttcatcagtgatgctttggtcctaagacggaccattcttcccacacaggtggaaaacatgcagcaaccaaatgcccacagaatatctcagcccatcaggcaaatcatctatgggcttcttttaaatgcctcaccacatctggacaagacatcctggaatgcattgcctcctcagcctctagctttcagtgaagtggaaaggattaataaaaatatcagaacctcaatcattgatgcagtagaactggccaaggatcattctgacttaagcagattgactgagctctccttgaggaggcggcagatgcttctgttagaaaccctgaaggtgaaacagaccattctggagccaatccctacttcactgaagttgcccattgctgtcagttgctactggttgcagcacaccgagaccaaagcaaagctacatcatctacaatccttactgctcacaatgctagtggggcccttgattgccataatcaacagccctggtaaggaagagctgcaggaagatggtgctaagatgttgtatgcagagttccaaagagtgaaggcgcagacacggctgggcacaagactggacttagacacagctcacatcttctgtcagtggcagtcctgtctccagatggggatgtatctcaaccagctgctgtccactcctctcccagagccagacctaactcgccccagtgccttcaatactttgaatgaggatatatggacgcatacaaaatatggtgggactttacatgtttcaagactgtacagtggaagcctggtgcacggactatgccagcaactgctagcatcgacctctgtagaaagtctcctgagcatatgtcctgaggctaagcaactttatgaatatctattcaatgccacaaggtcatatgcccccgctgaaatattcctaccaaaaggtagatcaaattcaaaaaaaaaaaggcagaagaaacagaataccagctgttctaagaacagagggagaaccactgcacacaccaagtgttggtatgagggaaacaaccggtttgggttgttaatggttgaaaacttagaggaacatagtgaggcctccaacattgaataaaactcagtttgcatcaaactagatgtatttaatataatccttacttaaaattcttccgttaccacccttgaaacaattagctttttctttaggactgacctgttaggggataaacatcacaataatctgaattccaagttattttgtattttgtttttaataaatacaacctgatttaagaa

SEQ ID NO: 109228 - DNA, 589 bp, Homo sapiens
  Payload ID: 1455
  Gene Symbol: ASTE1
  Gene Name: asteroid homolog 1 (Drosophila)
  ENST ID: ENST00000509060
  CDS Start-End: 569-589
ttccgattcccgctcttgagattggactctcacgtgcaggagccagtcctcgctgggctctagcgggcttctgatggaggagctactcctctgggaggacagagtaggtgggctctgctgcaggtccgggcggcgggttgtgagggccgaggtggcacggtgtatgaaggcctgtgtttgaagacttaggtcagaccttttgcccgcctttcccctatgcagctctatgcaactgtctgtgcaaggtcctgtaatttgcgtaggacgccttgacacagtctctgcttatggacgctttacaaaactatcttgcaaagaaataagtactatacaggataaggttctgagatactgacagggctggaactagggtgagataagtgtaaaatgtaaatggatgccaataaaattcagtaatcaagaattagcagcagcctctgtcaccatccaaagattacaacccatgaaaccattgaatttgtgccttgtatcagaaagcaaaggagaatgaaaaagcacagctaacattgcttgaggatctaggcgattaattctttagactgtcatcatgggtatccgaggactaatg

SEQ ID NO: 109229 - DNA, 7116 bp, Homo sapiens
  Payload ID: 1456
  Gene Symbol: ASTN1
  Gene Name: astrotactin 1
  Uniprot ID: O14525
  ENST ID: ENST00000361833
  CDS Start-End: 15-3899
ggccggggctcaagatggctttagccgggctctgcgccctgctcgcctgctgctgggggccggcggcggtgctggccacggccgccggcgacgtggatccatccaaggagctggagtgcaagctcaaaagcatcacggtgtcggcactgcccttcctgcgcgagaacgacctgagcatcatgcacagcccctcggcctcggagcccaagctcctcttctcggtgcgcaacgacttcccgggagaaatggtcgtggtggacgacctggagaacacggagctgccctacttcgtgctggagatctcagggaacacagaggatatccctttggtgcgctggaggcagcagtggctggagaatggcactttgctttttcacattcatcaccaagatggtgccccaagccttcctggacaagaccccactgaagaaccccaacatgagtcggcagaagaggagctgaggatcctccacatctcagtcatgggtggcatgatcgctctgctgctgtccatcttgtgcctggtgatgatcctgtatactcgccggcgctggtgcaaacgccgccgggtcccgcagccccagaagagtgccagtgctgaggcagccaatgagattcactacattccttctgtgctgatcggcgggcacggacgggagagcctgcgcaatgcccgcgtgcagggccacaactccagtggcaccctgagcatccgggagacacctatcctggacggctatgagtatgacatcactgatctgcgccaccatctgcagagggagtgcatgaacggaggggaggactttgccagccaggtcacgcgcaccctcgactccctgcagggctgcaatgaaaagtcggggatggacctcacaccaggaagtgacaatgccaagctgtcactgatgaacaagtataaagataatattatagccactagccctgtggactccaaccaccagcaagccacccttctctctcacacctccagcagccagagaaagcggatcaacaacaaagcaagagctggttccgccttcttgaaccctgaaggggattctggcacagaggcagaaaacgacccccagctgaccttttacacggatccttcaaggagcaggaggcgtagtagagtgggttctccccgaagtcctgtgaataagaccaccttgaccctgatcagcatcaccagctgtgtgattggcctcgtgtgctcctctcacgtcaactgccctctcgttgtcaagatcaccctgcatgtccctgagcacctgattgctgatgggagccgcttcatcttgctggaggggagccagctggatgccagtgactggctgaaccctgcccaagtggttctcttctctcagcagaactccagcggaccctgggccatggacctctgtgcccggcggctcctggacccctgtgaacaccaatgtgaccccgaaactggggaatgcctctgctatgaaggctacatgaaggatccagtacataagcacctttgcattcggaacgaatgggggacaaaccaggggccatggccttacacaatatttcagcgaggctttgacctggttttgggagagcagccctctgataaaatatttagattcacctacactcttggggagggcatgtggttgcccctcagcaagagctttgtgattccaccagccgaactggccatcaatccatcagcaaagtgcaagacggacatgactgtgatggaggatgctgtggaggtcagagaggagctgatgacttcatcctccttcgacagcctggaggttctcttagattcctttgggccggtgcgcgactgcagcaaagataacgggggctgcagtaagaatttccgctgtatttcagatcgcaagctggactccactggttgcgtgtgcccatctggactcagtcccatgaaggacagctctggctgctatgaccgccacatcggggtggactgttccgacggcttcaacggcggctgtgagcagctgtgcctccagcagatggcgcccttcccggacgaccccaccttgtataacatcctcatgttctgtgggtgcatcgaggactacaagcttggtgtggatggacgctcttgccaactcatcacggagacctgtccagagggaagtgactgtggggaaagcagggagcttcccatgaaccagaccctctttggggagatgttctttggttacaacaaccattccaaggaagtggctgccggacaggtgctgaaaggaacattcaggcaaaacaactttgctcgtggtttagaccagcaactgccagatggtcttgtggtggccactgtgcccctggagaatcaatgcctagaggagatctcggagcccacccctgaccctgacttcctgactgggatggtgaacttcagtgaagtgtctgggtaccctgtgctgcagcactggaaggtccggtctgtgatgtaccacatcaaactcaaccaagtggccatctctcaggccctcagcaatgctctccactcgctggatggggctacatctcgtgcagattttgtggcgctgttggaccagttcggcaaccattacatccaggaagctatctacggctttgaggagtcctgttctatctggtacccaaacaagcaggtccagcggcgactctggctggagtatgaagacatcagtaaaggcaactccccatcagatgagtctgaggagcgggaaagagaccccaaggtgctgacattcccagaatacatcaccagcttgtcagactccggcaccaagcacatggcggctggagtccgcatggagtgccacagcaagggacgatgcccctcgtcctgccccctgtgtcatgtgacatccagccctgacacccctgctgagccggttctgctggaggtgaccaaagcagcccccatctatgaactagtgaccaacaaccagacccagaggctcttgcaggaggctaccatgagctctctctggtgctcagggactggagatgtcatcgaggactggtgtcgatgtgactccactgcttttggagctgatggactccccacctgtgcgcctctcccacagcctgtgctgagactctccacggttcacgagcccagcagcactcttgtggtcctggagtgggaacactcagagccaccaatcggggtgcagattgtagattacctcctccgtcaagagaaagtcactgacaggatggaccactccaaagtggagacagaaacagtgctgagctttgtggacgacatcatctctggagcaaagtctccttgtgcaatgccatctcaggtgccggacaagcagctcaccaccatctctctgatcatacgatgcctggaacctgacaccatttacatgttcacgctgtggggagtggacaacacaggacggcgctccaggccaagcgacgtgatcgtgaagaccccatgccccgtggtggatgatgtcaaggctcaagaaatagcagacaagatctacaatctcttcaatggctacactagtgggaaggagcagcagaccgcctacaacaccctcctggatctgggttcccccaccttacaccgggtcctctaccactataaccagcactatgagagttttggggaattcacctggcgatgtgaggatgagttaggtcccaggaaagctggtctcatcctttcccagcttggggacctcagcagttggtgcaatggactccttcaggaacccaagataagcttgcggcgcagctcactcaagtacctggggtgccgctacagcgagatcaaaccctacggacttgactgggcggagctcagccgggacctcaggaagacgtgtgaggagcagaccctgagtatcccctacaacgactatggggacagcaaagagatctagcaccataaggccagggagctgctgccagaatgaagtaggaaagaggagggatccatctgggttggtctgtggatttttaatattttttaatggaacatgaaaacctccacagcaacatcgaaaccagggagaaagtgatccttgctccctgcagaacttcttcagtatgatgttctccatctgcatgattgggaaatctgccagccagtggcttcatgcagtgccatatttctttagaggattactttggggtttgctttgccattaatttgttccattcatttttttttccctgagaagtttaccaaaatgctcaagagctctgccgtgctccccatgaaaagtctattaagtaggcaccctgtgctcactcagttcctaaatccattgcaactgggagcagaggtgaggccagaaagttgttaggcctgccgcaggccccaccctcaagcattcctcaggaagcgtctcactctgggagccttggccctgctcacagagagagacaatagaaaattgaggaaggtggcccttgtctgtgtctcctggttttcttcctaggccttgctatcactatttccatacccgaaaggtgaaaccagctttcattataggccccagtgggccacttgggttttgagatccttccttattttaagccaggactgggattaaatctccctctgtcagatctctgtcccttcctctgaacaacatgatctttgagagggaacaagatgccatctgtcaactgcaccttcagaaaagtctacctgggagactagttagcagtccacattcaagaggagacttggagtttattgttttttaaaaaaaccatgcttcctttggatagacttctccagcctaccaatatatatccatgtgcctggattatctttaacccccacacctcttaccttggacaggtaaggcttggccgatgtctgattgggaccaggaggggtcaacactttcatatcagtgttacagtgaactaaagctattattgatcacaaaaaacttctgttcatccccaccttgctaaatttgcttgtgttgctagttttgcaaatcgtttctctgatgaccataagcaggaggattccaccatggtcactgcccatccagtcacagggattctgtgtagggaagcaccactgattgcagttaacatctagagtgttgtttccatcccactgcccaagcattggcatggtcatgaatggtggcccagccaacaggaagcccagcctttcagaaagagcctggcaaggccctgttgactagcaatggccttagctgtcccacacaactcagtggcctgaacacacaccttcagccaccatgcctttgaccagggctcctcatctggaaacatatgagaaaggtcagcaaacagatgcaagacctataaggctagtcattgagctatattggttttttttctaaatagtagtagtgacagataacatttattgagtgcttgctgtatgccaggcgctgatgtaagcactttaggtatcattgaattctcacagcaactcctgaggaaagtgctattcttgtctccattttagtgttgaggaaaacgaggcaaagagaggttatacaacttgcctcaaatcccttgtgcactgtaactcacactgagtttcagtgtgatttcaggctgttggtctccagggcacaggatcttagctactctgggatacccagttctgttttcagtatcatctggcacacaactgtccaagctctcagccccacagggaacctgcccagagagctttacctttcccaagcatctgtggcatggacatgtcctctgtgcagtggaaggaggaggggcgaaagtacgcccttagcctttggagctagagcacccttgggacccctagttccactgcacatggccctcctccccaccctcatgactgggaaggaagcctgtgatgaggctgagataaagcacagggtggtttcactctcctctctccttctttccaaacactgaaggatttatttcaaactctctaatgcacctgcctcagagattcccctactttcaaagcaaagatcagcagaaaaattggctgtcccacctgtggcaaatgctggagcctcagttaaagtgcctcaaggggcaaatatttcaccattgccagagaagatgtgacaggccaatcagacagggcccagagcatctctttgctgctactgttttgccatccttctattcatatctgtgcagaacacggtgttttaagcttgagtgaaaggagggtgaggctgccgatgccttcctgcccagaagtggatgatgtgggagttgacaggccagggagagggtgaagcaggtatcagagtcactcctctgtaccctctccttctgtttttattttaggcacactatcttcctctctcctatctttccctcagtctcccaagttcctctaccttctttatctttgtcttttacttcttctttctgtgaccctccttttttggcctcctctttccccaagactttcttcctcctgtttctcgttgagttctccccactgaatgtgtgtatgtatgtacacacacacacacgtgtgcacacacaatgcacacaactcctatgactggctcctacttacattcaagttaaaaaggctgatatgaacagggcaggggaaaatcttaggatggttgtacaattgactggaggattttttccccttggaagacactattgatctcaacctgctgacttttcctaatgcttacctgaaggaacccatcctggctagaaagggtgatggtactggaccggtattcaaccttgagttttcaagctgccaaacaggtcttaagggaggtgcttatatcccaccaacactctcccagctcccatgtccccaagacctctggagtttcctcttgaatgtacatgaaccactgtaatagcattagacttttaattgagtgtgcaatcgttttccatggagtttggtccgttcattattttttagttaactacacttcttgatattcaaatgttctattaaaaaaactgagtatgaagaaaaacactttactactgcagaaggaagaaagaatataatatgaccatcttcaggtataacagtgttgtttaaaagagaattattgtatgattataaaagatgaaataattaactgaataataaaacaaagctattagtaagca

SEQ ID NO: 109230 - DNA, 4187 bp, Homo sapiens
  Payload ID: 1456
  Gene Symbol: ASTN1
  Gene Name: astrotactin 1
  ENST ID: ENST00000367657
  CDS Start-End: 192-3878
ggggctctccagacatcagagcttaaacccaggactctgcaagcggcatctcattccggggtccagggctctcccggctctccatcccctccctaacctcccccgcctcccgcgctcgctccctcgctccctccccgctcgcttcctcccccaccatcgcagcgctaggaggaaggcggccggggctcaagatggctttagccgggctctgcgccctgctcgcctgctgctgggggccggcggcggtgctggccacggccgccggcgacgtggatccatccaaggagctggagtgcaagctcaaaagcatcacggtgtcggcactgcccttcctgcgcgagaacgacctgagcatcatgcacagcccctcggcctcggagcccaagctcctcttctcggtgcgcaacgacttcccgggagaaatggtcgtggtggacgacctggagaacacggagctgccctacttcgtgctggagatctcagggaacacagaggatatccctttggtgcgctggaggcagcagtggctggagaatggcactttgctttttcacattcatcaccaagatggtgccccaagccttcctggacaagaccccactgaagaaccccaacatgagtcggcagaagaggagctgaggatcctccacatctcagtcatgggtggcatgatcgctctgctgctgtccatcttgtgcctggtgatgatcctgtatactcgccggcgctggtgcaaacgccgccgggtcccgcagccccagaagagtgccagtgctgaggcagccaatgagattcactacattccttctgtgctgatcggcgggcacggacgggagagcctgcgcaatgcccgcgtgcagggccacaactccagtggcaccctgagcatccgggagacacctatcctggacggctatgagtatgacatcactgatctgcgccaccatctgcagagggagtgcatgaacggaggggaggactttgccagccaggtcacgcgcaccctcgactccctgcagggctgcaatgaaaagtcggggatggacctcacaccaggaagtgacaatgccaagctgtcactgatgaacaagtataaagataatattatagccactagccctgtggactccaaccaccagcaagccacccttctctctcacacctccagcagccagagaaagcggatcaacaacaaagcaagagctggttccgccttcttgaaccctgaaggggattctggcacagaggcagaaaacgacccccagctgaccttttacacggatccttcaaggagcaggaggcgtagtagagtgggttctccccgaagtcctgtgaataagaccaccttgaccctgatcagcatcaccagctgtgtgattggcctcgtgtgctcctctcacgtcaactgccctctcgttgtcaagatcaccctgcatgtccctgagcacctgattgctgatgggagccgcttcatcttgctggaggggagccagctggatgccagtgactggctgaaccctgcccaagtggttctcttctctcagcagaactccagcggaccctgggccatggacctctgtgcccggcggctcctggacccctgtgaacaccaatgtgaccccgaaactggggaatgcctctgctatgaaggctacatgaaggatccagtacataagcacctttgcattcggaacgaatgggggacaaaccaggggccatggccttacacaatatttcagcgaggctttgacctggttttgggagagcagccctctgataaaatatttagattcacctacactcttggggagggcatgtggttgcccctcagcaagagctttgtgattccaccagccgaactggccatcaatccatcagcaaagtgcaagacggacatgactgtgatggaggatgctgtggaggtcagagaggagctgatgacttcatcctccttcgacagcctggaggttctcttagattcctttgggccggtgcgcgactgcagcaaagataacgggggctgcagtaagaatttccgctgtatttcagatcgcaagctggactccactggttgcgtgtgcccatctggactcagtcccatgaaggacagctctggctgctatgaccgccacatcggggtggactgttccgacggcttcaacggcggctgtgagcagctgtgcctccagcagatggcgcccttcccggacgaccccaccttgtataacatcctcatgttctgtgggtgcatcgaggactacaagcttggtgtggatggacgctcttgccaactcatcacggagacctgtccagagggaagtgactgtggggaaagcagggagcttcccatgaaccagaccctctttggggagatgttctttggttacaacaaccattccaaggaagtggctgccggacaggtgctgaaaggaacattcaggcaaaacaactttgctcgtggtttagaccagcaactgccagatggtcttgtggtggccactgtgcccctggagaatcaatgcctagaggagatctcggagcccacccctgaccctgacttcctgactgggatggtgaacttcagtgaagtgtctgggtaccctgtgctgcagcactggaaggtccggtctgtgatgtaccacatcaaactcaaccaagtggccatctctcaggccctcagcaatgctctccactcgctggatggggctacatctcgtgcagattttgtggcgctgttggaccagttcggcaaccattacatccaggaagctatctacggctttgaggagtcctgttctatctggtacccaaacaagcaggtccagcggcgactctggctggagtatgaagacatcagtaaaggcaactccccatcagatgagtctgaggagcgggaaagagaccccaaggtgctgacattcccagaatacatcaccagcttgtcagactccggcaccaagcacatggcggctggagtccgcatggagtgccacagcaagggacgatgcccctcgtcctgccccctgtgtcatgtgacatccagccctgacacccctgctgagccggttctgctggaggtgaccaaagcagcccccatctatgaactagtgaccaacaaccagacccagaggctcttgcaggaggctaccatgagctctctctggtgctcagggactggagatgtcatcgaggactggtgtcgatgtgactccactgcttttggagctgatggactccccacctgtgcgcctctcccacagcctgtgctgagactctccacggttcacgagcccagcagcactcttgtggtcctggagtgggaacactcagagccaccaatcggggtgcagattgtagattacctcctccgtcaagagaaagtcactgacaggatggaccactccaaagtggagacagaaacagtgctgagctttgtggacgacatcatctctggagcaaagtctccttgtgcaatgccatctcaggtgccggacaagcagctcaccaccatctctctgatcatacgatgcctggaacctgacaccatttacatgttcacgctgtggggagtggacaacacaggacggcgctccaggccaagcgacgtgatcgtgaagaccccatgccccgtggtggatgatgtcaaggctcaagaaatagcagacaagatctacaatctcttcaatggctacactagtgggaaggagcagcagaccgcctacaacaccctcctggatctgggttcccccaccttacaccgggtcctctaccactataaccagcactatgagagttttggggaattcacctggcgatgtgaggatgagttaggtcccaggcttccagcgtgttgggacagtcagaggagttgtagatgattggaggaaaggaagaagacggcagccagggtatttccccttctccctgcctcagatggcatctccagcatctccttcatgacctctgtctcctccgtgtgaccttccatcccctcaaagcaggagctgcgccctgatgttgctaatctgataggttgctcctatttgtccttctataatcccaaagtcttcctaattggtttctcatcttgaacttcctctgtggaattacctaaaatgtattttgctttcctgactaggtcttgattaatatatacttcaaactaaaagttagtacatatcgtctga

SEQ ID NO: 109231 - DNA, 3685 bp, Homo sapiens
  Payload ID: 1456
  Gene Symbol: ASTN1
  Gene Name: astrotactin 1
  Uniprot ID: O14525
  ENST ID: ENST00000424564
  CDS Start-End: 8-3658
gctcaagatggctttagccgggctctgcgccctgctcgcctgctgctgggggccggcggcggtgctggccacggccgccggcgacgtggatccatccaaggagctggagtgcaagctcaaaagcatcacggtgtcggcactgcccttcctgcgcgagaacgacctgagcatcatgcacagcccctcggcctcggagcccaagctcctcttctcggtgcgcaacgacttcccgggagaaatggtcgtggtggacgacctggagaacacggagctgccctacttcgtgctggagatctcagggaacacagaggatatccctttggtgcgctggaggcagcagtggctggagaatggcactttgctttttcacattcatcaccaagatggtgccccaagccttcctggacaagaccccactgaagaaccccaacatgagtcggcagaagaggagctgaggatcctccacatctcagtcatgggtggcatgatcgctctgctgctgtccatcttgtgcctggtgatgatcctgtatactcgccggcgctggtgcaaacgccgccgggtcccgcagccccagaagagtgccagtgctgaggcagccaatgagattcactacattccttctgtgctgatcggcgggcacggacgggagagcctgcgcaatgcccgcgtgcagggccacaactccagtggcaccctgagcatccgggagacacctatcctggacggctatgagtatgacatcactgatctgcgccaccatctgcagagggagtgcatgaacggaggggaggactttgccagccaggtcacgcgcaccctcgactccctgcagggctgcaatgaaaagtcggggatggacctcacaccaggaagtgacaatgccaagctgtcactgatgaacaagtataaagataatattatagccactagccctgtggactccaaccaccagcaagccacccttctctctcacacctccagcagccagagaaagcggatcaacaacaaagcaagagctggttccgccttcttgaaccctgaaggggattctggcacagaggcagaaaacgacccccagctgaccttttacacggatccttcaaggagcaggaggcgtagtagagtgggttctccccgaagtcctgtgaataagaccaccttgaccctgatcagcatcaccagctgtgtgattggcctcgtgtgctcctctcacgtcaactgccctctcgttgtcaagatcaccctgcatgtccctgagcacctgattgctgatgggagccgcttcatcttgctggaggggagccagctggatgccagtgactggctgaaccctgcccaagtggttctcttctctcagcagaactccagcggaccctgggccatggacctctgtgcccggcggctcctggacccctgtgaacaccaatgtgaccccgaaactggggaatgcctctgctatgaaggctacatgaaggatccagtacataagcacctttgcattcggaacgaatgggggacaaaccaggggccatggccttacacaatatttcagcgaggctttgacctggttttgggagagcagccctctgataaaatatttagattcacctacactcttggggagggcatgtggttgcccctcagcaagagctttgtgattccaccagccgaactggccatcaatccatcagcaaagtgcaagacggacatgactgtgatggaggatgctgtggaggtcagagaggagctgatgacttcatcctccttcgacagcctggaggttctcttagattcctttgggccggtgcgcgactgcagcaaagataacgggggctgcagtaagaatttccgctgtatttcagatcgcaagctggactccactggttgcgtgtgcccatctggactcagtcccatgaaggacagctctggctgctatgaccgccacatcggggtggactgttccgacggcttcaacggcggctgtgagcagctgtgcctccagcagatggcgcccttcccggacgaccccaccttgtataacatcctcatgttctgtgggtgcatcgaggactacaagcttggtgtggatggacgctcttgccaactcatcacggagacctgtccagagggaagtgactgtggggaaagcagggagcttcccatgaaccagaccctctttggggagatgttctttggttacaacaaccattccaaggaagtggctgccggacaggtgctgaaaggaacattcaggcaaaacaactttgctcgtggtttagaccagcaactgccagatggtcttgtggtggccactgtgcccctggagaatcaatgcctagaggagatctcggagcccacccctgaccctgacttcctgactgggatggtgaacttcagtgaagtgtctgggtaccctgtgctgcagcactggaaggtccggtctgtgatgtaccacatcaaactcaaccaagtggccatctctcaggccctcagcaatgctctccactcgctggatggggctacatctcgtgcagattttgtggcgctgttggaccagttcggcaaccattacatccaggaagctatctacggctttgaggagtcctgttctatctggtacccaaacaagcaggtccagcggcgactctggctggagtatgaagacatcagtaaaggcaactccccatcagatgagtctgaggagcgggaaagagaccccaaggtgctgacattcccagaatacatcaccagcttgtcagactccggcaccaagcacatggcggctggagtccgcatggagtgccacagcaagggacgatgcccctcgtcctgccccctgtgtcatgtgacatccagccctgacacccctgctgagccggttctgctggaggtgaccaaagcagcccccatctatgaactagtgaccaacaaccagacccagaggctcttgcaggaggctaccatgagctctctctggtgctcagggactggagatgtcatcgaggactggtgtcgatgtgactccactgcttttggagctgatggactccccacctgtgcgcctctcccacagcctgtgctgagactctccacggttcacgagcccagcagcactcttgtggtcctggagtgggaacactcagagccaccaatcggggtgcagattgtagattacctcctccgtcaagagaaagtcactgacaggatggaccactccaaagtggagacagaaacagtgctgagctttgtggacgacatcatctctggagcaaagtctccttgtgcaatgccatctcaggtgccggacaagcagctcaccaccatctctctgatcatacgatgcctggaacctgacaccatttacatgttcacgctgtggggagtggacaacacaggacggcgctccaggccaagcgacgtgatcgtgaagaccccatgccccgtggtggatgatgtcaaggctcaagaaatagcagacaagatctacaatctcttcaatggctacactagtgggaaggagcagcagaccgcctacaacaccctcctggatctgggttcccccaccttacaccgggtcctctaccactataaccagcactatgagagttttggggaattcacctggcgatgtgaggatgagttaggtcccaggtaatcaataaactaagtcaacccttttaaa

SEQ ID NO: 109232 - DNA, 2356 bp, Homo sapiens
  Payload ID: 1457
  Gene Symbol: ASTN2
  Gene Name: astrotactin 2
  Uniprot ID: O75129
  ENST ID: ENST00000288520
  CDS Start-End: 411-1733
ccaagcgcgcggggcaaggcggccctgcaggggtgagctttcctctgagaacccggggccttagcgacacgtaatccagttttccgtctccttggtgcagatgaagaaaccgacgcccatgggcgaaagggacctgctcaagttcactcagtaagtcaggagataagccagaatgcgtatctgactccagtctcaatgtctaccccttcacaaaacggtagcctccagggtagtcctcagcaaagcgttggcaccttactgaatctgtttttccatctgagaaatgggccaacggaaaaatcaaacttccattctggggaagtcgagaaccgggactccctaggaagggcagtgctttggcctcatgttctgtgctctgacagagagctgcactagagacaagtttatccatgaacacattgctctgtaaaggaatgttttgcctactcagctgggaggccgacagcagaggcagacttggggagtacactctgcagcccctgtccctgcagactgaagagaccacagagctgggcagcaagaaggagctcaagtccatgcccttcatcacctacctctcaggtttgctgacagcccagatgctgtcagatgaccagctcatttcaggtgtggagattcgctgtgaggagaaggggcgctgtccatctacctgtcacctttgccgccggccaggcaaggagcagctgagccccacaccagtgctgctggaaatcaaccgtgtggtgccactttataccctcatccaagacaatggcacaaaggaggccttcaagagtgcactgatgagttcctactggtgctcagggaaaggggatgtgatcgatgactggtgcaggtgtgacctcagcgcctttgatgccaatgggctccccaactgcagcccccttctgcagccggtgctgcggctgtccccaacagtggagccctccagtactgtggtctccttggagtgggtggatgttcagccagctattgggaccaaggtctccgactatattctgcagcataagaaagtggatgaatacacagacactgacctgtacacaggagaattcctgagttttgctgatgacttactctctggcctgggcacatcttgtgtagcagctggtcgaagccatggagaggtccctgaagtcagtatctactcagtcatcttcaagtgtctggagcccgacggtctctacaagttcactctgtatgctgtggatacacgagggaggcactcagagctaagcacggtgaccctgaggacggcctgtccactggtagatgacaacaaggcagaagaaatagctgacaagatctacaatctgtacaatgggtacacaagtggaaaggagcagcagatggcctacaacacactgatggaggtctcagcctcgatgctgttccgagtccagcaccactacaactctcactatgaaaagtttggcgacttcgtctggagaagtgaggatgagctggggcccaggaaggcccacctgattctacggcgactggagagggtgagtagccactgctccagcctcctgcggagtgcctacatccagagccgcgtggaaacagtgccctatcttttctgccgcagcgaggaggtccggcctgcaggcatggtgtggtatagcatcctcaaggacaccaaaatcacgtgtgaggagaagatggtgtcaatggcccgaaacacgtacggggagtccaagggccggtgagggagggtattgccctccgtgagcacagagactctccatgggagggggagcagtattctcctggatcctggggcctgggtgggctgggggacagctgaggatgggcctagcagatgaagcttgccagcaaggccaaagcaaacggtttctcctgtggatagtggacagagacctttgtaaccaatggaattattcatttttctctatcttttattttttcaaagatattatttgactctatcaaaagtctctcctttttaaaccttttcttatggatggctgtcaatcccgaggcagaagttttcaggtggagaccaagcggcctttgctcttcttccttcttcctgccacactctgctttcttcctgccatggacccctggaggagacctatggagggacagttttgacctgacccctagaggagacagttttgacctcttcagcaccaggaaggaagctctgaggatggttgcagtgaggaagcatgggtctttaaggacttctctctcttttttgctggacattattgagtttgtgggaccctgcctcttcctgctacctgtgggtctgcccagagtccctgcaggcctgtccatgcattaaaaattcctattgtctctc

SEQ ID NO: 109233 - DNA, 4747 bp, Homo sapiens
  Payload ID: 1457
  Gene Symbol: ASTN2
  Gene Name: astrotactin 2
  Uniprot ID: O75129
  ENST ID: ENST00000313400
  CDS Start-End: 102-4121
ggttcgcttcggcgtccgccgtctccgcagctgcctcctcttcctccttcgccaccgccgccaccgccgccgccgcccgcagcaccgcagcccctcccgccatggccgccgccggcgcccggctcagccccggccccggctcggggctccgggggcggccgaggctctgcttccacccggggccgccgccactgctgccgctgctgctgctgttcctgctcctgctgccgccgccgccgctgctggccggcgccaccgccgctgcctcgcgggagcccgacagcccgtgccggctgaagaccgtcacggtgtccacactgcccgccctgcgggagagcgacatcggctggagcggcgcccgcgccggggccggggctgggaccggggccggagccgccgccgccgccgcgtccccgggctctcctggctctgccggcaccgccgccgagtcgcgcctcctgctctttgtgcgtaacgagctgccggggcgcatcgcggtgcaggacgacctggacaacaccgagctgcccttcttcaccctggagatgtctggcacagcagcggacatctcgctggtgcactggagacagcagtggctggagaatggcaccttgtacttccacgtctccatgagcagctccgggcagctggcccaagccaccgcccccactctccaggagccctcggagattgttgaggagcagatgcacatcctccacatttctgtgatgggtggcctcatcgcgctgctgctgctgctgctggtgttcaccgtggcgctgtacgcccagcgacgttggcagaagcgtcgccgcatcccccagaagagcgcaagcacagaagccactcatgagatccactacatcccatctgtgctgctgggtccccaggcgcgggagagcttccgttcatcccggctgcaaacccacaattccgtcattggcgtgcccatccgggagactcccatcctggatgactatgactgtgaggaggatgaggagccacctaggcgggccaaccatgtctcccgcgaggacgagtttggcagccaggtgacccacactctggacagtctgggacatccaggggaagagaaggtggactttgagaagaaagcagcagctgaggcgactcaggagacagtggagtccctgatgcagaagttcaaggagagtttccgcgctaacacgcccatcgagatcggtcagctgcaaccacccctgcgcagcacatcggcagggaagaggaagcggaggagcaagtctcgaggaggaatcagctttgggagagccaaggggacgtcgggctcagaggcagacgatgaaactcagctgacattctacacggagcagtaccgcagtcgccgccgcagcaaaggtttgctgaaaagcccagtgaacaagacagccctgacactgattgctgtgagttcctgcatcctggccatggtgtgtggcagccagatgtcttgtccactcactgtgaaggtgactctgcatgtgcccgagcacttcatagcagatggaagcagcttcgtggtgagtgaagggagctacctggacatctccgactggttaaacccggccaagctttccctgtattaccagatcaatgccacctccccatgggtgagggacctctgtggacaaaggacgacagatgcctgtgagcagctctgcgacccagaaaccggagagtgcagctgtcatgaaggctatgcccctgaccctgttcacagacacctgtgtgtgcgcagtgactggggacagagtgaaggaccttggccctacacgacacttgagaggggctatgatctggtgacaggggagcaagcccctgaaaagattctcaggtctactttcagcttgggccaaggcctctggcttcctgtcagcaaaagctttgtggttccgcctgtggagctgtccatcaaccccctggccagctgcaagaccgatgtgctcgtcacggaagaccctgcagatgtcagggaagaagcgatgctgtccacatactttgaaaccatcaatgacctgctgtcttccttcgggccagttcgtgactgctctcggaacaatgggggctgcactcgcaacttcaagtgtgtgtctgaccggcaggtggattcctcgggatgtgtgtgccctgaggagctgaaacccatgaaggatggctctggctgctacgaccactccaaaggcattgactgctctgatggctttaatggcggctgtgagcagctgtgcctgcagcagacgctgcccctgccctacgatgccacttcgagcaccatcttcatgttctgcggttgcgtggaggagtacaaactggctcctgatggaaaatcctgcttaatgctctcagatgtctgcgagggccccaagtgcctcaaacctgactccaaattcaatgataccctctttggagagatgctacatggttacaacaaccggacccagcatgtgaaccaaggccaagtcttccagatgacctttagggagaacaacttcatcaaggactttccccagctggccgatgggctgttggtgatcccgctgccggtggaggagcagtgccggggggtcctctccgagccccttccagacctccaactgctcactggagatatcaggtatgatgaggccatgggttaccccatggtgcagcagtggcgggtccggagcaacctctaccgtgtgaagctcagcaccatcaccctcgcagcaggcttcactaatgttctcaagatcctgaccaaggagagcagtcgggaggagctgctgtccttcatccagcactatggctcccactacatcgcagaggccctctatggctcagagctcacctgcatcatccactttcccagcaagaaggtccagcagcagctgtggctccagtatcagaaagagaccacagagctgggcagcaagaaggagctcaagtccatgcccttcatcacctacctctcaggtttgctgacagcccagatgctgtcagatgaccagctcatttcaggtgtggagattcgctgtgaggagaaggggcgctgtccatctacctgtcacctttgccgccggccaggcaaggagcagctgagccccacaccagtgctgctggaaatcaaccgtgtggtgccactttataccctcatccaagacaatggcacaaaggaggccttcaagagtgcactgatgagttcctactggtgctcagggaaaggggatgtgatcgatgactggtgcaggtgtgacctcagcgcctttgatgccaatgggctccccaactgcagcccccttctgcagccggtgctgcggctgtccccaacagtggagccctccagtactgtggtctccttggagtgggtggatgttcagccagctattgggaccaaggtctccgactatattctgcagcataagaaagtggatgaatacacagacactgacctgtacacaggagaattcctgagttttgctgatgacttactctctggcctgggcacatcttgtgtagcagctggtcgaagccatggagaggtccctgaagtcagtatctactcagtcatcttcaagtgtctggagcccgacggtctctacaagttcactctgtatgctgtggatacacgagggaggcactcagagctaagcacggtgaccctgaggacggcctgtccactggtagatgacaacaaggcagaagaaatagctgacaagatctacaatctgtacaatgggtacacaagtggaaaggagcagcagatggcctacaacacactgatggaggtctcagcctcgatgctgttccgagtccagcaccactacaactctcactatgaaaagtttggcgacttcgtctggagaagtgaggatgagctggggcccaggaaggcccacctgattctacggcgactggagagggtgagtagccactgctccagcctcctgcggagtgcctacatccagagccgcgtggaaacagtgccctatcttttctgccgcagcgaggaggtccggcctgcaggcatggtgtggtatagcatcctcaaggacaccaaaatcacgtgtgaggagaagatggtgtcaatggcccgaaacacgtacggggagtccaagggccggtgagggagggtattgccctccgtgagcacagagactctccatgggagggggagcagtattctcctggatcctggggcctgggtgggctgggggacagctgaggatgggcctagcagatgaagcttgccagcaaggccaaagcaaacggtttctcctgtggatagtggacagagacctttgtaaccaatggaattattcatttttctctatcttttattttttcaaagatattatttgactctatcaaaagtctctcctttttaaaccttttcttatggatggctgtcaatcccgaggcagaagttttcaggtggagaccaagcggcctttgctcttcttccttcttcctgccacactctgctttcttcctgccatggacccctggaggagacctatggagggacagttttgacctgacccctagaggagacagttttgacctcttcagcaccaggaaggaagctctgaggatggttgcagtgaggaagcatgggtctttaaggacttctctctcttttttgctggacattattgagtttgtgggaccctgcctcttcctgctacctgtgggtctgcccagagtccctgcaggcctgtccatgcattaaaaattcctattgtctctcttt

SEQ ID NO: 109234 - DNA, 1757 bp, Homo sapiens
  Payload ID: 1457
  Gene Symbol: ASTN2
  Gene Name: astrotactin 2
  Uniprot ID: O75129
  ENST ID: ENST00000341734
  CDS Start-End: 208-1395
gcttgtcgtgcagctggccccaagcgcgcggggcaaggcggccctgcaggggtgagctttcctctgagaacccggggccttagcgacacgtaatccagttttccgtctccttggtgcagatgaagaaaccgacgcccatgggcgaaagggacctgctcaagttcactcaagaccacagagctgggcagcaagaaggagctcaagtccatgcccttcatcacctacctctcaggtttgctgacagcccagatgctgtcagatgaccagctcatttcaggtgtggagattcgctgtgaggagaaggggcgctgtccatctacctgtcacctttgccgccggccaggcaaggagcagctgagccccacaccagtgctgctggaaatcaaccgtgtggtgccactttataccctcatccaagacaatggcacaaaggaggccttcaagagtgcactgatgagttcctactggtgctcagggaaaggggatgtgatcgatgactggtgcaggtgtgacctcagcgcctttgatgccaatgggctccccaactgcagcccccttctgcagccggtgctgcggctgtccccaacagtggagccctccagtactgtggtctccttggagtgggtggatgttcagccagctattgggaccaaggtctccgactatattctgcagcataagaaagtggatgaatacacagacactgacctgtacacaggagaattcctgagttttgctgatgacttactctctggcctgggcacatcttgtgtagcagctggtcgaagccatggagaggtccctgaagtcagtatctactcagtcatcttcaagtgtctggagcccgacggtctctacaagttcactctgtatgctgtggatacacgagggaggcactcagagctaagcacggtgaccctgaggacggcctgtccactggtagatgacaacaaggcagaagaaatagctgacaagatctacaatctgtacaatgggtacacaagtggaaaggagcagcagatggcctacaacacactgatggaggtctcagcctcgatgctgttccgagtccagcaccactacaactctcactatgaaaagtttggcgacttcgtctggagaagtgaggatgagctggggcccaggaaggcccacctgattctacggcgactggagagggtgagtagccactgctccagcctcctgcggagtgcctacatccagagccgcgtggaaacagtgccctatcttttctgccgcagcgaggaggtccggcctgcaggcatggtgtggtatagcatcctcaaggacaccaaaatcacgtgtgaggagaagatggtgtcaatggcccgaaacacatattatttgactctatcaaaagtctctcctttttaaaccttttcttatggatggctgtcaatcccgaggcagaagttttcaggtggagaccaagcggcctttgctcttcttccttcttcctgccacactctgctttcttcctgccatggacccctggaggagacctatggagggacagttttgacctgacccctagaggagacagttttgacctcttcagcaccaggaaggaagctctgaggatggttgcagtgaggaagcatgggtctttaaggacttctctctcttttttgctggacattattgagtttgtgggaccctgcctcttcctgctacctgtgggtctgcccagagtccctgcaggcctgtccatgcattaaaaattcctattgtctctc

SEQ ID NO: 109235 - DNA, 3411 bp, Homo sapiens
  Payload ID: 1457
  Gene Symbol: ASTN2
  Gene Name: astrotactin 2
  ENST ID: ENST00000358637
  CDS Start-End: 195-779
ctggccccaagcgcgcggggcaaggcggccctgcaggggtgagctttcctctgagaacccggggccttagcgacacgtaatccagttttccgtctccttggtgcagatgaagaaaccgacgcccatgggcgaaagggacctgctcaagttcactcaagaccacagagctgggcagcaagaaggagctcaagtccatgcccttcatcacctacctctcaggtttgctgacagcccagatgctgtcagatgaccagctcatttcaggtgtggagattcgctgtgaggagaaggggcgctgtccatctacctgtcacctttgccgccggccaggcaaggagcagctgagccccacaccagtgctgctggaaatcaaccgtgtggtgccactttataccctcatccaagacaatggcacaaaggaggccttcaagagtgcactgatgagttcctactggtgctcagggaaaggggatgtgatcgatgactggtgcaggtgtgacctcagcgcctttgatgccaatgggctccccaactgcagcccccttctgcagccggtgctgcggctgtccccaacagtggagccctccagtactgtggtctccttggagtgggtggatgttcagccagctattgggaccaaggtctccgactatattctgcagcataagaaagtggatgaatacacagacactgacctgtacacagtttattgctggattacatttattgatttgcggatattgaaccagccttgcatcccagggatgaagccaacttgattgtggtggataagctttttgatgtgctgctggatttggtttgccaatattttattgaagatttttgcatcgatgttcatcagggatattggtctaaaattctctttttttgttgtgtctctgccaggctttggtatcaggatgatgttggcctcataaaatgaattagggaggattccctctttttctattgatttgaatagtttcagaaggaatggtaccagctcatctttgtacctctggtagaattcggctgtgaatccatctggtcctggacttattttggttagtaggctattaattatggcctcaatttcagaacctgttattggtctattcagggattcaacttcttcctggtttagtcttgggaggaggctgtatgtgtccaggaatttatccatttcttctagattttctagtttatttgcatagaggtgtttatagtattctctaatggtagtttgtatttctgtgggatcggtggtgatatcccctttatcattttttattgcgtctatttgattcttctctcttttattctttatgagtcttgctagtagtctatcaattttgttgattttttcaaaaaaccagctcctggattcattgattttttgaagggtttttttttttttgtctctatctccttcagttctgctctcatcttagttatttcttgccttctgctagcttttgtgtgtttgctcttgcttctctagttcttttaattatgatgttagggtgtcagtttcagatctttcttgctttctcctgtgggcatttagtgctataaatctccctctacacactgctttaaatgtgtcccagagattctggtatgttgtgtcctgttctcattggtttcaaagaacatctttatttccgctttcatttcgttatgtacccagtagtcattcaggagcaagttgttcagtttccatgtagttgagcggttttgagtgagtttcttaatcctgagttctagtttgattgcactgtgttctgagagacagtttgttataatttctttcttttacatttgctgaggagtgctttacttcccactgtgtgatcaattttggaataactgcgatgtggtgctgagaagaatgtatattctgttgattggggtggatagttctgtagatgtctattaggtccgcttggtgcagagctgagttcaattcctggatatccttgttaactttctgtctcattgatctatctaatgttgacagtggggtgttaaagtctcccattattattgtgtgggagtctaagtctctttgtaagtctctaaggacttgctttatgaatctgggtgctcctatattgggtgcatatatatttaggatagttagctcgaagaaggtatcttctatttctagtctgctgcaaaggctctgttttgtttccattggaaacagatgttgaattttctgtgtctattaaaatgattgtatagtttatctctctaaatttgttaatatgataagtcacattgatagattttcatattataaaacaacctactatgtgagatttatcccaggaatgtgtaggttgttttatctgtttgttttaattaggatcattctggtctcacaaaatgaattataaaatattttctccttttcagttttctgaagtgtatctgtcttctcagagaatcactgtggttaaaattgatagtatttttttcttaatcattttttagaattcaccagtgaaggcatctgggcttagaccttttcttgcaagaaggtttttaactactaatttagttatttaatagatatagatttacttagattatctgtttcttcttgagtgatctttggcagcttgtgtgttttaaggaacttgttcattccatgtaaattatcaaatttattggaaaaagttgtttatgacattccgttactattcttttgaaatctgttgagattatagtgatattagtctcatcttgatattggtaatgtgtgtctcctctgttttttttctagatcagtttggctagatagctatgacatttatttgtattttcaaagaatcaactttcggttttatctgtttttgcttattgtttcctatttcattgatttatcctctaatttttattataattttctttgtttggcttactttgagtttggttttctccgcattttaatttttgaaatggtagctgaggctattgatttgagacctttcttgtaatgtagtcattccctcttaactactgctttagtagtatctcaaagattgtgttatgttgcgttttcattttcattcagttcaaagtatttccaatttcacttttgttttcttctttgacttatgagttatttagaggcatgccacttcgttttcaaatatttgggagttttttcagaaatttttgttgttgatttttgattccgctatagtcagaaaatatgtttttatgactttaaacattttaaatttattgagactagtttttggtctagatggtctattgctgtattcagtgttcactttaaaataatgtgtatccacttatttatgggtattttataaatgcctgttagataaaatcggttaattatgttattcaagtcttctggagcctttctgattttct

SEQ ID NO: 109236 - DNA, 4622 bp, Homo sapiens
  Payload ID: 1457
  Gene Symbol: ASTN2
  Gene Name: astrotactin 2
  Uniprot ID: O75129
  ENST ID: ENST00000361209
  CDS Start-End: 133-3999
ggctctctccgctccttagctcgggcgtcctggttcgcttcggcgtccgccgtctccgcagctgcctcctcttcctccttcgccaccgccgccaccgccgccgccgcccgcagcaccgcagcccctcccgccatggccgccgccggcgcccggctcagccccggccccggctcggggctccgggggcggccgaggctctgcttccacccggggccgccgccactgctgccgctgctgctgctgttcctgctcctgctgccgccgccgccgctgctggccggcgccaccgccgctgcctcgcgggagcccgacagcccgtgccggctgaagaccgtcacggtgtccacactgcccgccctgcgggagagcgacatcggctggagcggcgcccgcgccggggccggggctgggaccggggccggagccgccgccgccgccgcgtccccgggctctcctggctctgccggcaccgccgccgagtcgcgcctcctgctctttgtgcgtaacgagctgccggggcgcatcgcggtgcaggacgacctggacaacaccgagctgcccttcttcaccctggagatgtctggcacagcagcggacatctcgctggtgcactggagacagcagtggctggagaatggcaccttgtacttccacgtctccatgagcagctccgggcagctggcccaagccaccgcccccactctccaggagccctcggagattgttgaggagcagatgcacatcctccacatttctgtgatgggtggcctcatcgcgctgctgctgctgctgctggtgttcaccgtggcgctgtacgcccagcgacgttggcagaagcgtcgccgcatcccccagaagagcgcaagcacagaagccactcatgagatccactacatcccatctgtgctgctgggtccccaggcgcgggagagcttccgttcatcccggctgcaaacccacaattccgtcattggcgtgcccatccgggagactcccatcctggatgactatgactgtgaggaggatgaggagccacctaggcgggccaaccatgtctcccgcgaggacgagtttggcagccaggtgacccacactctggacagtctgggacatccaggggaagagaaggtggactttgagaagaaaggaggaatcagctttgggagagccaaggggacgtcgggctcagaggcagacgatgaaactcagctgacattctacacggagcagtaccgcagtcgccgccgcagcaaaggtttgctgaaaagcccagtgaacaagacagccctgacactgattgctgtgagttcctgcatcctggccatggtgtgtggcagccagatgtcttgtccactcactgtgaaggtgactctgcatgtgcccgagcacttcatagcagatggaagcagcttcgtggtgagtgaagggagctacctggacatctccgactggttaaacccggccaagctttccctgtattaccagatcaatgccacctccccatgggtgagggacctctgtggacaaaggacgacagatgcctgtgagcagctctgcgacccagaaaccggagagtgcagctgtcatgaaggctatgcccctgaccctgttcacagacacctgtgtgtgcgcagtgactggggacagagtgaaggaccttggccctacacgacacttgagaggggctatgatctggtgacaggggagcaagcccctgaaaagattctcaggtctactttcagcttgggccaaggcctctggcttcctgtcagcaaaagctttgtggttccgcctgtggagctgtccatcaaccccctggccagctgcaagaccgatgtgctcgtcacggaagaccctgcagatgtcagggaagaagcgatgctgtccacatactttgaaaccatcaatgacctgctgtcttccttcgggccagttcgtgactgctctcggaacaatgggggctgcactcgcaacttcaagtgtgtgtctgaccggcaggtggattcctcgggatgtgtgtgccctgaggagctgaaacccatgaaggatggctctggctgctacgaccactccaaaggcattgactgctctgatggctttaatggcggctgtgagcagctgtgcctgcagcagacgctgcccctgccctacgatgccacttcgagcaccatcttcatgttctgcggttgcgtggaggagtacaaactggctcctgatggaaaatcctgcttaatgctctcagatgtctgcgagggccccaagtgcctcaaacctgactccaaattcaatgataccctctttggagagatgctacatggttacaacaaccggacccagcatgtgaaccaaggccaagtcttccagatgacctttagggagaacaacttcatcaaggactttccccagctggccgatgggctgttggtgatcccgctgccggtggaggagcagtgccggggggtcctctccgagccccttccagacctccaactgctcactggagatatcaggtatgatgaggccatgggttaccccatggtgcagcagtggcgggtccggagcaacctctaccgtgtgaagctcagcaccatcaccctcgcagcaggcttcactaatgttctcaagatcctgaccaaggagagcagtcgggaggagctgctgtccttcatccagcactatggctcccactacatcgcagaggccctctatggctcagagctcacctgcatcatccactttcccagcaagaaggtccagcagcagctgtggctccagtatcagaaagagaccacagagctgggcagcaagaaggagctcaagtccatgcccttcatcacctacctctcaggtttgctgacagcccagatgctgtcagatgaccagctcatttcaggtgtggagattcgctgtgaggagaaggggcgctgtccatctacctgtcacctttgccgccggccaggcaaggagcagctgagccccacaccagtgctgctggaaatcaaccgtgtggtgccactttataccctcatccaagacaatggcacaaaggaggccttcaagagtgcactgatgagttcctactggtgctcagggaaaggggatgtgatcgatgactggtgcaggtgtgacctcagcgcctttgatgccaatgggctccccaactgcagcccccttctgcagccggtgctgcggctgtccccaacagtggagccctccagtactgtggtctccttggagtgggtggatgttcagccagctattgggaccaaggtctccgactatattctgcagcataagaaagtggatgaatacacagacactgacctgtacacaggagaattcctgagttttgctgatgacttactctctggcctgggcacatcttgtgtagcagctggtcgaagccatggagaggtccctgaagtcagtatctactcagtcatcttcaagtgtctggagcccgacggtctctacaagttcactctgtatgctgtggatacacgagggaggcactcagagctaagcacggtgaccctgaggacggcctgtccactggtagatgacaacaaggcagaagaaatagctgacaagatctacaatctgtacaatgggtacacaagtggaaaggagcagcagatggcctacaacacactgatggaggtctcagcctcgatgctgttccgagtccagcaccactacaactctcactatgaaaagtttggcgacttcgtctggagaagtgaggatgagctggggcccaggaaggcccacctgattctacggcgactggagagggtgagtagccactgctccagcctcctgcggagtgcctacatccagagccgcgtggaaacagtgccctatcttttctgccgcagcgaggaggtccggcctgcaggcatggtgtggtatagcatcctcaaggacaccaaaatcacgtgtgaggagaagatggtgtcaatggcccgaaacacgtacggggagtccaagggccggtgagggagggtattgccctccgtgagcacagagactctccatgggagggggagcagtattctcctggatcctggggcctgggtgggctgggggacagctgaggatgggcctagcagatgaagcttgccagcaaggccaaagcaaacggtttctcctgtggatagtggacagagacctttgtaaccaatggaattattcatttttctctatcttttattttttcaaagatattatttgactctatcaaaagtctctcctttttaaaccttttcttatggatggctgtcaatcccgaggcagaagttttcaggtggagaccaagcggcctttgctcttcttccttcttcctgccacactctgctttcttcctgccatggacccctggaggagacctatggagggacagttttgacctgacccctagaggagacagttttgacctcttcagcaccaggaaggaagctctgaggatggttgcagtgaggaagcatgggtctttaaggacttctctctcttttttgctggacattattgagtttgtgggaccctgcctcttcctgctacctgtgggtctgcccagagtccctgcaggcctgtccatgcattaaaaattcctattgtctctc

SEQ ID NO: 109237 - DNA, 4001 bp, Homo sapiens
  Payload ID: 1457
  Gene Symbol: ASTN2
  Gene Name: astrotactin 2
  ENST ID: ENST00000361477
  CDS Start-End: 2793-4001
ggttcgcttcggcgtccgccgtctccgcagctgcctcctcttcctccttcgccaccgccgccaccgccgccgccgcccgcagcaccgcagcccctcccgccatggccgccgccggcgcccggctcagccccggccccggctcggggctccgggggcggccgaggctctgcttccacccggggccgccgccactgctgccgctgctgctgctgttcctgctcctgctgccgccgccgccgctgctggccggcgccaccgccgctgcctcgcgggagcccgacagcccgtgccggctgaagaccgtcacggtgtccacactgcccgccctgcgggagagcgacatcggctggagcggcgcccgcgccggggccggggctgggaccggggccggagccgccgccgccgccgcgtccccgggctctcctggctctgccggcaccgccgccgagtcgcgcctcctgctctttgtgcgtaacgagctgccggggcgcatcgcggtgcaggacgacctggacaacaccgagctgcccttcttcaccctggagatgtctggcacagcagcggacatctcgctggtgcactggagacagcagtggctggagaatggcaccttgtacttccacgtctccatgagcagctccgggcagctggcccaagccaccgcccccactctccaggagccctcggagattgttgaggagcagatgcacatcctccacatttctgtgatgggtggcctcatcgcgctgctgctgctgctgctggtgttcaccgtggcgctgtacgcccagcgacgttggcagaagcgtcgccgcatcccccagaagagcgcaagcacagaagccactcatgagatccactacatcccatctgtgctgctgggtccccaggcgcgggagagcttccgttcatcccggctgcaaacccacaattccgtcattggcgtgcccatccgggagactcccatcctggatgactatgactgtgaggaggatgaggagccacctaggcgggccaaccatgtctcccgcgaggacgagtttggcagccaggtgacccacactctggacagtctgggacatccaggggaagagaaggtggactttgagaagaaaggaggaatcagctttgggagagccaaggggacgtcgggctcagaggcagacgatgaaactcagctgacattctacacggagcagtaccgcagtcgccgccgcagcaaaggtttgctgaaaagcccagtgaacaagacagccctgacactgattgctgtgagttcctgcatcctggccatggtgtgtggcagccagatgtcttgtccactcactgtgaaggtgactctgcatgtgcccgagcacttcatagcagatggaagcagcttcgtggtgagtgaagggagctacctggacatctccgactggttaaacccggccaagctttccctgtattaccagatcaatgccacctccccatgggtgagggacctctgtggacaaaggacgacagatgcctgtgagcagctctgcgacccagaaaccggagagtgcagctgtcatgaaggctatgcccctgaccctgttcacagacacctgtgtgtgcgcagtgactggggacagagtgaaggaccttggccctacacgacacttgagaggggctatgatctggtgacaggggagcaagcccctgaaaagattctcaggtctactttcagcttgggccaaggcctctggcttcctgtcagcaaaagctttgtggttccgcctgtggagctgtccatcaaccccctggccagctgcaagaccgatgtgctcgtcacggaagaccctgcagatgtcagggaagaagcgatgctgtccacatactttgaaaccatcaatgacctgctgtcttccttcgggccagttcgtgactgctctcggaacaatgggggctgcactcgcaacttcaagtgtgtgtctgaccggcaggtggattcctcgggatgtgtgtgccctgaggagctgaaacccatgaaggatggctctggctgctacgaccactccaaaggcattgactgctctgatggctttaatggcggctgtgagcagctgtgcctgcagcagacgctgcccctgccctacgatgccacttcgagcaccatcttcatgttctgcggttgcgtggaggagtacaaactggctcctgatggaaaatcctgcttaatgctctcagatgtctgcgagggccccaagtgcctcaaacctgactccaaattcaatgataccctctttggagagatgctacatggttacaacaaccggacccagcatgtgaaccaaggccaagtcttccagatgacctttagggagaacaacttcatcaaggactttccccagctggccgatgggctgttggtgatcccgctgccggtggaggagcagtgccggggggtcctctccgagccccttccagacctccaactgctcactggagatatcaggtatgatgaggccatgggttaccccatggtgcagcagtggcgggtccggagcaacctctaccgtgtgaagctcagcaccatcaccctcgcagcaggcttcactaatgttctcaagatcctgaccaaggagagcagtcgggaggagctgctgtccttcatccagcactatggctcccactacatcgcagaggccctctatggctcagagctcacctgcatcatccactttcccagcaagaaggtccagcagcagctgtggctccagtatcagaaagagaccacagagctgggcagcaagaaggagctcaagtccatgcccttcatcacctacctctcaggtttgctgacagcccagatgctgtcagatgaccagctcatttcaggtgtggagattcgctgtgaggagaaggggcgctgtccatctacctgtcacctttgccgccggccaggcaaggagcagctgagccccacaccagtgctgctggaaatcaaccgtgtggtgccactttataccctcatccaagacaatggcacaaaggaggccttcaagagtgcactgatgagttcctactggtgctcagggaaaggggatgtgatcgatgactggtgcaggtgtgacctcagcgcctttgatgccaatgggctccccaactgcagcccccttctgcagccggtgctgcggctgtccccaacagtggagccctccagtactgtggtctccttggagtgggtggatgttcagccagctattgggaccaaggtctccgactatattctgcagcataagaaagtggatgaatacacagacactgacctgtacacaggagaattcctgagttttgctgatgacttactctctggcctgggcacatcttgtgtagcagctggtcgaagccatggagaggtccctgaagtcagtatctactcagtcatcttcaagtgtctggagcccgacggtctctacaagttcactctgtatgctgtggatacacgagggaggcactcagagctaagcacggtgaccctgaggacggcctgtccactggtagatgacaacaaggcagaagaaatagctgacaagatctacaatctgtacaatgggtacacaagtggaaaggagcagcagatggcctacaacacactgatggaggtctcagcctcgatgctgttccgagtccagcaccactacaactctcactatgaaaagtttggcgacttcgtctggagaagtgaggatgagctggggcccaggaaggcccacctgattctacggcgactggagagggtgagtagccactgctccagcctcctgcggagtgcctacatccagagccgcgtggaaacagtgccctatcttttctgccgcagcgaggaggtccggcctgcaggcatggtgtggtatagcatcctcaaggacaccaaaatcacgtgtgaggagaagatggtgtcaatggcccgaaacacgtacggggagtccaagggccgatattatttgactctatcaaaagtctctcctttttaa

SEQ ID NO: 109238 - DNA, 3812 bp, Homo sapiens
  Payload ID: 1457
  Gene Symbol: ASTN2
  Gene Name: astrotactin 2
  ENST ID: ENST00000373986
  CDS Start-End: 1-3189
caaacccacaattccgtcattggcgtgcccatccgggagactcccatcctggatgactatgactgtgaggaggatgaggagccacctaggcgggccaaccatgtctcccgcgaggacgagtttggcagccaggtgacccacactctggacagtctgggacatccaggggaagagaaggtggactttgagaagaaagcagcagctgaggcgactcaggagacagtggagtccctgatgcagaagttcaaggagagtttccgcgctaacacgcccatcgagatcggtcagctgcaaccacccctgcgcagcacatcggcagggaagaggaagcggaggagcaagtctcgaggaggaatcagctttgggagagccaaggggacgtcgggctcagaggcagacgatgaaactcagctgacattctacacggagcagtaccgcagtcgccgccgcagcaaaggtttgctgaaaagcccagtgaacaagacagccctgacactgattgctgtgagttcctgcatcctggccatggtgtgtggcagccagatgtcttgtccactcactgtgaaggtgactctgcatgtgcccgagcacttcatagcagatggaagcagcttcgtggtgagtgaagggagctacctggacatctccgactggttaaacccggccaagctttccctgtattaccagatcaatgccacctccccatgggtgagggacctctgtggacaaaggacgacagatgcctgtgagcagctctgcgacccagaaaccggagagtgcagctgtcatgaaggctatgcccctgaccctgttcacagacacctgtgtgtgcgcagtgactggggacagagtgaaggaccttggccctacacgacacttgagaggggctatgatctggtgacaggggagcaagcccctgaaaagattctcagcttgggccaaggcctctggcttcctgtcagcaaaagctttgtggttccgcctgtggagctgtccatcaaccccctggccagctgcaagaccgatgtgctcgtcacggaagaccctgcagatgtcagggaagaagcgatgctgtccacatactttgaaaccatcaatgacctgctgtcttccttcgggccagttcgtgactgctctcggaacaatgggggctgcactcgcaacttcaagtgtgtgtctgaccggcaggtggattcctcgggatgtgtgtgccctgaggagctgaaacccatgaaggatggctctggctgctacgaccactccaaaggcattgactgctctgatggctttaatggcggctgtgagcagctgtgcctgcagcagacgctgcccctgccctacgatgccacttcgagcaccatcttcatgttctgcggttgcgtggaggagtacaaactggctcctgatggaaaatcctgcttaatgctctcagatgtctgcgagggccccaagtgcctcaaacctgactccaaattcaatgataccctctttggagagatgctacatggttacaacaaccggacccagcatgtgaaccaaggccaagtcttccagatgacctttagggagaacaacttcatcaaggactttccccagctggccgatgggctgttggtgatcccgctgccggtggaggagcagtgccggggggtcctctccgagccccttccagacctccaactgctcactggagatatcaggtatgatgaggccatgggttaccccatggtgcagcagtggcgggtccggagcaacctctaccgtgtgaagctcagcaccatcaccctcgcagcaggcttcactaatgttctcaagatcctgaccaaggagagcagtcgggaggagctgctgtccttcatccagcactatggctcccactacatcgcagaggccctctatggctcagagctcacctgcatcatccactttcccagcaagaaggtccagcagcagctgtggctccagtatcagaaagagaccacagagctgggcagcaagaaggagctcaagtccatgcccttcatcacctacctctcaggtttgctgacagcccagatgctgtcagatgaccagctcatttcaggtgtggagattcgctgtgaggagaaggggcgctgtccatctacctgtcacctttgccgccggccaggcaaggagcagctgagccccacaccagtgctgctggaaatcaaccgtgtggtgccactttataccctcatccaagacaatggcacaaaggaggccttcaagagtgcactgatgagttcctactggtgctcagggaaaggggatgtgatcgatgactggtgcaggtgtgacctcagcgcctttgatgccaatgggctccccaactgcagcccccttctgcagccggtgctgcggctgtccccaacagtggagccctccagtactgtggtctccttggagtgggtggatgttcagccagctattgggaccaaggtctccgactatattctgcagcataagaaagtggatgaatacacagacactgacctgtacacaggagaattcctgagttttgctgatgacttactctctggcctgggcacatcttgtgtagcagctggtcgaagccatggagaggtccctgaagtcagtatctactcagtcatcttcaagtgtctggagcccgacggtctctacaagttcactctgtatgctgtggatacacgagggaggcactcagagctaagcacggtgaccctgaggacggcctgtccactggtagatgacaacaaggcagaagaaatagctgacaagatctacaatctgtacaatgggtacacaagtggaaaggagcagcagatggcctacaacacactgatggaggtctcagcctcgatgctgttccgagtccagcaccactacaactctcactatgaaaagtttggcgacttcgtctggagaagtgaggatgagctggggcccaggaaggcccacctgattctacggcgactggagagggtgagtagccactgctccagcctcctgcggagtgcctacatccagagccgcgtggaaacagtgccctatcttttctgccgcagcgaggaggtccggcctgcaggcatggtgtggtatagcatcctcaaggacaccaaaatcacgtgtgaggagaagatggtgtcaatggcccgaaacacgtacggggagtccaagggccggtgagggagggtattgccctccgtgagcacagagactctccatgggagggggagcagtattctcctggatcctggggcctgggtgggctgggggacagctgaggatgggcctagcagatgaagcttgccagcaaggccaaagcaaacggtttctcctgtggatagtggacagagacctttgtaaccaatggaattattcatttttctctatcttttattttttcaaagatattatttgactctatcaaaagtctctcctttttaaaccttttcttatggatggctgtcaatcccgaggcagaagttttcaggtggagaccaagcggcctttgctcttcttccttcttcctgccacactctgctttcttcctgccatggacccctggaggagacctatggagggacagttttgacctgacccctagaggagacagttttgacctcttcagcaccaggaaggaagctctgaggatggttgcagtgaggaagcatgggtctttaaggacttctctctcttttttgctggacattattgagtttgtgggaccctgcctcttcctgctacctgtgggtctgcccagagtccctgcaggcctgtccatgcattaaaaattcctattgtctctc

SEQ ID NO: 109239 - DNA, 395 bp, Homo sapiens
  Payload ID: 1457
  Gene Symbol: ASTN2
  Gene Name: astrotactin 2
  ENST ID: ENST00000417725
  CDS Start-End: 1-296
agatggcctacaacacactgatggaggtctcagcctcgatgctgttccgagtccagcaccactacaactctcactatgaaaagtttggcgacttcgtctggagaagtgaggatgagctggggcccagcctcctggaatcctttatgagcctccaggacataaatcttctggaaaggcggccgggccgcccacagaggccaggcaatccactcagtaatgtctcctggaggatatctgagattgctccaacatcccacactgatatgtcagcaggaatcaaggaaactgcctcctaatctatcctggtgctgctaataagctcactgtgcaaccctgggctctgccgctttctggccctcagtctcctcacctataacatgataaggacgaactag

SEQ ID NO: 109240 - DNA, 2974 bp, Homo sapiens
  Payload ID: 1458
  Gene Symbol: ASUN
  Gene Name: asunder spermatogenesis regulator
  Uniprot ID: Q9NVM9
  ENST ID: ENST00000261191
  CDS Start-End: 538-2658
gagtttttccaggggaaaccggcctgggtggagagacagagaaggggagaccgggtgggtgggtcgtacgcttagggggccgtggttggtacttcgctgttggggaggctttcaggtcgcccagatcctgcttcccaatgggtgactgggaaaattagcgggtggaaaatctcgaggggtggaggctttttttttcctccttggccccgccctcttcctgttcggcgactgggacgcctggccctacgagggggaagggaggcttggccgggctatcggagagcgctgtgcgcacgcgcgagcccgagtgcgtgtgtgtgtgtgcacgcgcacgcgcgctcctgctcttaggaagcctgggaaggaccggtgtgctaggagatgatcggggaaagcatagtcccctgtctgtggcaccagacactcccgactgtgcgctgactctccccgcccagccagcagccttttccagagaggctgtggtccatagcctctgttcgttttcactgcaggaccaggcacgaaagttaaaacaaaatgaagattttttctgaatctcataaaacagtgtttgttgtggatcactgcccttatatggcagaatcttgcaggcagcatgtcgagtttgatatgctggtgaagaatagaacccaaggaatcattcctttggcccccatatctaaatcattgtggacttgctcagtagaatcttccatggaatattgtagaataatgtatgatatatttcctttcaaaaagctggtgaattttattgtgagtgactctggagcacatgttttaaattcttggactcaagaagaccaaaatttacaggagctaatggcagcattagccgctgttgggcctcctaatcctcgggcagatccagagtgctgcagtattctgcatggccttgttgcagcagtggaaactctctgcaaaattactgaataccaacatgaggctcgtactctactcatggagaatgcagaacgtgttggaaatagaggacgaataatctgtattactaatgcaaaaagtgatagtcatgtgcgaatgcttgaagactgtgtccaggaaacgattcatgaacataacaagcttgctgcaaattcagatcatctcatgcagattcaaaaatgtgagttggtcttgatccacacctacccagttggtgaagacagccttgtatctgatcgttctaaaaaagagttgtccccggttttaaccagtgaagttcatagtgttcgtgcaggacggcatcttgctaccaaattgaatattttagtacagcaacattttgacttggcttcaactactattacaaatattccaatgaaggaagaacagcatgctaacacatctgccaattatgatgtggagctacttcatcacaaagatgcacatgtagatttcctgaaaagtggtgattcgcatctaggtggcggcagtcgagaaggctcgtttaaagaaacaataacattaaagtggtgtacaccaaggacaaataacattgaattacactattgtactggagcttatcggatttcacctgtagatgtaaatagtagaccttcctcctgccttactaattttcttctaaatggtcgttctgttttattggaacaaccacgaaagtcaggttctaaagtcattagtcatatgcttagtagccatggaggagagatttttttgcacgtccttagcagttctcgatccattctagaagatccaccttcaattagtgaaggatgtggaggaagagttacagactaccggattacagattttggtgaatttatgagggaaaacagattaactccttttctagaccccagatataaaatcgatggaagtcttgaggtccctttggaacgagcaaaagatcagttagaaaaacatacccgttactggcctatgatcatttcacaaaccaccatttttaacatgcaagcggtagttccattagccagtgttattgtgaaagaatctctgacagaagaagatgtgttaaactgtcaaaaaacaatatacaacttagttgatatggaaagaaaaaatgatcctctacctatttccacagttggtacaagaggaaagggccctaaaagagatgaacaataccgtatcatgtggaatgaattagaaacccttgtcagagcccatatcaacaactcagagaaacatcaaagagtcttggaatgtctgatggcatgcaggagcaaacccccagaagaggaagaacgaaagaaacgaggaagaaagagggaagacaaagaggacaagtcagagaaagcagtgaaagattatgaacaggaaaagtcttggcaagactcagagagattaaaaggaatcttagagcgtggaaaagaagaattggctgaagctgagattataaaagattcgcctgattccccagaacctccaaacaaaaaaccccttgttgaaatggatgaaactccacaagtggaaaaatcaaaagggccagtgtcgttattatccttgtggagtaatagaatcaatactgccaattccagaaaacatcaggaatttgctggacgtttgaactctgttaataacagagctgaactatatcaacatcttaaagaggaaaatgggatggagacaacagaaaatggaaaagccagccggcagtgaagagtgacttgaagaactaaatttagcatattgcaaaaatattttgtgcggaattcgatataagtacttttacagcaagatggtatagttatgttgcctggactggtttttacatttttaaaatatttcagctgtcatttttgtactaattataaaattggcacataattcaaaaatatacatttgagatgatttgtcctcccaaattatacaagtttattttatggtataaagtgttctctctggaaatgtttttaaaaaaattcttaggcttctctttgcgaaataaaactattaaaatatttgaaatgcaaaa

SEQ ID NO: 109241 - DNA, 560 bp, Homo sapiens
  Payload ID: 1458
  Gene Symbol: ASUN
  Gene Name: asunder spermatogenesis regulator
  ENST ID: ENST00000537336
  CDS Start-End: 71-560
ctcgcgagtttttccaggggaaaccggcctgggtggagagacagagaaggggagaccgggttaaaacaaaatgaagattttttctgaatctcataaaacagtgtttgttgtggatcactgcccttatatggcagaatcttgcaggcagcatgtcgagtttgatatgctggtgaagaatagaacccaaggaatcattcctttggcccccatatctaaatcattgtggacttgctcagtagaatcttccatggaatattgtagaataatgtatgatatatttcctttcaaaaagctggtgaattttattgtgagtgactctggagcacatgttttaaattcttggactcaagaagaccaaaatttacaggagctaatggcagcattagccgctgttgggcctcctaatcctcgggcagatccagagtgctgcagtattctgcatggccttgttgcagcagtggaaactctctgcaaaattactgaataccaacatgaggctcgtactctactcatggagaatgcagaacgtgttggaaatagaggacgaataatctgtatta

SEQ ID NO: 109242 - DNA, 1378 bp, Homo sapiens
  Payload ID: 1458
  Gene Symbol: ASUN
  Gene Name: asunder spermatogenesis regulator
  ENST ID: ENST00000538155
  CDS Start-End: 1-1062
ggtgattcgcatctaggtggcggcagtcgagaaggctcgtttaaagaaacaataacattaaagtggtgtacaccaaggacaaataacattgaattacactattgtactggagcttatcggatttcacctgtagatgtaaatagtagaccttcctcctgccttactaattttcttctaaatggtcgttctgttttattggaacaaccacgaaagtcaggttctaaagtcattagtcatatgcttagtagccatggaggagagatttttttgcacgtccttagcagttctcgatccattctagaagatccaccttcaattagtgaaggatgtggaggaagagttacagactaccggattacagtagttccattagccagtgttattgtgaaagaatctctgacagaagaagatgtgttaaactgtcaaaaaacaatatacaacttagttgatatggaaagaaaaaatgatcctctacctatttccacagttggtacaagaggaaagggccctaaaagagatgaacaataccgtatcatgtggaatgaattagaaacccttgtcagagcccatatcaacaactcagagaaacatcaaagagtcttggaatgtctgatggcatgcaggagcaaacccccagaagaggaagaacgaaagaaacgaggaagaaagagggaagacaaagaggacaagtcagagaaagcagtgaaagattatgaacaggaaaagtcttggcaagactcagagagattaaaaggaatcttagagcgtggaaaagaagaattggctgaagctgagattataaaagattcgcctgattccccagaacctccaaacaaaaaaccccttgttgaaatggatgaaactccacaagtggaaaaatcaaaagggccagtgtcgttattatccttgtggagtaatagaatcaatactgccaattccagaaaacatcaggaatttgctggacgtttgaactctgttaataacagagctgaactatatcaacatcttaaagaggaaaatgggatggagacaacagaaaatggaaaagccagccggcagtgaagagtgacttgaagaactaaatttagcatattgcaaaaatattttgtgcggaattcgatataagtacttttacagcaagatggtatagttatgttgcctggactggtttttacatttttaaaatatttcagctgtcatttttgtactaattataaaattggcacataattcaaaaatatacatttgagatgatttgtcctcccaaattatacaagtttattttatggtataaagtgttctctctggaaatgtttttaaaaaaattcttaggcttctctttgcgaaataaaactattaaaatatttgaaatgcaaaa

SEQ ID NO: 109243 - DNA, 875 bp, Homo sapiens
  Payload ID: 1458
  Gene Symbol: ASUN
  Gene Name: asunder spermatogenesis regulator
  ENST ID: ENST00000544548
  CDS Start-End: 201-875
accggcctgggtggagagacagagaaggggagaccgggaccaggcacgaaagtaagcgaacctcgatcctgaggtcttccctatccactcaccttgtattttccaccccccaccctccagcaaagtgggtctagaaggtttctcaaagagagttttgcatgaaggggagatgcgtcttgaaagcaagaggttaaaacaaaatgaagattttttctgaatctcataaaacagtgtttgttgtggatcactgcccttatatggcagaatcttgcaggcagcatgtcgagtttgatatgctggtgaagaatagaacccaaggaatcattcctttggcccccatatctaaatcattgtggacttgctcagtagaatcttccatggaatattgtagaataatgtatgatatatttcctttcaaaaagctggtgaattttattgtgagtgactctggagcacatgttttaaattcttggactcaagaagaccaaaatttacaggagctaatggcagcattagccgctgttgggcctcctaatcctcgggcagatccagagtgctgcagtattctgcatggccttgttgcagcagtggaaactctctgcaaaattactgaataccaacatgaggctcgtactctactcatggagaatgcagaacgtgttggaaatagaggacgaataatctgtattactaatgcaaaaagtgatagtcatgtgcgaatgcttgaagactgtgtccaggaaacgattcatgaacataacaagcttgctgcaaattcagatcatctcatgcagattcaaaaatgtgagttggtcttgatccacacctacccagttggtgaagacagccttgtatctgatcgttctaaaaaagag

SEQ ID NO: 109244 - DNA, 552 bp, Homo sapiens
  Payload ID: 1458
  Gene Symbol: ASUN
  Gene Name: asunder spermatogenesis regulator
  ENST ID: ENST00000538727
  CDS Start-End: 181-552
aggaagcctgggaaggaccggtgtgctaggagatgatcggggaaagcatagtcccctgtctgtggcaccagacactcccgactgtgcgctgactctccccgcccagccagcagccttttccagagaggctgtggtccatagcctctgttcgttttcactgcaggaccaggcacgaaactaatggcagcattagccgctgttgggcctcctaatcctcgggcagatccagagtgctgcagtattctgcatggccttgttgcagcagtggaaactctctgcaaaattactgaataccaacatgaggctcgtactctactcatggagaatgcagaacgtgttggaaatagaggacgaataatctgtattactaatgcaaaaagtgatagtcatgtgcgaatgcttgaagactgtgtccaggaaacgattcatgaacataacaagcttgctgcaaattcagatcatctcatgcagattcaaaaatgtgagttggtcttgatccacacctacccagttggtgaagacagccttgtatctgatcgttctaaaaaagag

SEQ ID NO: 109245 - DNA, 460 bp, Homo sapiens
  Payload ID: 1458
  Gene Symbol: ASUN
  Gene Name: asunder spermatogenesis regulator
  ENST ID: ENST00000536232
  CDS Start-End: 1-460
ttgctaccaaattgaatattttagtacagcaacattttgacttggcttcaactactattacaaatattccaatgaaggaagaacagcatgctaacacatctgccaattatgatgtggagctacttcatcacaaagatgcacatgtagatttcctgaaaagtgaattacactattgtactggagcttatcggatttcacctgtagatgtaaatagtagaccttcctcctgccttactaattttcttctaaatgaccccagatataaaatcgatggaagtcttgaggtccctttggaacgagcaaaagatcagttagaaaaacatacccgttactggcctatgatcatttcacaaaccaccatttttaacatgcaagcggtagttccattagccagtgttattgtgaaagaatctctgacagaagaagatgtgttaaactgtcaaaaaacaatatacaactt

SEQ ID NO: 109246 - DNA, 8751 bp, Homo sapiens
  Payload ID: 1459
  Gene Symbol: AHCTF1
  Gene Name: AT hook containing transcription factor 1
  Uniprot ID: Q8WYP5
  ENST ID: ENST00000366508
  CDS Start-End: 138-7043
tcgttacataatctcggaccggaggagcggcggcacatggcggcggagcggcgctggtggttcgcgtcctgcgccggcagtcgggtccctttacggacggccggggccgcgaccctttcccactgttctcccacgcgatggactcgttggcgggcctttccccgagggaagcggccggcgtgctgagcctgtcctgtgttggcgtgtgttccacatgcgcttgggcctggccacatggaagtatgcgagacttaagagctcaagtgactagtggtctcctgccatttccagaagtgactcttcaagcccttggagaagacgaaataacattagaatctgtgcttcgtggaaagtttgctgcagggaaaaatggacttgcttgcttggcttgtggtccacaacttgaggtagtaaactctataacaggagagcgattgtctgcttacagattcagtggagtcaatgaacagcctcctgtagttttagctgtgaaagaattctcttggcagaagagaactggattattaataggattggaagaaacagaagggagtgttctctgtctttatgaccttggaatatcaaaagtagttaaagcagttgttcttcctggaagggtaacagctattgaacctataattaatcatggaggagccagtgcaagcactcagcatttacatccaagtctgcgatggctttttggagtggcagctgtggtcactgatgttggacagatccttcttgttgacctatgtttggatgacttgtcatgcaatcaaaatgaagttgaagcatcagatcttgaagttctaactggtatcccagctgaagtaccacacattagagaaagtgtaatgagacaagggcgccatctgtgtttccagttagtaagtccaacaggaacagctgtttcaactcttagttacataagcaggacaaatcagcttgctgtaggtttttctgatggctatctagcactttggaacatgaaaagcatgaaaagagaatattacatacaattggaaagtggacaagttcctgtatatgctgtcacttttcaagaacctgagaatgatcctcggaattgctgttacttgtgggctgttcagtctacacaagatagtgaaggggatgttttgagtttgcatctgctgcagctggcctttggtaatagaaagtgtttggcatcaggacaaatcttatatgaggggttagaatactgtgaagaaagatacaccctggacctgacaggtggcatgttccctttgaggggacagacgagtaataccaaattgttgggatgccagagtatagagaaatttcgatctcatggtgacagggaggaaggcgtgaatgaagctctatcgcctgacactagtgtttcagtctttacctggcaggtgaatatatatggacagggaaagccttctgtatatttggggctttttgatataaatcgttggtatcatgcacaaatgccagattcgttaaggtcaggagaatatctacataattgctcttattttgcactgtggtcattggagtctgttgtaagtaggacttctccacatggcatcttggatatattagtacatgagagaagtttaaatagaggagtccctccttcatatccacctcccgagcagttttttaatccaagcacttataattttgatgccacttgtttgttaaactcgggagttgttcatttaacttgtactggctttcagaaggagactttgacttttttaaagaaatcaggtccatcactcaatgaactcattcctgatggttataatcgatgtcttgtagctggccttctttccccaagatttgttgatgttcagccttccagtttaagccaagaagaacagttagaagctatattgtcagcagcaattcagactagttccctgggacttttgactggttatatccgaagatggataacagaagaacaaccaaattctgccactaatttgcgctttgttcttgaatggacgtggaataaagtggttctcacaaaagaggaatttgacagactatgtgtgccattatttgatggttcgtgtcatttcatggatccacaaactatacagtctatccagcaatgctatttgcttcttagcaatcttaatatagtcttgagctgttttgcatcagaagcccgagagatcactgagagaggactgatagacttaagcaataagtttgtggtttcccacctcatctgtcagtatgcacaagtggttctttggttctctcattctgggcttttaccagaaggcatagatgattctgtgcagttgtcaaggttatgctacaactaccctgtaattcagaactactacaccagtcgtcgacagaagtttgagcgtttatcaagagggaagtggaatcccgattgcttgatgattgatggactggtttctcagttaggagagcgaattgagaagttgtggaaacgagatgaaggaggcacaggaaaatatcctcctgctagtctgcatgcagtacttgatatgtacctattagacggcgttactgaagcagccaaacactctattaccatttatttgctacttgatattatgtattcctttcccaacaaaacagacactcccattgaatctttcccaactgtatttgccatttcttggggccaagttaaacttattcaggggttttggttgatagatcataatgactatgagagtggtttggatcttttgtttcatccagctactgcaaaacctttgtcatggcaacattcaaagattattcaggcattcatgagtcagggcgagcacagacaagccctcagatatattcagacaatgaagccaacagtgtccagtggtaacgatgttatccttcacctcactgttttgctttttaataggtgtatggttgaagcctggaattttttgcggcaacattgcaataggttgaatatagaggagttactgaagcacatgtatgaagtctgtcaggaaatgggcttgatggaagatttactgaagttaccatttacagacactgagcaggaatgtttagtgaaatttttgcagtccagtgccagcgttcagaatcatgaattccttttagtgcaccatttgcagcgtgccaattatgtgcctgccttgaagctgaaccaaactctgaagattaatgttatgaatgatcgtgatcctcgtttgcgggagagatcactggctcgaaattctatattagaccagtatggaaaaatccttcctagagtccatcgaaaattagccattgaacgagctaagccttatcatctgtcaacatcatcagtttttcgattagtttctagacccaaaccattatcagcagttccaaagcaagttgtaacaggaactgtgttgacaagatctgttttcatcaacaatgtgttatctaaaattggagaagtttgggcaagcaaagaacctataaatagcaccacacctttcaatagttctaaaatagaagaaccatctcctatagtgtattcgctcccagctccagagctgcctgaggcattttttggaacaccaatttcaaaagcatcacaaaaaatttctagactgctagatttggttgttcagcctgtcccccggccttctcagtgttcggagtttattcagcaaagctccatgaaatctcctttgtacctagtatcccgttcactgccctcaagttcgcaattaaaaggatcgcctcaggccatctccagggcttcagaattacatttgcttgaaactcctcttgtagttaagaaagctaaaagtttggccatgtcagttactacttctggattttctgagttcactcctcagtccatcctgaggtctactcttcgatcaacacctttagcatctccctctccatcacctggaaggtctcctcaacgacttaaagaaactagaatttcatttgtggaagaagatgtccacccaaaatggattcctggggctgcagatgatagcaaattagaagtatttactacacctaaaaaatgtgcagttccagtggaaactgaatggctgaagagcaaagataggaccacatcttttttcctgaacagccctgaaaaggagcatcaagaaatggatgaggggtcacaaagtttagagaaactggatgtgagcaaaggaaacagcagtgtttcaatcacatccgatgagactaccttagagtatcaggatgcaccgtcaccggaagaccttgaagagactgttttcacggcctctaagcccaaaagctcttccactgcactaactactaatgtaactgaacaaactgaaaaggatggagataaagatgtatttgcatcagaagtaactccttcagacctacagaaacaaatgggcaatttagaagatgcagaaacaaaggatctcttagttgcagcagaggcattttcagaattgaatcacttaagcccggttcaaggaactgaagcttctctttgtgcaccatcagtctatgaagggaaaatcttcacccagaagtccaaggtaccagtgttggacgaaggattaacatctgttgaaacctacacccctgcaattagagcaaatgacaataaatctatggctgatgtccttggtgatggtggaaactcctcgctcactatctctgaaggtcctattgtctctgagcgcaggcttaaccaggaagtagcgctgaacttaaaagaagatcatgaagtagaagttggtgtactaaaagaaagtgttgacttaccagaagaaaagcttccaatttctgacagccctcctgatactcaagaaattcatgtgattgaacaagaaaagcttgaagctcaagattcaggagaagaggctaggaatctttcatttaatgagttatatccctctggaacacttaagcttcagtacaattttgatactattgaccaacagttttgtgacttagctgataacaaagacactgctgaatgtgacattgctgaagtagatggggaactttttgtggctcaaagcaactttaccttgatattggaaggtgaagaaggagaagttgagccaggtgattttgcatcatctgatgtgttacctaaagcagctaacacagcaactgaagaaaaacttgtatgcagtggggaaaatgataatcatggacaaattgcaaatttgccatctgccgtaactagtgaccaaaagtcccaaaaagtagacactttaccatatgtgcctgaacctattaaagtagcaattgcagaaaatttactagatgtaattaaagacacaagaagtaaagaaattacttcagatacaatggaacagtccattcatgaaacaatacctttagtgagccaaaacataatgtgtcccactaaattggtcaaatctgcatttaagactgctcaggaaacaagcacaatgactatgaatgtcagccaggttgatgacgtggtttcctccaaaactcgtacgagaggtcaacgtatccaaaacgtgaatgtcaaatcagcacaacaggaagcatcagcagatgttgctactcctaagatgccagggcagtcagtcaggaagaaaactaggaaggcaaaagaaatttctgaagcttctgaaaacatctattctgatgtcagaggactatctcagaaccagcaaatacctcaaaattctgttacgcctaggagaggaaggagaaagaaagaagttaatcaggacatactagaaaacaccagttctgtggaacaagaattacagatcactacaggtagggaatcaaaaagattaaaatcatctcagctgttggaaccagcagttgaagaaactactaaaaaagaagttaaggtttcatctgttacaaaaaggactcctagaagaattaaaagatctgtagaaaatcaggaaagtgttgaaattataaatgatctaaaagttagtacggtaacaagtcctagcagaatgatcagaaaattgagaagtactaatttagatgcttctgaaaatacaggaaataagcaagatgataaatccagtgacaagcagctgcgtattaaacatgttagaagggtcagagggagagaagttagtccatcagatgtgagagaagactccaaccttgagtcatctcagttgactgttcaagcagaatttgatatgtctgccatacctagaaaacgtggtagaccaagaaaaatcaatccatctgaagatgtaggatctaaggctgttaaggaagagagaagccccaagaagaaagaagctcccagcattagaaggagatctacaagaaataccccagctaaaagtgaaaatgttgatgttggaaaaccagctttaggaaaatccattttagtgccaaacgaggaactttcgatggtgatgagctctaagaaaaaacttacaaaaaagactgaaagtcaaagccaaaaacgttcattgcactcagtatcagaagaacgcacagatgaaatgacacataaagaaacaaatgagcaggaagaaagattgctcgccacagcttccttcactaaatcatcccgcagcagcaggactcggtctagcaaggccatcttgttgccggacctttctgaaccaaacaatgagcctttattttctccagcgtcagaagttccaaggaaagcaaaagctaaaaaaatagaggttcctgcacagctgaaagaattagtttcggatttatcttctcagtttgtcatctcacctcctgctttaaggagcagacaaaaaaacacatccaataagaacaagcttgaagatgaactgaaagatgatgcacaatcagtagaaactctgggaaagccaaaagcgaaacgaatcaggacgtcaaaaacaaaacaagcaagcaaaaacacagaaaaagaaagtgcttggtcacctcctcccatagaaattcggctgatttcccccttggctagcccagctgacggagtcaagagcaaaccaagaaaaactacagaagtgacaggaacaggtcttggaaggaacagaaagaaactgtcttcctatccaaagcaaattttacgcagaaaaatgctgtaatttcttgggaagattttaatgtacacctatttgtaaagtcatcagaatagtgtggattattaaatatctagtttggaagaaaataatttatataaattattgtaaatttttatgtaaacagaaggtcttcaataagtaaagtaactccatatggagtgattgtttcagtccaggcaatttttctattttatattaagacttcatacatttatatatgtaaatatggcttattaatggaatgttaaataaaatgtatacttcacagtcgtttgtgtcttggatttttgaaagggaggggatatctgtttaaatagttttatatgctcattggtctcattttctctataattaaaatactagaccagtcttaaaatggggatgattgaagtattgatatttctttttacagttactattttataatttatgcactttgattctgtgattcagatttctaatcagaaaatgtatttttttgtttttggctgttactatgttaaaattgaattatgggcatgtcattttgccatctttgtagtttcacaaattttgtgtaatctacctcaaatgaataatccaagtattggttaactataatgttggcatctcttattcggcaagcttaaaggctctttaaagtcttaattagtcaaagactaatccaggttagattgaccggttcactgctcacttgcaaccttatcaaagggtttgacaaagggaaatgtaaaataaatctgtttatggatattgagtgcatcttgtatgtgcctaatattgataggatgagatgtctgaacaaatttttataatattgctgtgaaggagcttgctattgaaccacagaaatcccttaatattcaggttttaaaactggcaaattctcacaggacctcaggcacagattattgaggttgggagagagtgagtagatgtagaaaaggagaaaaacaacacacgccctgttctctacagtacaactgtgtgcaattaagcaatggtacttgatgtaggctctaacactcatcaataaataagtgttgtaaaataatttataacaggtaatcgatagtgtgtaatgaatggactattaataattgattatctagaaacgaactgctttcgtgggcttttaatattttaatgtgaagcatatgcagtgtgctttctgcatttatttttctaccaaataatacagataatgagaaattggtgaaaatgcctacgcaaagtgttgacagtgtgaaagcagtgcgagtgcggccttttagtcaggttagtgatggatgttacgctgccttgttgaaaatttcactgactttgattttattacttttttaatgatagttatcaaacttgtatttaagctgcttgtcatttatggaatattgaacttatttaaatgaacttgttaaatgaataaagagctaaacataattcagtaaacaattcctttgcgcaagtagcacaataaacatggatgcaacgtatgtcaagttaatacttttttaaaccaacgcaatttggtgaatatagatgtgtggtacctgtttttaataagtgtactttttttcccccctccgtgaatgtagatcataagcaaacaaattgcctgttctaaatgaactttacatatattttaaatgaatgtatgtacttacgtataaatgtctttatatagcttgaataaaaacactgctcattaaaa

SEQ ID NO: 109247 - DNA, 8633 bp, Homo sapiens
  Payload ID: 1459
  Gene Symbol: AHCTF1
  Gene Name: AT hook containing transcription factor 1
  Uniprot ID: Q8WYP5
  ENST ID: ENST00000326225
  CDS Start-End: 98-6925
tggggctcgagggggcgagcggtggcggtggcgggtacggcaggctcgcgggcgccgggcttcgttacataatctcggaccggaggagcggcggcacatggcggcggagcggcgctgtggaagtatgcgagacttaagagctcaagtgactagtggtctcctgccatttccagaagtgactcttcaagcccttggagaagacgaaataacattagaatctgtgcttcgtggaaagtttgctgcagggaaaaatggacttgcttgcttggcttgtggtccacaacttgaggtagtaaactctataacaggagagcgattgtctgcttacagattcagtggagtcaatgaacagcctcctgtagttttagctgtgaaagaattctcttggcagaagagaactggattattaataggattggaagaaacagaagggagtgttctctgtctttatgaccttggaatatcaaaagtagttaaagcagttgttcttcctggaagggtaacagctattgaacctataattaatcatggaggagccagtgcaagcactcagcatttacatccaagtctgcgatggctttttggagtggcagctgtggtcactgatgttggacagatccttcttgttgacctatgtttggatgacttgtcatgcaatcaaaatgaagttgaagcatcagatcttgaagttctaactggtatcccagctgaagtaccacacattagagaaagtgtaatgagacaagggcgccatctgtgtttccagttagtaagtccaacaggaacagctgtttcaactcttagttacataagcaggacaaatcagcttgctgtaggtttttctgatggctatctagcactttggaacatgaaaagcatgaaaagagaatattacatacaattggaaagtggacaagttcctgtatatgctgtcacttttcaagaacctgagaatgatcctcggaattgctgttacttgtgggctgttcagtctacacaagatagtgaaggggatgttttgagtttgcatctgctgcagctggcctttggtaatagaaagtgtttggcatcaggacaaatcttatatgaggggttagaatactgtgaagaaagatacaccctggacctgacaggtggcatgttccctttgaggggacagacgagtaataccaaattgttgggatgccagagtatagagaaatttcgatctcatggtgacagggaggaaggcgtgaatgaagctctatcgcctgacactagtgtttcagtctttacctggcaggtgaatatatatggacagggaaagccttctgtatatttggggctttttgatataaatcgttggtatcatgcacaaatgccagattcgttaaggtcaggagaatatctacataattgctcttattttgcactgtggtcattggagtctgttgtaagtaggacttctccacatggcatcttggatatattagtacatgagagaagtttaaatagaggagtccctccttcatatccacctcccgagcagttttttaatccaagcacttataattttgatgccacttgtttgttaaactcgggagttgttcatttaacttgtactggctttcagaaggagactttgacttttttaaagaaatcaggtccatcactcaatgaactcattcctgatggttataatcgatgtcttgtagctggccttctttccccaagatttgttgatgttcagccttccagtttaagccaagaagaacagttagaagctatattgtcagcagcaattcagactagttccctgggacttttgactggttatatccgaagatggataacagaagaacaaccaaattctgccactaatttgcgctttgttcttgaatggacgtggaataaagtggttctcacaaaagaggaatttgacagactatgtgtgccattatttgatggttcgtgtcatttcatggatccacaaactatacagtctatccagcaatgctatttgcttcttagcaatcttaatatagtcttgagctgttttgcatcagaagcccgagagatcactgagagaggactgatagacttaagcaataagtttgtggtttcccacctcatctgtcagtatgcacaagtggttctttggttctctcattctgggcttttaccagaaggcatagatgattctgtgcagttgtcaaggttatgctacaactaccctgtaattcagaactactacaccagtcgtcgacagaagtttgagcgtttatcaagagggaagtggaatcccgattgcttgatgattgatggactggtttctcagttaggagagcgaattgagaagttgtggaaacgagatgaaggaggcacaggaaaatatcctcctgctagtctgcatgcagtacttgatatgtacctattagacggcgttactgaagcagccaaacactctattaccatttatttgctacttgatattatgtattcctttcccaacaaaacagacactcccattgaatctttcccaactgtatttgccatttcttggggccaagttaaacttattcaggggttttggttgatagatcataatgactatgagagtggtttggatcttttgtttcatccagctactgcaaaacctttgtcatggcaacattcaaagattattcaggcattcatgagtcagggcgagcacagacaagccctcagatatattcagacaatgaagccaacagtgtccagtggtaacgatgttatccttcacctcactgttttgctttttaataggtgtatggttgaagcctggaattttttgcggcaacattgcaataggttgaatatagaggagttactgaagcacatgtatgaagtctgtcaggaaatgggcttgatggaagatttactgaagttaccatttacagacactgagcaggaatgtttagtgaaatttttgcagtccagtgccagcgttcagaatcatgaattccttttagtgcaccatttgcagcgtgccaattatgtgcctgccttgaagctgaaccaaactctgaagattaatgttatgaatgatcgtgatcctcgtttgcgggagagatcactggctcgaaattctatattagaccagtatggaaaaatccttcctagagtccatcgaaaattagccattgaacgagctaagccttatcatctgtcaacatcatcagtttttcgattagtttctagacccaaaccattatcagcagttccaaagcaagttgtaacaggaactgtgttgacaagatctgttttcatcaacaatgtgttatctaaaattggagaagtttgggcaagcaaagaacctataaatagcaccacacctttcaatagttctaaaatagaagaaccatctcctatagtgtattcgctcccagctccagagctgcctgaggcattttttggaacaccaatttcaaaagcatcacaaaaaatttctagactgctagatttggttgttcagcctgtcccccggccttctcagtgttcggagtttattcagcaaagctccatgaaatctcctttgtacctagtatcccgttcactgccctcaagttcgcaattaaaaggatcgcctcaggccatctccagggcttcagaattacatttgcttgaaactcctcttgtagttaagaaagctaaaagtttggccatgtcagttactacttctggattttctgagttcactcctcagtccatcctgaggtctactcttcgatcaacacctttagcatctccctctccatcacctggaaggtctcctcaacgacttaaagaaactagaatttcatttgtggaagaagatgtccacccaaaatggattcctggggctgcagatgatagcaaattagaagtatttactacacctaaaaaatgtgcagttccagtggaaactgaatggctgaagagcaaagataggaccacatcttttttcctgaacagccctgaaaaggagcatcaagaaatggatgaggggtcacaaagtttagagaaactggatgtgagcaaaggaaacagcagtgtttcaatcacatccgatgagactaccttagagtatcaggatgcaccgtcaccggaagaccttgaagagactgttttcacggcctctaagcccaaaagctcttccactgcactaactactaatgtaactgaacaaactgaaaaggatggagataaagatgtatttgcatcagaagtaactccttcagacctacagaaacaaatgggcaatttagaagatgcagaaacaaaggatctcttagttgcagcagaggcattttcagaattgaatcacttaagcccggttcaaggaactgaagcttctctttgtgcaccatcagtctatgaagggaaaatcttcacccagaagtccaaggtaccagtgttggacgaaggattaacatctgttgaaacctacacccctgcaattagagcaaatgacaataaatctatggctgatgtccttggtgatggtggaaactcctcgctcactatctctgaaggtcctattgtctctgagcgcaggcttaaccaggaagtagcgctgaacttaaaagaagatcatgaagtagaagttggtgtactaaaagaaagtgttgacttaccagaagaaaagcttccaatttctgacagccctcctgatactcaagaaattcatgtgattgaacaagaaaagcttgaagctcaagattcaggagaagaggctaggaatctttcatttaatgagttatatccctctggaacacttaagcttcagtacaattttgatactattgaccaacagttttgtgacttagctgataacaaagacactgctgaatgtgacattgctgaagtagatggggaactttttgtggctcaaagcaactttaccttgatattggaaggtgaagaaggagaagttgagccaggtgattttgcatcatctgatgtgttacctaaagcagctaacacagcaactgaagaaaaacttgtatgcagtggggaaaatgataatcatggacaaattgcaaatttgccatctgccgtaactagtgaccaaaagtcccaaaaagtagacactttaccatatgtgcctgaacctattaaagtagcaattgcagaaaatttactagatgtaattaaagacacaagaagtaaagaaattacttcagatacaatggaacagtccattcatgaaacaatacctttagtgagccaaaacataatgtgtcccactaaattggtcaaatctgcatttaagactgctcaggaaacaagcacaatgactatgaatgtcagccaggttgatgacgtggtttcctccaaaactcgtacgagaggtcaacgtatccaaaacgtgaatgtcaaatcagcacaacaggaagcatcagcagatgttgctactcctaagatgccagggcagtcagtcaggaagaaaactaggaaggcaaaagaaatttctgaagcttctgaaaacatctattctgatgtcagaggactatctcagaaccagcaaatacctcaaaattctgttacgcctaggagaggaaggagaaagaaagaagttaatcaggacatactagaaaacaccagttctgtggaacaagaattacagatcactacaggtagggaatcaaaaagattaaaatcatctcagctgttggaaccagcagttgaagaaactactaaaaaagaagttaaggtttcatctgttacaaaaaggactcctagaagaattaaaagatctgtagaaaatcaggaaagtgttgaaattataaatgatctaaaagttagtacggtaacaagtcctagcagaatgatcagaaaattgagaagtactaatttagatgcttctgaaaatacaggaaataagcaagatgataaatccagtgacaagcagctgcgtattaaacatgttagaagggtcagagggagagaagttagtccatcagatgtgagagaagactccaaccttgagtcatctcagttgactgttcaagcagaatttgatatgtctgccatacctagaaaacgtggtagaccaagaaaaatcaatccatctgaagatgtaggatctaaggctgttaaggaagagagaagccccaagaagaaagaagctcccagcattagaaggagatctacaagaaataccccagctaaaagtgaaaatgttgatgttggaaaaccagctttaggaaaatccattttagtgccaaacgaggaactttcgatggtgatgagctctaagaaaaaacttacaaaaaagactgaaagtcaaagccaaaaacgttcattgcactcagtatcagaagaacgcacagatgaaatgacacataaagaaacaaatgagcaggaagaaagattgctcgccacagcttccttcactaaatcatcccgcagcagcaggactcggtctagcaaggccatcttgttgccggacctttctgaaccaaacaatgagcctttattttctccagcgtcagaagttccaaggaaagcaaaagctaaaaaaatagaggttcctgcacagctgaaagaattagtttcggatttatcttctcagtttgtcatctcacctcctgctttaaggagcagacaaaaaaacacatccaataagaacaagcttgaagatgaactgaaagatgatgcacaatcagtagaaactctgggaaagccaaaagcgaaacgaatcaggacgtcaaaaacaaaacaagcaagcaaaaacacagaaaaagaaagtgcttggtcacctcctcccatagaaattcggctgatttcccccttggctagcccagctgacggagtcaagagcaaaccaagaaaaactacagaagtgacaggaacaggtcttggaaggaacagaaagaaactgtcttcctatccaaagcaaattttacgcagaaaaatgctgtaatttcttgggaagattttaatgtacacctatttgtaaagtcatcagaatagtgtggattattaaatatctagtttggaagaaaataatttatataaattattgtaaatttttatgtaaacagaaggtcttcaataagtaaagtaactccatatggagtgattgtttcagtccaggcaatttttctattttatattaagacttcatacatttatatatgtaaatatggcttattaatggaatgttaaataaaatgtatacttcacagtcgtttgtgtcttggatttttgaaagggaggggatatctgtttaaatagttttatatgctcattggtctcattttctctataattaaaatactagaccagtcttaaaatggggatgattgaagtattgatatttctttttacagttactattttataatttatgcactttgattctgtgattcagatttctaatcagaaaatgtatttttttgtttttggctgttactatgttaaaattgaattatgggcatgtcattttgccatctttgtagtttcacaaattttgtgtaatctacctcaaatgaataatccaagtattggttaactataatgttggcatctcttattcggcaagcttaaaggctctttaaagtcttaattagtcaaagactaatccaggttagattgaccggttcactgctcacttgcaaccttatcaaagggtttgacaaagggaaatgtaaaataaatctgtttatggatattgagtgcatcttgtatgtgcctaatattgataggatgagatgtctgaacaaatttttataatattgctgtgaaggagcttgctattgaaccacagaaatcccttaatattcaggttttaaaactggcaaattctcacaggacctcaggcacagattattgaggttgggagagagtgagtagatgtagaaaaggagaaaaacaacacacgccctgttctctacagtacaactgtgtgcaattaagcaatggtacttgatgtaggctctaacactcatcaataaataagtgttgtaaaataatttataacaggtaatcgatagtgtgtaatgaatggactattaataattgattatctagaaacgaactgctttcgtgggcttttaatattttaatgtgaagcatatgcagtgtgctttctgcatttatttttctaccaaataatacagataatgagaaattggtgaaaatgcctacgcaaagtgttgacagtgtgaaagcagtgcgagtgcggccttttagtcaggttagtgatggatgttacgctgccttgttgaaaatttcactgactttgattttattacttttttaatgatagttatcaaacttgtatttaagctgcttgtcatttatggaatattgaacttatttaaatgaacttgttaaatgaataaagagctaaacataattcagtaaacaattcctttgcgcaagtagcacaataaacatggatgcaacgtatgtcaagttaatacttttttaaaccaacgcaatttggtgaatatagatgtgtggtacctgtttttaataagtgtactttttttcccccctccgtgaatgtagatcataagcaaacaaattgcctgttctaaatgaactttacatatattttaaatgaatgtatgtacttacgtataaatgtctttatatagcttgaataaaaacactgctcattaaaa

SEQ ID NO: 109248 - DNA, 611 bp, Homo sapiens
  Payload ID: 1459
  Gene Symbol: AHCTF1
  Gene Name: AT hook containing transcription factor 1
  ENST ID: ENST00000478568
  CDS Start-End: 409-611
gctccctcccttccggggcgtgtggaactcggttttgtcggcgcagggtaatgcgcagagcggggccggcgctgtccgaggcgagcaggcagcgttgcaaggggaaggacccagaagcgcggcgggagcagcgactgcgttttagccgctgagcggtctgcaggcctacagcccgcgaaggcactctcgggggcgtgtggctctgaggtggccggggaggtcgcaggcggcggccggagcgcagaggagcggcttcagccgggcggaggggtgtgagcccggcccgtggcggccacgtctcccgggagatgctgtgacggacccgcacgggaggagctcgcgcctggcctggcgacccggtggactcggcccgcggcggcgcgctcacccgccccgttcagtggaagtatgcgagacttaagagctcaagtgactagtggtctcctgccatttccagaagtgactcttcaagcccttggagaagacgaaataacattagaatctgtgcttcgtggaaagtttgctgcagggaaaaatggacttgcttgcttggcttgtggtccacaacttgaggtagtaaactctataacaggagagcgattgtctgctta

SEQ ID NO: 109249 - DNA, 355 bp, Homo sapiens
  Payload ID: 1459
  Gene Symbol: AHCTF1
  Gene Name: AT hook containing transcription factor 1
  ENST ID: ENST00000498601
  CDS Start-End: 1-243
gaaagtcaaagccaaaaacgttcattgcactcagtatcagaagaacgcacagatgaaatgacacataaagaaacaaatgagcaggaagaaagattgctcgccacagcttccttcactaaatcatcccgcagcagcaggactcggtctagcaaggccatcttgttgccggacctttctgaaccaaacaatgagcctttattttctccagcgtcagaagttccaaggaaagcaaaagaaagatgatgcacaatcagtagaaactctgggaaagccaaaagcgaaacgaatcaggacgtcaaaaacaaaacaagcaagcaaaaacacagaaaaagaaagtgcttggtcacctcctccc

SEQ ID NO: 109250 - DNA, 6334 bp, Homo sapiens
  Payload ID: 1460
  Gene Symbol: AHDC1
  Gene Name: AT hook, DNA binding motif, containing 1
  Uniprot ID: Q5TGY3
  ENST ID: ENST00000247087
  CDS Start-End: 598-5409
ccagcggagttagcggcggagaatgtgagccgaggcgcgagccatgctgtcagcgacggcgggcggctcagggctcctccacgactcctctcctcagcagccgggcgcccgcgtcgctgccaccgccggaagacagacgtcccccaaaacccctcgcctggctcggacccacggagccggcagcccagcactccgatgggagcttgcctgattgtcaacccatcggcctggaccccagagcccacccagttgagcgtgtgcagagggccccgagtgcggggcgacgctcaggccgttgcagagaccaccctggagatgctgatgaagacaggcctttcctgctgagcccagcctatcttcgcagcctgctcaggcgctgtccacgccccgaggcctgggctcaggccgaagttgctccacagcacccccagctgacagccagcgactggcagagcccccaggcacgggggccctctctcttccagagatctccagtgtgacagcccaggcggcagagccgagggtcctggtcccggcttctcgcaccctcatgtcagccccggccccgcccggcggcctgcggaggacaaggtcaggatgcgtgtgaagccccagggcctggtggtgacttccagtgccgtgtgcagctctcctgactacctccgggaacccaagtactaccccggcggcccccccaccccccggcccctgcttcccacccggccccctgccagcccacctgacaaggccttctccacccacgccttctccgagaacccacgcccacccccacgccgggaccccagcacccggcgcccaccagtccttgccaagggggacgacccgctgcccccacgggcagcccgtcctgtctcacaggcccgctgccccacaccggtcggagacggcagcagctcccgacgctgctgggacaacgggcgggtgaacctgcgaccagtggtgcagctgattgacatcatgaaggacctgacacgcctctcccaggacctgcagcacagtggtgtacacctggactgtggtgggctccgactgagccgcccgcctgcaccgccacccggcgacctacagtacagcttcttctcctcacccagtttggccaacagcatccgtagccctgaggagcgggccaccccacacgccaagtcggagcggcccagccatcccctctacgagcctgagcctgagcctagggacagtccccagcctggccaaggccatagtcccggagccacggctgcggccacgggtctgcccccagagcctgagccagacagcactgattactcagaacttgctgacgccgacatccttagtgagctggcctccctcacttgcccagaggcccagctgctagaggcccaggccctcgagccaccatcgcccgagccggagcctcagctcctggacccccagccccgcttcctggacccgcaggcactagagccgctcggggaagctctggagctgccacccctgcaacctcttgctgatcctctggggctgccgggcctggctctccaggccctggacaccctgcctgactccttggagtcgcagctgcttgacccccaggcactcgaccccctgcccaagctgcttgacgtcccaggtcgccgtctggagccccagcagcccctggggcactgcccactggccgagcccttgcgcctggacttgtgctcaccgcacggcccccccgggcctgagggtcaccccaagtacgccttgcggcgcactgataggccaaagatcctgtgtcgccggcggaaagccggacggggacgcaaggcagacgccggacccgagggccgcctactgcccctgcctatgcccacggggctggtggctgccctggccgaacccccaccaccaccgcctcctccaccccctgccctgccaggcccaggcccggtctcagtcccagagttgaagccggaatcttcccagaccccagtggtctctacccgcaaaggcaagtgccggggcgtgcggcgcatggtggtgaagatggccaagatccccgtatcgctggggcggcggaacaagaccacatacaaagtgtcttccttgagcagcagcctgagcgtggagggcaaggagctgggcctgcgcgtgtcggctgagcccaccccgctgctgaagatgaagaacaatgggcggaacgtggtagtggtcttcccacccggtgagatgcccattattctcaaacgtaagcgcggccgccctcctaagaacctgctgctgggtcccggcaagcccaaggagccagctgtggtggcggccgaggcagccactgtggcagcggccaccatggccatgccagaggtaaaaaaacgacggcggcggaagcagaagctggcatctccccagccatcctatgcagcagacgccaacgacagcaaggccgagtactcagacgtcctggccaagctggccttcctgaaccgccagagccagtgcgctggacggtgctcaccgccccgctgctggacacccagtgagccggagtcggtgcaccaggcccccgacacccagagcatctcccacttcctgcatcgtgtgcagggcttccggcggcgtgggggcaaagcaggcggttttggtggccggggtgggggccatgcggccaagtcagcccgatgctccttcagtgacttctttgagggcatcggcaagaaaaagaaggtggtggccgtggcagccgctggggtcgggggcccgggccttactgagttggggcacccacgcaaacggggccggggggaggtagacgctgtgactgggaagccaaagcgcaagagacggtcccggaagaatgggactctgttcccagagcaggtgcccagtggcccaggctttggggaggcaggtgctgagtgggccggggataagggtggtggctgggcccctcaccatgggcacccaggcggacaagctggccgaaactgtgggtttcaggggaccgaggcccgggcctttgcctccactgggctggagagtggagcctcaggccgtggcagctactacagcacgggtgcaccctcaggccagaccgagctcagccaggagcgccaaaacctcttcaccggctactttcgctcgctgctcgattcggatgactcctccgatctcttggactttgccctctcagcctctcgcccagagtcccggaaggcatcgggcacctatgcagggccacccaccagtgccctgcctgcccagcggggcctggccaccttccctagccggggagccaaggccagcccagtggcagtgggtagcagcggggctggggcggacccctcctttcagcctgtcctgtccgcgcgccagaccttcccaccaggacgagcagcaagctatgggctaactccagccgcttcagactgccgggcagccgagaccttccccaagctggtgcccccgccctcagccatggcccgctcacctaccacccacccgcctgccaacacctacctgccccagtacggcggctatggggccggacaaagcgtattcgccccaactaagccctttacaggccaggactgcgctaacagcaaggactgcagcttcgcctatggcagtggcaacagcctccctgcctcacccagcagcgcccacagcgccggctatgccccaccgcctaccgggggcccctgcctgccaccaagcaaggcctccttcttcagcagctctgagggggcccccttctctggttcagcccccacgcccctgcgctgtgacagccgggccagcacagtctcgcccggtggctacatggtacccaagggcaccacagcctctgccacctctgcagcctctgccgcctcctcctcctcctcctccttccagccctcgcccgagaactgtcggcagtttgcgggggcttctcagtggcctttccggcagggctatggaggcctggactgggcctcagaggcctttagtcagctctacaatcccagttttgactgccacgtcagcgagcccaacgtgatcctggacatctccaactacacaccgcagaaggtgaagcagcagacggctgtgtcggagaccttctctgagtcatcctccgacagcacccagttcaatcagccggttggtggcggggggtttcggcgtgccaacagcgaggcctcaagtagtgagggccagtcgagcctgtccagcctggagaaactgatgatggactggaacgaggcatcatctgcccccggctacaactggaaccagagtgtcctctttcagagtagctccaagccgggccgtggacggcggaagaaggtggacctgttcgaggcctcacatctgggcttcccgacatccgcctctgccgctgcctcaggctacccatccaaacggagcactgggccccggcagccgcgaggtggacggggcggtggggcctgctcagccaagaaggagcggggtggcgcagcggccaaagccaagttcatccccaagccacagccagtcaacccactgttccaggacagtcctgacctcggcctggactactatagcggggacagcagcatgtcaccactgccctcacagtcgagggccttcggcgtgggagagcgagacccctgtgacttcataggaccctactccatgaacccgtccacgccttccgatggcacctttggccaaggcttccactgcgactcgcccagcctgggtgctcccgagcttgatggcaagcatttcccaccgctggcccacccacccacggtgtttgacgccggcctgcagaaggcatactcgcccacctgctcgcctacactgggcttcaaggaagagctgcggccaccgcccacaaagctggctgcctgcgagcccctcaagcatggactccagggggccagcctgggccacgcagctgcagcccaggcccacctgagctgccgggacctgccgctgggccagccccactacgattcccccagctgcaagggcacagcctattggtaccctccaggctcagctgcccgcagcccgccctatgaaggcaaggtgggtacagggctgctggctgacttcctgggcaggacggaggccgcgtgcctcagtgcccctcacctggctagcccaccagccacgcccaaggccgacaaggagccactggaaatggcccggccccctggcccaccccgtggccctgctgcagccgctgctggctatggctgcccactccttagtgacttgaccctgtcccccgtgccgagggactcgctgctgcccctgcaggacaccgcctacaggtacccaggctttatgccccaggcgcatcctggcctgggtgggggccccaagagcggcttcctggggcccatggcggaacctcaccccgaggacacattcaccgtcacatccctgtagtgccaactgaagtgccgactggaccgcgaggttttgttcctggctttcagaaaaccaacgccaagatccctcccagcgtccacatcgtcctctggcaggagctcctgcccctctgcctcccaccctgccccctacaccccctgcagacccatctccctccaccccctcccacccatctcctccacgcagaagccgaaggtgagccctttctgcacaaaaccagcaattgtaaatactttttaaaaatgtacaaaacttaaaaacaaaacacagttttagaaaaagacaaaaaaaaaaaagagagagagagagcgagagagcgagcgtgtgcaagaggttgcgagcggggccccgaggtgtccagagcccctgcaagtatgcactgagaaatttatctacaggtcgtttgacaaaaatgaacaatatcctatttattgtatatactgttttattataaatcgtggattgtatattgcattctgtaaacctgctgtggtcccgtggtgtgcaaattcgcatggtgggggggagggagaagaacctcttgcgggagctttttttttctttcttatttttcactcttttgggttttctcttctgttgttgttgttgttgttttctgttggcaggacacacccaaagatccaagtttgtattaaaaagaaatgaaaaaaagcaaaaaaaaaacaaaaaaaaaacaaaaaaaaaaaaccaaccttgtgtcttgtgaaagggggagtgagggtggagggaatggaagggacaccgctgggttttgtcaccagctactggttctccagaggagttgaaatacctacacgtgttcctggccactgagttttcccttctgcctgagatctgggttccccctcatttcactccaggccctgcgtctcccctgcctctgagctccccactctgctgc

SEQ ID NO: 109251 - DNA, 6438 bp, Homo sapiens
  Payload ID: 1460
  Gene Symbol: AHDC1
  Gene Name: AT hook, DNA binding motif, containing 1
  Uniprot ID: Q5TGY3
  ENST ID: ENST00000374011
  CDS Start-End: 970-5781
tgatcgaggtgggggggcgccgcgggagcggggggccgtgtccagcggagttagcggcggagaatgtgagccgaggcgcgagccatgctgtcagcgacggcgggcggctcagggctcctccacgactcctctcctcagcagccgggcgcccgcgtcgctgccaccgccggaagacagacgtcccccaaaacccctcgcctggctcggacccacggagccggcagcccagcactccgatgggagcttgcctgattgtcaacccatcggcctggaccccagagcccacccagttgagcgtgtgcagagggccccgagtgcggggcgacgctcaggccgttgcagagaccaccctggagatgctgatgaagacaggcctttcctgctgagcccagcctatcttcgcagcctgctcagaaaggggaactgaggctcatggatatacagtgagtcctacctcctagcctgaggactcttccctgcgccttgatgacctgagagaactgggaggagaaaggggttgtgacaatgaccaggactcagggcagaggtggaaaccagagtgcctgatgtgtgcagctgctgacccccccaggacacctctctaccggagtctgtggaagcagagaactgggaggccaaggattggtatgaagaattaaatgaaacgatgcctggacagcttccagcccagtacctggcgcgcagtaggtgctcactaaacctgagctgcgatggtcctttccaggcgctgtccacgccccgaggcctgggctcaggccgaagttgctccacagcacccccagctgacagccagcgactggcagagcccccaggcacgggggccctctctcttccagagatctccagtgtgacagcccaggcggcagagccgagggtcctggtcccggcttctcgcaccctcatgtcagccccggccccgcccggcggcctgcggaggacaaggtcaggatgcgtgtgaagccccagggcctggtggtgacttccagtgccgtgtgcagctctcctgactacctccgggaacccaagtactaccccggcggcccccccaccccccggcccctgcttcccacccggccccctgccagcccacctgacaaggccttctccacccacgccttctccgagaacccacgcccacccccacgccgggaccccagcacccggcgcccaccagtccttgccaagggggacgacccgctgcccccacgggcagcccgtcctgtctcacaggcccgctgccccacaccggtcggagacggcagcagctcccgacgctgctgggacaacgggcgggtgaacctgcgaccagtggtgcagctgattgacatcatgaaggacctgacacgcctctcccaggacctgcagcacagtggtgtacacctggactgtggtgggctccgactgagccgcccgcctgcaccgccacccggcgacctacagtacagcttcttctcctcacccagtttggccaacagcatccgtagccctgaggagcgggccaccccacacgccaagtcggagcggcccagccatcccctctacgagcctgagcctgagcctagggacagtccccagcctggccaaggccatagtcccggagccacggctgcggccacgggtctgcccccagagcctgagccagacagcactgattactcagaacttgctgacgccgacatccttagtgagctggcctccctcacttgcccagaggcccagctgctagaggcccaggccctcgagccaccatcgcccgagccggagcctcagctcctggacccccagccccgcttcctggacccgcaggcactagagccgctcggggaagctctggagctgccacccctgcaacctcttgctgatcctctggggctgccgggcctggctctccaggccctggacaccctgcctgactccttggagtcgcagctgcttgacccccaggcactcgaccccctgcccaagctgcttgacgtcccaggtcgccgtctggagccccagcagcccctggggcactgcccactggccgagcccttgcgcctggacttgtgctcaccgcacggcccccccgggcctgagggtcaccccaagtacgccttgcggcgcactgataggccaaagatcctgtgtcgccggcggaaagccggacggggacgcaaggcagacgccggacccgagggccgcctactgcccctgcctatgcccacggggctggtggctgccctggccgaacccccaccaccaccgcctcctccaccccctgccctgccaggcccaggcccggtctcagtcccagagttgaagccggaatcttcccagaccccagtggtctctacccgcaaaggcaagtgccggggcgtgcggcgcatggtggtgaagatggccaagatccccgtatcgctggggcggcggaacaagaccacatacaaagtgtcttccttgagcagcagcctgagcgtggagggcaaggagctgggcctgcgcgtgtcggctgagcccaccccgctgctgaagatgaagaacaatgggcggaacgtggtagtggtcttcccacccggtgagatgcccattattctcaaacgtaagcgcggccgccctcctaagaacctgctgctgggtcccggcaagcccaaggagccagctgtggtggcggccgaggcagccactgtggcagcggccaccatggccatgccagaggtaaaaaaacgacggcggcggaagcagaagctggcatctccccagccatcctatgcagcagacgccaacgacagcaaggccgagtactcagacgtcctggccaagctggccttcctgaaccgccagagccagtgcgctggacggtgctcaccgccccgctgctggacacccagtgagccggagtcggtgcaccaggcccccgacacccagagcatctcccacttcctgcatcgtgtgcagggcttccggcggcgtgggggcaaagcaggcggttttggtggccggggtgggggccatgcggccaagtcagcccgatgctccttcagtgacttctttgagggcatcggcaagaaaaagaaggtggtggccgtggcagccgctggggtcgggggcccgggccttactgagttggggcacccacgcaaacggggccggggggaggtagacgctgtgactgggaagccaaagcgcaagagacggtcccggaagaatgggactctgttcccagagcaggtgcccagtggcccaggctttggggaggcaggtgctgagtgggccggggataagggtggtggctgggcccctcaccatgggcacccaggcggacaagctggccgaaactgtgggtttcaggggaccgaggcccgggcctttgcctccactgggctggagagtggagcctcaggccgtggcagctactacagcacgggtgcaccctcaggccagaccgagctcagccaggagcgccaaaacctcttcaccggctactttcgctcgctgctcgattcggatgactcctccgatctcttggactttgccctctcagcctctcgcccagagtcccggaaggcatcgggcacctatgcagggccacccaccagtgccctgcctgcccagcggggcctggccaccttccctagccggggagccaaggccagcccagtggcagtgggtagcagcggggctggggcggacccctcctttcagcctgtcctgtccgcgcgccagaccttcccaccaggacgagcagcaagctatgggctaactccagccgcttcagactgccgggcagccgagaccttccccaagctggtgcccccgccctcagccatggcccgctcacctaccacccacccgcctgccaacacctacctgccccagtacggcggctatggggccggacaaagcgtattcgccccaactaagccctttacaggccaggactgcgctaacagcaaggactgcagcttcgcctatggcagtggcaacagcctccctgcctcacccagcagcgcccacagcgccggctatgccccaccgcctaccgggggcccctgcctgccaccaagcaaggcctccttcttcagcagctctgagggggcccccttctctggttcagcccccacgcccctgcgctgtgacagccgggccagcacagtctcgcccggtggctacatggtacccaagggcaccacagcctctgccacctctgcagcctctgccgcctcctcctcctcctcctccttccagccctcgcccgagaactgtcggcagtttgcgggggcttctcagtggcctttccggcagggctatggaggcctggactgggcctcagaggcctttagtcagctctacaatcccagttttgactgccacgtcagcgagcccaacgtgatcctggacatctccaactacacaccgcagaaggtgaagcagcagacggctgtgtcggagaccttctctgagtcatcctccgacagcacccagttcaatcagccggttggtggcggggggtttcggcgtgccaacagcgaggcctcaagtagtgagggccagtcgagcctgtccagcctggagaaactgatgatggactggaacgaggcatcatctgcccccggctacaactggaaccagagtgtcctctttcagagtagctccaagccgggccgtggacggcggaagaaggtggacctgttcgaggcctcacatctgggcttcccgacatccgcctctgccgctgcctcaggctacccatccaaacggagcactgggccccggcagccgcgaggtggacggggcggtggggcctgctcagccaagaaggagcggggtggcgcagcggccaaagccaagttcatccccaagccacagccagtcaacccactgttccaggacagtcctgacctcggcctggactactatagcggggacagcagcatgtcaccactgccctcacagtcgagggccttcggcgtgggagagcgagacccctgtgacttcataggaccctactccatgaacccgtccacgccttccgatggcacctttggccaaggcttccactgcgactcgcccagcctgggtgctcccgagcttgatggcaagcatttcccaccgctggcccacccacccacggtgtttgacgccggcctgcagaaggcatactcgcccacctgctcgcctacactgggcttcaaggaagagctgcggccaccgcccacaaagctggctgcctgcgagcccctcaagcatggactccagggggccagcctgggccacgcagctgcagcccaggcccacctgagctgccgggacctgccgctgggccagccccactacgattcccccagctgcaagggcacagcctattggtaccctccaggctcagctgcccgcagcccgccctatgaaggcaaggtgggtacagggctgctggctgacttcctgggcaggacggaggccgcgtgcctcagtgcccctcacctggctagcccaccagccacgcccaaggccgacaaggagccactggaaatggcccggccccctggcccaccccgtggccctgctgcagccgctgctggctatggctgcccactccttagtgacttgaccctgtcccccgtgccgagggactcgctgctgcccctgcaggacaccgcctacaggtacccaggctttatgccccaggcgcatcctggcctgggtgggggccccaagagcggcttcctggggcccatggcggaacctcaccccgaggacacattcaccgtcacatccctgtagtgccaactgaagtgccgactggaccgcgaggttttgttcctggctttcagaaaaccaacgccaagatccctcccagcgtccacatcgtcctctggcaggagctcctgcccctctgcctcccaccctgccccctacaccccctgcagacccatctccctccaccccctcccacccatctcctccacgcagaagccgaaggtgagccctttctgcacaaaaccagcaattgtaaatactttttaaaaatgtacaaaacttaaaaacaaaacacagttttagaaaaagacaaaaaaaaaaaagagagagagagagcgagagagcgagcgtgtgcaagaggttgcgagcggggccccgaggtgtccagagcccctgcaagtatgcactgagaaatttatctacaggtcgtttgacaaaaatgaacaatatcctatttattgtatatactgttttattataaatcgtggattgtatattgcattctgtaaacctgctgtggtcccgtggtgtgcaaattcgcatggtgggggggagggagaagaacctcttgcgggagctttttttttctttcttatttttcactcttttgggttttctcttctgttgttgttgttgttgttttctgttggcaggacacacccaaagatccaagtttgtatt

SEQ ID NO: 109252 - DNA, 8577 bp, Homo sapiens
  Payload ID: 1461
  Gene Symbol: ARID1A
  Gene Name: AT rich interactive domain 1A (SWI-like)
  Uniprot ID: O14497
  ENST ID: ENST00000324856
  CDS Start-End: 372-7229
gaaagcggagagtcacagcggggccaggccctggggagcggagcctccaccgcccccctcattcccaggcaagggcttggggggaatgagccgggagagccgggtcccgagcctacagagccgggagcagctgagccgccggcgcctcggccgccgccgccgcctcctcctcctccgccgccgccagcccggagcctgagccggcggggcgggggggagaggagcgagcgcagcgcagcagcggagccccgcgaggcccgcccgggcgggtggggagggcagcccgggggactgggccccggggcggggtgggagggggggagaagacgaagacagggccgggtctctccgcggacgagacagcggggatcatggccgcgcaggtcgcccccgccgccgccagcagcctgggcaacccgccgccgccgccgccctcggagctgaagaaagccgagcagcagcagcgggaggaggcggggggcgaggcggcggcggcggcagcggccgagcgcggggaaatgaaggcagccgccgggcaggaaagcgagggccccgccgtggggccgccgcagccgctgggaaaggagctgcaggacggggccgagagcaatgggggtggcggcggcggcggagccggcagcggcggcgggcccggcgcggagccggacctgaagaactcgaacgggaacgcgggccctaggcccgccctgaacaataacctcacggagccgcccggcggcggcggtggcggcagcagcgatggggtgggggcgcctcctcactcagccgcggccgccttgccgcccccagcctacggcttcgggcaaccctacggccggagcccgtctgccgtcgccgccgccgcggccgccgtcttccaccaacaacatggcggacaacaaagccctggcctggcagcgctgcagagcggcggcggcgggggcctggagccctacgcggggccccagcagaactctcacgaccacggcttccccaaccaccagtacaactcctactaccccaaccgcagcgcctaccccccgcccgccccggcctacgcgctgagctccccgagaggtggcactccgggctccggcgcggcggcggctgccggctccaagccgcctccctcctccagcgcctccgcctcctcgtcgtcttcgtccttcgctcagcagcgcttcggggccatggggggaggcggcccctccgcggccggcgggggaactccccagcccaccgccacccccaccctcaaccaactgctcacgtcgcccagctcggcccggggctaccagggctaccccgggggcgactacagtggcgggccccaggacgggggcgccggcaagggcccggcggacatggcctcgcagtgttggggggctgcggcggcggcagctgcggcggcggccgcctcgggaggggcccaacaaaggagccaccacgcgcccatgagccccgggagcagcggcggcggggggcagccgctcgcccggacccctcagccatccagtccaatggatcagatgggcaagatgagacctcagccatatggcgggactaacccatactcgcagcaacagggacctccgtcaggaccgcagcaaggacatgggtacccagggcagccatacgggtcccagaccccgcagcggtacccgatgaccatgcagggccgggcgcagagtgccatgggcggcctctcttatacacagcagattcctccttatggacaacaaggccccagcgggtatggtcaacagggccagactccatattacaaccagcaaagtcctcaccctcagcagcagcagccaccctactcccagcaaccaccgtcccagacccctcatgcccaaccttcgtatcagcagcagccacagtctcaaccaccacagctccagtcctctcagcctccatactcccagcagccatcccagcctccacatcagcagtccccggctccatacccctcccagcagtcgacgacacagcagcacccccagagccagcccccctactcacagccacaggctcagtctccttaccagcagcagcaacctcagcagccagcaccctcgacgctctcccagcaggctgcgtatcctcagccccagtctcagcagtcccagcaaactgcctattcccagcagcgcttccctccaccgcaggagctatctcaagattcatttgggtctcaggcatcctcagccccctcaatgacctccagtaagggagggcaagaagatatgaacctgagccttcagtcaagaccctccagcttgcctgatctatctggttcaatagatgacctccccatggggacagaaggagctctgagtcctggagtgagcacatcagggatttccagcagccaaggagagcagagtaatccagctcagtctcctttctctcctcatacctcccctcacctgcctggcatccgaggcccttccccgtcccctgttggctctcccgccagtgttgctcagtctcgctcaggaccactctcgcctgctgcagtgccaggcaaccagatgccacctcggccacccagtggccagtcggacagcatcatgcatccttccatgaaccaatcaagcattgcccaagatcgaggttatatgcagaggaacccccagatgccccagtacagttccccccagcccggctcagccttatctccgcgtcagccttccggaggacagatacacacaggcatgggctcctaccagcagaactccatggggagctatggtccccaggggggtcagtatggcccacaaggtggctaccccaggcagccaaactataatgccttgcccaatgccaactaccccagtgcaggcatggctggaggcataaaccccatgggtgccggaggtcaaatgcatggacagcctggcatcccaccttatggcacactccctccagggaggatgagtcacgcctccatgggcaaccggccttatggccctaacatggccaatatgccacctcaggttgggtcagggatgtgtcccccaccagggggcatgaaccggaaaacccaagaaactgctgtcgccatgcatgttgctgccaactctatccaaaacaggccgccaggctaccccaatatgaatcaagggggcatgatgggaactggacctccttatggacaagggattaatagtatggctggcatgatcaaccctcagggacccccatattccatgggtggaaccatggccaacaattctgcagggatggcagccagcccagagatgatgggccttggggatgtaaagttaactccagccaccaaaatgaacaacaaggcagatgggacacccaagacagaatccaaatccaagaaatccagttcttctactacaaccaatgagaagatcaccaagttgtatgagctgggtggtgagcctgagaggaagatgtgggtggaccgttatctggccttcactgaggagaaggccatgggcatgacaaatctgcctgctgtgggtaggaaacctctggacctctatcgcctctatgtgtctgtgaaggagattggtggattgactcaggtcaacaagaacaaaaaatggcgggaacttgcaaccaacctcaatgtgggcacatcaagcagtgctgccagctccttgaaaaagcagtatatccagtgtctctatgcctttgaatgcaagattgaacggggagaagaccctcccccagacatctttgcagctgctgattccaagaagtcccagcccaagatccagcctccctctcctgcgggatcaggatctatgcaggggccccagactccccagtcaaccagcagttccatggcagaaggaggagacttaaagccaccaactccagcatccacaccacacagtcagatccccccattgccaggcatgagcaggagcaattcagttgggatccaggatgcctttaatgatggaagtgactccacattccagaagcggaattccatgactccaaaccctgggtatcagcccagtatgaatacctctgacatgatggggcgcatgtcctatgagccaaataaggatccttatggcagcatgaggaaagctccagggagtgatcccttcatgtcctcagggcagggccccaacggcgggatgggtgacccctacagtcgtgctgccggccctgggctaggaaatgtggcgatgggaccacgacagcactatccctatggaggtccttatgacagagtgaggacggagcctggaatagggcctgagggaaacatgagcactggggccccacagccgaatctcatgccttccaacccagactcggggatgtattctcctagccgctaccccccgcagcagcagcagcagcagcagcaacgacatgattcctatggcaatcagttctccacccaaggcaccccttctggcagccccttccccagccagcagactacaatgtatcaacagcaacagcagaattacaagcggccaatggatggcacatatggccctcctgccaagcggcacgaaggggagatgtacagcgtgccatacagcactgggcaggggcagcctcagcagcagcagttgcccccagcccagccccagcctgccagccagcaacaagctgcccagccttcccctcagcaagatgtatacaaccagtatggcaatgcctatcctgccactgccacagctgctactgagcgccgaccagcaggcggcccccagaaccaatttccattccagtttggccgagaccgtgtctctgcaccccctggcaccaatgcccagcaaaacatgccaccacaaatgatgggcggccccatacaggcatcagctgaggttgctcagcaaggcaccatgtggcaggggcgtaatgacatgacctataattatgccaacaggcagagcacgggctctgccccccagggccccgcctatcatggcgtgaaccgaacagatgaaatgctgcacacagatcagagggccaaccacgaaggctcgtggccttcccatggcacacgccagcccccatatggtccctctgcccctgtgccccccatgacaaggccccctccatctaactaccagcccccaccaagcatgcagaatcacattcctcaggtatccagccctgctcccctgccccggccaatggagaaccgcacctctcctagcaagtctccattcctgcactctgggatgaaaatgcagaaggcaggtcccccagtacctgcctcgcacatagcacctgcccctgtgcagccccccatgattcggcgggatatcaccttcccacctggctctgttgaagccacacagcctgtgttgaagcagaggaggcggctcacaatgaaagacattggaaccccggaggcatggcgggtaatgatgtccctcaagtctggtctcctggcagagagcacatgggcattagataccatcaacatcctgctgtatgatgacaacagcatcatgaccttcaacctcagtcagctcccagggttgctagagctccttgtagaatatttccgacgatgcctgattgagatctttggcattttaaaggagtatgaggtgggtgacccaggacagagaacgctactggatcctgggaggttcagcaaggtgtctagtccagctcccatggagggtggggaagaagaagaagaacttctaggtcctaaactagaagaggaagaagaagaggaagtagttgaaaatgatgaggagatagccttttcaggcaaggacaagccagcttcagagaatagtgaggagaagctgatcagtaagtttgacaagcttccagtaaagatcgtacagaagaatgatccatttgtggtggactgctcagataagcttgggcgtgtgcaggagtttgacagtggcctgctgcactggcggattggtgggggggacaccactgagcatatccagacccacttcgagagcaagacagagctgctgccttcccggcctcacgcaccctgcccaccagcccctcggaagcatgtgacaacagcagagggtacaccagggacaacagaccaggaggggcccccacctgatggacctccagaaaaacggatcacagccactatggatgacatgttgtctactcggtctagcaccttgaccgaggatggagctaagagttcagaggccatcaaggagagcagcaagtttccatttggcattagcccagcacagagccaccggaacatcaagatcctagaggacgaaccccacagtaaggatgagaccccactgtgtacccttctggactggcaggattctcttgccaagcgctgcgtctgtgtgtccaataccattcgaagcctgtcatttgtgccaggcaatgactttgagatgtccaaacacccagggctgctgctcatcctgggcaagctgatcctgctgcaccacaagcacccagaacggaagcaggcaccactaacttatgaaaaggaggaggaacaggaccaaggggtgagctgcaacaaagtggagtggtggtgggactgcttggagatgctccgggaaaacaccttggttacactcgccaacatctcggggcagttggacctatctccataccccgagagcatttgcctgcctgtcctggacggactcctacactgggcagtttgcccttcagctgaagcccaggaccccttttccaccctgggccccaatgccgtcctttccccgcagagactggtcttggaaaccctcagcaaactcagcatccaggacaacaatgtggacctgattctggccacaccccccttcagccgcctggagaagttgtatagcactatggtgcgcttcctcagtgaccgaaagaacccggtgtgccgggagatggctgtggtactgctggccaacctggctcagggggacagcctggcagctcgtgccattgcagtgcagaagggcagtatcggcaacctcctgggcttcctagaggacagccttgccgccacacagttccagcagagccaggccagcctcctccacatgcagaacccaccctttgagccaactagtgtggacatgatgcggcgggctgcccgcgcgctgcttgccttggccaaggtggacgagaaccactcagagtttactctgtacgaatcacggctgttggacatctcggtatcaccgttgatgaactcattggtttcacaagtcatttgtgatgtactgtttttgattggccagtcatgacagccgtgggacacctcccccccccgtgtgtgtgtgcgtgtgtggagaacttagaaactgactgttgccctttatttatgcaaaaccacctcagaatccagtttaccctgtgctgtccagcttctcccttgggaaaaagtctctcctgtttctctctcctccttccacctcccctccctccatcacctcacgcctttctgttccttgtcctcaccttactcccctcaggaccctaccccaccctctttgaaaagacaaagctctgcctacatagaagactttttttattttaaccaaagttactgttgtttacagtgagtttggggaaaaaaaataaaataaaaatggctttcccagtccttgcatcaacgggatgccacatttcataactgtttttaatggtaaaaaaaaaaaaaaaaaatacaaaaaaaaattctgaaggacaaaaaaggtgactgctgaactgtgtgtggtttattgttgtacattcacaatcttgcaggagccaagaagttcgcagttgtgaacagaccctgttcactggagaggcctgtgcagtagagtgtagaccctttcatgtactgtactgtacacctgatactgtaaacatactgtaataataatgtctcacatggaaacagaaaacgctgggtcagcagcaagctgtagtttttaaaaatgtttttagttaaacgttgaggagaaaaaaaaaaaaggcttttcccccaaagtatcatgtgtgaacctacaacaccctgacctctttctctcctccttgattgtatgaataaccctgagatcacctcttagaactggttttaacctttagctgcagcggctacgctgccacgtgtgtatatatatgacgttgtacattgcacatacccttggatccccacagtttggtcctcctcccagctacccctttatagtatgacgagttaacaagttggtgacctgcacaaagcgagacacagctatttaatctcttgccagatatcgcccctcttggtgcgatgctgtacaggtctctgtaaaaagtccttgctgtctcagcagccaatcaacttatagtttatttttttctgggtttttgttttgttttgttttctttctaatcgaggtgtgaaaaagttctaggttcagttgaagttctgatgaagaaacacaattgagattttttcagtgataaaatctgcatatttgtatttcaacaatgtagctaaaacttgatgtaaattcctcctttttttccttttttggcttaatgaatatcatttattcagtatgaaatctttatactatatgttccacgtgttaagaataaatgtacattaaatcttggtaa

SEQ ID NO: 109253 - DNA, 5992 bp, Homo sapiens
  Payload ID: 1461
  Gene Symbol: ARID1A
  Gene Name: AT rich interactive domain 1A (SWI-like)
  Uniprot ID: O14497
  ENST ID: ENST00000374152
  CDS Start-End: 284-5992
tggatctcaagcagtaccacagttacaaagtagtttttagcttacaaggtgttttcacaaataggtggtattttcatttttcaaatgacaaaattagggttctgaggcgggtcagttgacttaaaggttactaggttggtctcattgctctttcaaagtaactgtatttctttatagcatacagactaaaaaaacctgtgtacttgggttatatattcagtggccagaggccatcaaagctcaggttaatgaaatgctctttattttgtagccatccagtccaatggatcagatgggcaagatgagacctcagccatatggcgggactaacccatactcgcagcaacagggacctccgtcaggaccgcagcaaggacatgggtacccagggcagccatacgggtcccagaccccgcagcggtacccgatgaccatgcagggccgggcgcagagtgccatgggcggcctctcttatacacagcagattcctccttatggacaacaaggccccagcgggtatggtcaacagggccagactccatattacaaccagcaaagtcctcaccctcagcagcagcagccaccctactcccagcaaccaccgtcccagacccctcatgcccaaccttcgtatcagcagcagccacagtctcaaccaccacagctccagtcctctcagcctccatactcccagcagccatcccagcctccacatcagcagtccccggctccatacccctcccagcagtcgacgacacagcagcacccccagagccagcccccctactcacagccacaggctcagtctccttaccagcagcagcaacctcagcagccagcaccctcgacgctctcccagcaggctgcgtatcctcagccccagtctcagcagtcccagcaaactgcctattcccagcagcgcttccctccaccgcaggagctatctcaagattcatttgggtctcaggcatcctcagccccctcaatgacctccagtaagggagggcaagaagatatgaacctgagccttcagtcaagaccctccagcttgcctgatctatctggttcaatagatgacctccccatggggacagaaggagctctgagtcctggagtgagcacatcagggatttccagcagccaaggagagcagagtaatccagctcagtctcctttctctcctcatacctcccctcacctgcctggcatccgaggcccttccccgtcccctgttggctctcccgccagtgttgctcagtctcgctcaggaccactctcgcctgctgcagtgccaggcaaccagatgccacctcggccacccagtggccagtcggacagcatcatgcatccttccatgaaccaatcaagcattgcccaagatcgaggttatatgcagaggaacccccagatgccccagtacagttccccccagcccggctcagccttatctccgcgtcagccttccggaggacagatacacacaggcatgggctcctaccagcagaactccatggggagctatggtccccaggggggtcagtatggcccacaaggtggctaccccaggcagccaaactataatgccttgcccaatgccaactaccccagtgcaggcatggctggaggcataaaccccatgggtgccggaggtcaaatgcatggacagcctggcatcccaccttatggcacactccctccagggaggatgagtcacgcctccatgggcaaccggccttatggccctaacatggccaatatgccacctcaggttgggtcagggatgtgtcccccaccagggggcatgaaccggaaaacccaagaaactgctgtcgccatgcatgttgctgccaactctatccaaaacaggccgccaggctaccccaatatgaatcaagggggcatgatgggaactggacctccttatggacaagggattaatagtatggctggcatgatcaaccctcagggacccccatattccatgggtggaaccatggccaacaattctgcagggatggcagccagcccagagatgatgggccttggggatgtaaagttaactccagccaccaaaatgaacaacaaggcagatgggacacccaagacagaatccaaatccaagaaatccagttcttctactacaaccaatgagaagatcaccaagttgtatgagctgggtggtgagcctgagaggaagatgtgggtggaccgttatctggccttcactgaggagaaggccatgggcatgacaaatctgcctgctgtgggtaggaaacctctggacctctatcgcctctatgtgtctgtgaaggagattggtggattgactcaggtcaacaagaacaaaaaatggcgggaacttgcaaccaacctcaatgtgggcacatcaagcagtgctgccagctccttgaaaaagcagtatatccagtgtctctatgcctttgaatgcaagattgaacggggagaagaccctcccccagacatctttgcagctgctgattccaagaagtcccagcccaagatccagcctccctctcctgcgggatcaggatctatgcaggggccccagactccccagtcaaccagcagttccatggcagaaggaggagacttaaagccaccaactccagcatccacaccacacagtcagatccccccattgccaggcatgagcaggagcaattcagttgggatccaggatgcctttaatgatggaagtgactccacattccagaagcggaattccatgactccaaaccctgggtatcagcccagtatgaatacctctgacatgatggggcgcatgtcctatgagccaaataaggatccttatggcagcatgaggaaagctccagggagtgatcccttcatgtcctcagggcagggccccaacggcgggatgggtgacccctacagtcgtgctgccggccctgggctaggaaatgtggcgatgggaccacgacagcactatccctatggaggtccttatgacagagtgaggacggagcctggaatagggcctgagggaaacatgagcactggggccccacagccgaatctcatgccttccaacccagactcggggatgtattctcctagccgctaccccccgcagcagcagcagcagcagcagcaacgacatgattcctatggcaatcagttctccacccaaggcaccccttctggcagccccttccccagccagcagactacaatgtatcaacagcaacagcagaattacaagcggccaatggatggcacatatggccctcctgccaagcggcacgaaggggagatgtacagcgtgccatacagcactgggcaggggcagcctcagcagcagcagttgcccccagcccagccccagcctgccagccagcaacaagctgcccagccttcccctcagcaagatgtatacaaccagtatggcaatgcctatcctgccactgccacagctgctactgagcgccgaccagcaggcggcccccagaaccaatttccattccagtttggccgagaccgtgtctctgcaccccctggcaccaatgcccagcaaaacatgccaccacaaatgatgggcggccccatacaggcatcagctgaggttgctcagcaaggcaccatgtggcaggggcgtaatgacatgacctataattatgccaacaggcagagcacgggctctgccccccagggccccgcctatcatggcgtgaaccgaacagatgaaatgctgcacacagatcagagggccaaccacgaaggctcgtggccttcccatggcacacgccagcccccatatggtccctctgcccctgtgccccccatgacaaggccccctccatctaactaccagcccccaccaagcatgcagaatcacattcctcaggtatccagccctgctcccctgccccggccaatggagaaccgcacctctcctagcaagtctccattcctgcactctgggatgaaaatgcagaaggcaggtcccccagtacctgcctcgcacatagcacctgcccctgtgcagccccccatgattcggcgggatatcaccttcccacctggctctgttgaagccacacagcctgtgttgaagcagaggaggcggctcacaatgaaagacattggaaccccggaggcatggcgggtaatgatgtccctcaagtctggtctcctggcagagagcacatgggcattagataccatcaacatcctgctgtatgatgacaacagcatcatgaccttcaacctcagtcagctcccagggttgctagagctccttgtagaatatttccgacgatgcctgattgagatctttggcattttaaaggagtatgaggtgggtgacccaggacagagaacgctactggatcctgggaggttcagcaaggtgtctagtccagctcccatggagggtggggaagaagaagaagaacttctaggtcctaaactagaagaggaagaagaagaggaagtagttgaaaatgatgaggagatagccttttcaggcaaggacaagccagcttcagagaatagtgaggagaagctgatcagtaagtttgacaagcttccagtaaagatcgtacagaagaatgatccatttgtggtggactgctcagataagcttgggcgtgtgcaggagtttgacagtggcctgctgcactggcggattggtgggggggacaccactgagcatatccagacccacttcgagagcaagacagagctgctgccttcccggcctcacgcaccctgcccaccagcccctcggaagcatgtgacaacagcagagggtacaccagggacaacagaccaggaggggcccccacctgatggacctccagaaaaacggatcacagccactatggatgacatgttgtctactcggtctagcaccttgaccgaggatggagctaagagttcagaggccatcaaggagagcagcaagtttccatttggcattagcccagcacagagccaccggaacatcaagatcctagaggacgaaccccacagtaaggatgagaccccactgtgtacccttctggactggcaggattctcttgccaagcgctgcgtctgtgtgtccaataccattcgaagcctgtcatttgtgccaggcaatgactttgagatgtccaaacacccagggctgctgctcatcctgggcaagctgatcctgctgcaccacaagcacccagaacggaagcaggcaccactaacttatgaaaaggaggaggaacaggaccaaggggtgagctgcaacaaagtggagtggtggtgggactgcttggagatgctccgggaaaacaccttggttacactcgccaacatctcggggcagttggacctatctccataccccgagagcatttgcctgcctgtcctggacggactcctacactgggcagtttgcccttcagctgaagcccaggaccccttttccaccctgggccccaatgccgtcctttccccgcagagactggtcttggaaaccctcagcaaactcagcatccaggacaacaatgtggacctgattctggccacaccccccttcagccgcctggagaagttgtatagcactatggtgcgcttcctcagtgaccgaaagaacccggtgtgccgggagatggctgtggtactgctggccaacctggctcagggggacagcctggcagctcgtgccattgcagtgcagaagggcagtatcggcaacctcctgggcttcctagaggacagccttgccgccacacagttccagcagagccaggccagcctcctccacatgcagaacccaccctttgagccaactagtgtggacatgatgcggcgggctgcccgcgcgctgcttgccttggccaaggtggacgagaaccactcagagtttactctgtacgaatcacggctgttggacatctcggtatcaccgttgatgaactcattggtttcacaagtcatttgtgatgtactgtttttgattggccagtcatga

SEQ ID NO: 109254 - DNA, 6268 bp, Homo sapiens
  Payload ID: 1461
  Gene Symbol: ARID1A
  Gene Name: AT rich interactive domain 1A (SWI-like)
  Uniprot ID: O14497
  ENST ID: ENST00000457599
  CDS Start-End: 1-6207
atggccgcgcaggtcgcccccgccgccgccagcagcctgggcaacccgccgccgccgccgccctcggagctgaagaaagccgagcagcagcagcgggaggaggcggggggcgaggcggcggcggcggcagcggccgagcgcggggaaatgaaggcagccgccgggcaggaaagcgagggccccgccgtggggccgccgcagccgctgggaaaggagctgcaggacggggccgagagcaatgggggtggcggcggcggcggagccggcagcggcggcgggcccggcgcggagccggacctgaagaactcgaacgggaacgcgggccctaggcccgccctgaacaataacctcacggagccgcccggcggcggcggtggcggcagcagcgatggggtgggggcgcctcctcactcagccgcggccgccttgccgcccccagcctacggcttcgggcaaccctacggccggagcccgtctgccgtcgccgccgccgcggccgccgtcttccaccaacaacatggcggacaacaaagccctggcctggcagcgctgcagagcggcggcggcgggggcctggagccctacgcggggccccagcagaactctcacgaccacggcttccccaaccaccagtacaactcctactaccccaaccgcagcgcctaccccccgcccgccccggcctacgcgctgagctccccgagaggtggcactccgggctccggcgcggcggcggctgccggctccaagccgcctccctcctccagcgcctccgcctcctcgtcgtcttcgtccttcgctcagcagcgcttcggggccatggggggaggcggcccctccgcggccggcgggggaactccccagcccaccgccacccccaccctcaaccaactgctcacgtcgcccagctcggcccggggctaccagggctaccccgggggcgactacagtggcgggccccaggacgggggcgccggcaagggcccggcggacatggcctcgcagtgttggggggctgcggcggcggcagctgcggcggcggccgcctcgggaggggcccaacaaaggagccaccacgcgcccatgagccccgggagcagcggcggcggggggcagccgctcgcccggacccctcagccatccagtccaatggatcagatgggcaagatgagacctcagccatatggcgggactaacccatactcgcagcaacagggacctccgtcaggaccgcagcaaggacatgggtacccagggcagccatacgggtcccagaccccgcagcggtacccgatgaccatgcagggccgggcgcagagtgccatgggcggcctctcttatacacagcagattcctccttatggacaacaaggccccagcgggtatggtcaacagggccagactccatattacaaccagcaaagtcctcaccctcagcagcagcagccaccctactcccagcaaccaccgtcccagacccctcatgcccaaccttcgtatcagcagcagccacagtctcaaccaccacagctccagtcctctcagcctccatactcccagcagccatcccagcctccacatcagcagtccccggctccatacccctcccagcagtcgacgacacagcagcacccccagagccagcccccctactcacagccacaggctcagtctccttaccagcagcagcaacctcagcagccagcaccctcgacgctctcccagcaggctgcgtatcctcagccccagtctcagcagtcccagcaaactgcctattcccagcagcgcttccctccaccgcaggagctatctcaagattcatttgggtctcaggcatcctcagccccctcaatgacctccagtaagggagggcaagaagatatgaacctgagccttcagtcaagaccctccagcttgcctgatctatctggttcaatagatgacctccccatggggacagaaggagctctgagtcctggagtgagcacatcagggatttccagcagccaaggagagcagagtaatccagctcagtctcctttctctcctcatacctcccctcacctgcctggcatccgaggcccttccccgtcccctgttggctctcccgccagtgttgctcagtctcgctcaggaccactctcgcctgctgcagtgccaggcaaccagatgccacctcggccacccagtggccagtcggacagcatcatgcatccttccatgaaccaatcaagcattgcccaagatcgaggttatatgcagaggaacccccagatgccccagtacagttccccccagcccggctcagccttatctccgcgtcagccttccggaggacagatacacacaggcatgggctcctaccagcagaactccatggggagctatggtccccaggggggtcagtatggcccacaaggtggctaccccaggcagccaaactataatgccttgcccaatgccaactaccccagtgcaggcatggctggaggcataaaccccatgggtgccggaggtcaaatgcatggacagcctggcatcccaccttatggcacactccctccagggaggatgagtcacgcctccatgggcaaccggccttatggccctaacatggccaatatgccacctcaggttgggtcagggatgtgtcccccaccagggggcatgaaccggaaaacccaagaaactgctgtcgccatgcatgttgctgccaactctatccaaaacaggccgccaggctaccccaatatgaatcaagggggcatgatgggaactggacctccttatggacaagggattaatagtatggctggcatgatcaaccctcagggacccccatattccatgggtggaaccatggccaacaattctgcagggatggcagccagcccagagatgatgggccttggggatgtaaagttaactccagccaccaaaatgaacaacaaggcagatgggacacccaagacagaatccaaatccaagaaatccagttcttctactacaaccaatgagaagatcaccaagttgtatgagctgggtggtgagcctgagaggaagatgtgggtggaccgttatctggccttcactgaggagaaggccatgggcatgacaaatctgcctgctgtgggtaggaaacctctggacctctatcgcctctatgtgtctgtgaaggagattggtggattgactcaggtcaacaagaacaaaaaatggcgggaacttgcaaccaacctcaatgtgggcacatcaagcagtgctgccagctccttgaaaaagcagtatatccagtgtctctatgcctttgaatgcaagattgaacggggagaagaccctcccccagacatctttgcagctgctgattccaagaagtcccagcccaagatccagcctccctctcctgcgggatcaggatctatgcaggggccccagactccccagtcaaccagcagttccatggcagaaggaggagacttaaagccaccaactccagcatccacaccacacagtcagatccccccattgccaggcatgagcaggagcaattcagttgggatccaggatgcctttaatgatggaagtgactccacattccagaagcggaattccatgactccaaaccctgggtatcagcccagtatgaatacctctgacatgatggggcgcatgtcctatgagccaaataaggatccttatggcagcatgaggaaagctccagggagtgatcccttcatgtcctcagggcagggccccaacggcgggatgggtgacccctacagtcgtgctgccggccctgggctaggaaatgtggcgatgggaccacgacagcactatccctatggaggtccttatgacagagtgaggacggagcctggaatagggcctgagggaaacatgagcactggggccccacagccgaatctcatgccttccaacccagactcggggatgtattctcctagccgctaccccccgcagcagcagcagcagcagcagcaacgacatgattcctatggcaatcagttctccacccaaggcaccccttctggcagccccttccccagccagcagactacaatgtatcaacagcaacagcaggtatccagccctgctcccctgccccggccaatggagaaccgcacctctcctagcaagtctccattcctgcactctgggatgaaaatgcagaaggcaggtcccccagtacctgcctcgcacatagcacctgcccctgtgcagccccccatgattcggcgggatatcaccttcccacctggctctgttgaagccacacagcctgtgttgaagcagaggaggcggctcacaatgaaagacattggaaccccggaggcatggcgggtaatgatgtccctcaagtctggtctcctggcagagagcacatgggcattagataccatcaacatcctgctgtatgatgacaacagcatcatgaccttcaacctcagtcagctcccagggttgctagagctccttgtagaatatttccgacgatgcctgattgagatctttggcattttaaaggagtatgaggtgggtgacccaggacagagaacgctactggatcctgggaggttcagcaaggtgtctagtccagctcccatggagggtggggaagaagaagaagaacttctaggtcctaaactagaagaggaagaagaagaggaagtagttgaaaatgatgaggagatagccttttcaggcaaggacaagccagcttcagagaatagtgaggagaagctgatcagtaagtttgacaagcttccagtaaagatcgtacagaagaatgatccatttgtggtggactgctcagataagcttgggcgtgtgcaggagtttgacagtggcctgctgcactggcggattggtgggggggacaccactgagcatatccagacccacttcgagagcaagacagagctgctgccttcccggcctcacgcaccctgcccaccagcccctcggaagcatgtgacaacagcagagggtacaccagggacaacagaccaggaggggcccccacctgatggacctccagaaaaacggatcacagccactatggatgacatgttgtctactcggtctagcaccttgaccgaggatggagctaagagttcagaggccatcaaggagagcagcaagtttccatttggcattagcccagcacagagccaccggaacatcaagatcctagaggacgaaccccacagtaaggatgagaccccactgtgtacccttctggactggcaggattctcttgccaagcgctgcgtctgtgtgtccaataccattcgaagcctgtcatttgtgccaggcaatgactttgagatgtccaaacacccagggctgctgctcatcctgggcaagctgatcctgctgcaccacaagcacccagaacggaagcaggcaccactaacttatgaaaaggaggaggaacaggaccaaggggtgagctgcaacaaagtggagtggtggtgggactgcttggagatgctccgggaaaacaccttggttacactcgccaacatctcggggcagttggacctatctccataccccgagagcatttgcctgcctgtcctggacggactcctacactgggcagtttgcccttcagctgaagcccaggaccccttttccaccctgggccccaatgccgtcctttccccgcagagactggtcttggaaaccctcagcaaactcagcatccaggacaacaatgtggacctgattctggccacaccccccttcagccgcctggagaagttgtatagcactatggtgcgcttcctcagtgaccgaaagaacccggtgtgccgggagatggctgtggtactgctggccaacctggctcagggggacagcctggcagctcgtgccattgcagtgcagaagggcagtatcggcaacctcctgggcttcctagaggacagccttgccgccacacagttccagcagagccaggccagcctcctccacatgcagaacccaccctttgagccaactagtgtggacatgatgcggcgggctgcccgcgcgctgcttgccttggccaaggtggacgagaaccactcagagtttactctgtacgaatcacggctgttggacatctcggtatcaccgttgatgaactcattggtttcacaagtcatttgtgatgtactgtttttgattggccagtcatgacagccgtgggacacctcccccccccgtgtgtgtgtgcgtgtgtggagaacttagaaactga

SEQ ID NO: 109255 - DNA, 3978 bp, Homo sapiens
  Payload ID: 1461
  Gene Symbol: ARID1A
  Gene Name: AT rich interactive domain 1A (SWI-like)
  ENST ID: ENST00000430799
  CDS Start-End: 1-3547
tgaatgcaagattgaacggggagaagaccctcccccagacatctttgcagctgctgattccaagaagtcccagcccaagatccagcctccctctcctgcgggatcaggatctatgcaggggccccagactccccagtcaaccagcagttccatggcagaaggaggagacttaaagccaccaactccagcatccacaccacacagtcagatccccccattgccaggcatgaggagcaattcagttgggatccaggatgcctttaatgatggaagtgactccacattccagaagcggaattccatgactccaaaccctgggtatcagcccagtatgaatacctctgacatgatggggcgcatgtcctatgagccaaataaggatccttatggcagcatgaggaaagctccagggagtgatcccttcatgtcctcagggcagggccccaacggcgggatgggtgacccctacagtcgtgctgccggccctgggctaggaaatgtggcgatgggaccacgacagcactatccctatggaggtccttatgacagagtgaggacggagcctggaatagggcctgagggaaacatgagcactggggccccacagccgaatctcatgccttccaacccagactcggggatgtattctcctagccgctaccccccgcagcagcagcagcagcagcagcaacgacatgattcctatggcaatcagttctccacccaaggcaccccttctggcagccccttccccagccagcagactacaatgtatcaacagcaacagcagaattacaagcggccaatggatggcacatatggccctcctgccaagcggcacgaaggggagatgtacagcgtgccatacagcactgggcaggggcagcctcagcagcagcagttgcccccagcccagccccagcctgccagccagcaacaagctgcccagccttcccctcagcaagatgtatacaaccagtatggcaatgcctatcctgccactgccacagctgctactgagcgccgaccagcaggcggcccccagaaccaatttccattccagtttggccgagaccgtgtctctgcaccccctggcaccaatgcccagcaaaacatgccaccacaaatgatgggcggccccatacaggcatcagctgaggttgctcagcaaggcaccatgtggcaggggcgtaatgacatgacctataattatgccaacaggcagagcacgggctctgccccccagggccccgcctatcatggcgtgaaccgaacagatgaaatgctgcacacagatcagagggccaaccacgaaggctcgtggccttcccatggcacacgccagcccccatatggtccctctgcccctgtgccccccatgacaaggccccctccatctaactaccagcccccaccaagcatgcagaatcacattcctcaggtatccagccctgctcccctgccccggccaatggagaaccgcacctctcctagcaagtctccattcctgcactctgggatgaaaatgcagaaggcaggtcccccagtacctgcctcgcacatagcacctgcccctgtgcagccccccatgattcggcgggatatcaccttcccacctggctctgttgaagccacacagcctgtgttgaagcagaggaggcggctcacaatgaaagacattggaaccccggaggcatggcgggtaatgatgtccctcaagtctggtctcctggcagagagcacatgggcattagataccatcaacatcctgctgtatgatgacaacagcatcatgaccttcaacctcagtcagctcccagggttgctagagctccttgtagaatatttccgacgatgcctgattgagatctttggcattttaaaggagtatgaggtgggtgacccaggacagagaacgctactggatcctgggaggttcagcaaggtgtctagtccagctcccatggagggtggggaagaagaagaagaacttctaggtcctaaactagaagaggaagaagaagaggaagtagttgaaaatgatgaggagatagccttttcaggcaaggacaagccagcttcagagaatagtgaggagaagctgatcagtaagtttgacaagcttccagtaaagatcgtacagaagaatgatccatttgtggtggactgctcagataagcttgggcgtgtgcaggagtttgacagtggcctgctgcactggcggattggtgggggggacaccactgagcatatccagacccacttcgagagcaagacagagctgctgccttcccggcctcacgcaccctgcccaccagcccctcggaagcatgtgacaacagcagagggtacaccagggacaacagaccaggaggggcccccacctgatggacctccagaaaaacggatcacagccactatggatgacatgttgtctactcggtctagcaccttgaccgaggatggagctaagagttcagaggccatcaaggagagcagcaagtttccatttggcattagcccagcacagagccaccggaacatcaagatcctagaggacgaaccccacagtaaggatgagaccccactgtgtacccttctggactggcaggattctcttgccaagcgctgcgtctgtgtgtccaataccattcgaagcctgtcatttgtgccaggcaatgactttgagatgtccaaacacccagggctgctgctcatcctgggcaagctgatcctgctgcaccacaagcacccagaacggaagcaggcaccactaacttatgaaaaggaggaggaacaggaccaaggggtgagctgcaacaaagtggagtggtggtgggactgcttggagatgctccgggaaaacaccttggttacactcgccaacatctcggggcagttggacctatctccataccccgagagcatttgcctgcctgtcctggacggactcctacactgggcagtttgcccttcagctgaagcccaggaccccttttccaccctgggccccaatgccgtcctttccccgcagagactggtcttggaaaccctcagcaaactcagcatccaggacaacaatgtggacctgattctggccacaccccccttcagccgcctggagaagttgtatagcactatggtgcgcttcctcagtgaccgaaagaacccggtgtgccgggagatggctgtggtactgctggccaacctggctcagggggacagcctggcagctcgtgccattgcagtgcagaagggcagtatcggcaacctcctgggcttcctagaggacagccttgccgccacacagttccagcagagccaggccagcctcctccacatgcagaacccaccctttgagccaactagtgtggacatgatgcggcgggctgcccgcgcgctgcttgccttggccaaggtggacgagaaccactcagagtttactctgtacgaatcacggctgttggacatctcggtatcaccgttgatgaactcattggtttcacaagtcatttgtgatgtactgtttttgattggccagtcatgacagccgtgggacacctcccccccccgtgtgtgtgtgcgtgtgtggagaacttagaaactgactgttgccctttatttatgcaaaaccacctcagaatccagtttaccctgtgctgtccagcttctcccttgggaaaaagtctctcctgtttctctctcctccttccacctcccctccctccatcacctcacgcctttctgttccttgtcctcaccttactcccctcaggaccctaccccaccctctttgaaaagacaaagctctgcctacatagaagactttttttattttaaccaaagttactgttgtttacagtgagtttggggaaaaaaaataaaataaaaatggctttcccagtccttgcatcaacgggatgccacatttcataactgtttttaatggtaaaaaaaaaaaaaaaaaatacaaaaaaa

SEQ ID NO: 109256 - DNA, 2696 bp, Homo sapiens
  Payload ID: 1461
  Gene Symbol: ARID1A
  Gene Name: AT rich interactive domain 1A (SWI-like)
  ENST ID: ENST00000466382
  CDS Start-End: 1-434
atccttatggcagcatgaggaaagctccagggagtgatcccttcatgtcctcagggcagggccccaacggcgggatgggtgacccctacagtcgtgctgccggccctgggctaggaaatgtggcgatgggaccacgacagcactatccctatggaggtccttatgacagagtgaggacggagcctggaatagggcctgagggaaacatgagcactggggccccacagccgaatctcatgccttccaacccagactcggggatgtattctcctagccgctaccccccgcagcagcagcagcagcagcagcaacgacatgattcctatggcaatcagttctccacccaaggcaccccttctggcagccccttccccagccagcagactacaatgtatcaacagcaacagcaggaaccccggaggcatggcgggtaatgatgtccctcaagtctggtctcctggcagagagcacatgggcattagataccatcaacatcctgctgtatgatgacaacagcatcatgaccttcaacctcagtcagctcccagggttgctagagctccttgtagaatatttccgacgatgcctgattgagatctttggcattttaaaggagtatgaggtgggtgacccaggacagagaacgctactggatcctgggaggttcagcaaggtgtctagtccagctcccatggagggtggggaagaagaagaagaacttctaggtcctaaactagaagaggaagaagaagaggaagtagttgaaaatgatgaggagatagccttttcaggcaaggacaagccagcttcagagaatagtgaggagaagctgatcagtaagtttgacaagcttccagtaaagatcgtacagaagaatgatccatttgtggtggactgctcagataagcttgggcgtgtgcaggagtttgacagtggcctgctgcactggcggattggtgggggggacaccactgagcatatccagacccacttcgagagcaagacagagctgctgccttcccggcctcacgcaccctgcccaccagcccctcggaagcatgtgacaacagcagagggtacaccagggacaacagaccaggaggggcccccacctgatggacctccagaaaaacggatcacagccactatggatgacatgttgtctactcggtctagcaccttgaccgaggatggagctaagagttcagaggccatcaaggagagcagcaagtttccatttggcattagcccagcacagagccaccggaacatcaagatcctagaggacgaaccccacagtaaggatgagaccccactgtgtacccttctggactggcaggattctcttgccaagcgctgcgtctgtgtgtccaataccattcgaagcctgtcatttgtgccaggcaatgactttgagatgtccaaacacccagggctgctgctcatcctgggcaagctgatcctgctgcaccacaagcacccagaacggaagcaggcaccactaacttatgaaaaggaggaggaacaggaccaaggggtgagctgcaacaaagtggagtggtggtgggactgcttggagatgctccgggaaaacaccttggttacactcgccaacatctcggggcagttggacctatctccataccccgagagcatttgcctgcctgtcctggacggactcctacactgggcagtttgcccttcagctgaagcccaggaccccttttccaccctgggccccaatgccgtcctttccccgcagagactggtcttggaaaccctcagcaaactcagcatccaggacaacaatgtggacctgattctggccacaccccccttcagccgcctggagaagttgtatagcactatggtgcgcttcctcagtgaccgaaagaacccggtgtgccgggagatggctgtggtactgctggccaacctggctcagggggacagcctggcagctcgtgccattgcagtgcagaagggcagtatcggcaacctcctgggcttcctagaggacagccttgccgccacacagttccagcagagccaggccagcctcctccacatgcagaacccaccctttgagccaactagtgtggacatgatgcggcgggctgcccgcgcgctgcttgccttggccaaggtggacgagaaccactcagagtttactctgtacgaatcacggctgttggacatctcggtatcaccgttgatgaactcattggtttcacaagtcatttgtgatgtactgtttttgattggccagtcatgacagccgtgggacacctcccccccccgtgtgtgtgtgcgtgtgtggagaacttagaaactgactgttgccctttatttatgcaaaaccacctcagaatccagtttaccctgtgctgtccagcttctcccttgggaaaaagtctctcctgtttctctctcctccttccacctcccctccctccatcacctcacgcctttctgttccttgtcctcaccttactcccctcaggaccctaccccaccctctttgaaaagacaaagctctgcctacatagaagactttttttattttaaccaaagttactgttgtttacagtgagtttggggaaaaaaaataaaataaaaatggctttcccagtccttgcatcaacgggatgccacatttcataactgtttttaatggtaaaaaaaaaaaaaaaaaa

SEQ ID NO: 109257 - DNA, 546 bp, Homo sapiens
  Payload ID: 1461
  Gene Symbol: ARID1A
  Gene Name: AT rich interactive domain 1A (SWI-like)
  ENST ID: ENST00000524572
  CDS Start-End: 179-546
gactgcccctcatgttgtggggagacctagactgacagagatacccagagcaggctgatctctttgttcaacaaaatagtctctccagttggaggccacatggacagcagctgcagtctgtgatgagatgaggacctcagtgtgatatgtggcatgatatggccatccatccagtccaatggatcagatgggcaagatgagacctcagccatatggcgggactaacccatactcgcagcaacagggacctccgtcaggaccgcagcaaggacatgggtacccagggcagccatacgggtcccagaccccgcagcggtacccgatgaccatgcagggccgggcgcagagtgccatgggcggcctctcttatacacagcagattcctccttatggacaacaaggccccagcgggtatggtcaacagggccagactccatattacaaccagcaaagtcctcaccctcagcagcagcagccaccctactcccagcaaccaccgtcccagacccctcatgcccaaccttcgtatcagcagcagccacagtc

SEQ ID NO: 109258 - DNA, 2583 bp, Homo sapiens
  Payload ID: 1461
  Gene Symbol: ARID1A
  Gene Name: AT rich interactive domain 1A (SWI-like)
  ENST ID: ENST00000532781
  CDS Start-End: 1-566
atggcacacgccagcccccatatggtccctctgcccctgtgccccccatgacaaggccccctccatctaactaccagcccccaccaagcatgcagaatcacattcctcaggtatccagccctgctcccctgccccggccaatggagaaccgcacctctcctagcaagtctccattcctgcactctgggatgaaaatgcagaaggcaggtcccccagtacctgcctcgcacatagcacctgcccctgtgcagccccccatgattcggcgggatatcaccttcccacctggctctgttgaagccacacagcctgtgttgaagcagaggaggcggctcacaatgaaagacattggaaccccggaggcatggcgggtaatgatgtccctcaagtctggtctcctggcagagagcacatgggcattagataccatcaacatcctgctgtatgatgacaacagcatcatgaccttcaacctcagtcagatatcttccatgccagtactttgcttcctttgcctctgggcacgggcccaggattttgacagcaataataatttgtttacatgataaccttaacacaggattgacttcaaaaggaatttgggagacactttgtggtattactcccagggttgctagagctccttgtagaatatttccgacgatgcctgattgagatctttggcattttaaaggagtatgaggtgggtgacccaggacagagaacgctactggatcctgggaggttcagcaaggtgtctagtccagctcccatggagggtggggaagaagaagaagaacttctaggtcctaaactagaagaggaagaagaagaggaagtagttgaaaatgatgaggagatagccttttcaggcaaggacaagccagcttcagagaatagtgaggagaagctgatcagtaagtttgacaagcttccagtaaagatcgtacagaagaatgatccatttgtggtggactgctcagataagcttgggcgtgtgcaggagtttgacagtggcctgctgcactggcggattggtgggggggacaccactgagcatatccagacccacttcgagagcaagacagagctgctgccttcccggcctcacgcaccctgcccaccagcccctcggaagcatgtgacaacagcagagggtacaccagggacaacagaccaggaggggcccccacctgatggacctccagaaaaacggatcacagccactatggatgacatgttgtctactcggtctagcaccttgaccgaggatggagctaagagttcagaggccatcaaggagagcagcaagtttccatttggcattagcccagcacagagccaccggaacatcaagatcctagaggacgaaccccacagtaaggatgagaccccactgtgtacccttctggactggcaggattctcttgccaagcgctgcgtctgtgtgtccaataccattcgaagcctgtcatttgtgccaggcaatgactttgagatgtccaaacacccagggctgctgctcatcctgggcaagctgatcctgctgcaccacaagcacccagaacggaagcaggcaccactaacttatgaaaaggaggaggaacaggaccaaggggtgagctgcaacaaagtggagtggtggtgggactgcttggagatgctccgggaaaacaccttggttacactcgccaacatctcggggcagttggacctatctccataccccgagagcatttgcctgcctgtcctggacggactcctacactgggcagtttgcccttcagctgaagcccaggaccccttttccaccctgggccccaatgccgtcctttccccgcagagactggtcttggaaaccctcagcaaactcagcatccaggacaacaatgtggacctgattctggccacaccccccttcagccgcctggagaagttgtatagcactatggtgcgcttcctcagtgaccgaaagaacccggtgtgccgggagatggctgtggtactgctggccaacctggctcagggggacagcctggcagctcgtgccattgcagtgcagaagggcagtatcggcaacctcctgggcttcctagaggacagccttgccgccacacagttccagcagagccaggccagcctcctccacatgcagaacccaccctttgagccaactagtgtggacatgatgcggcgggctgcccgcgcgctgcttgccttggccaaggtggacgagaaccactcagagtttactctgtacgaatcacggctgttggacatctcggtatcaccgttgatgaactcattggtttcacaagtcatttgtgatgtactgtttttgattggccagtcatgacagccgtgggacacctcccccccccgtgtgtgtgtgcgtgtgtggagaacttagaaactgactgttgccctttatttatgcaaaaccacctcagaatccagtttaccctgtgctgtccagcttctcccttgggaaaaagtctctcctgtttctctctcctccttccacctcccctccctccatcacctcacgcctttctgttccttgtcctcaccttactcccctca

SEQ ID NO: 109259 - DNA, 3804 bp, Homo sapiens
  Payload ID: 1461
  Gene Symbol: ARID1A
  Gene Name: AT rich interactive domain 1A (SWI-like)
  ENST ID: ENST00000615191
  CDS Start-End: 284-3709
tggatctcaagcagtaccacagttacaaagtagtttttagcttacaaggtgttttcacaaataggtggtattttcatttttcaaatgacaaaattagggttctgaggcgggtcagttgacttaaaggttactaggttggtctcattgctctttcaaagtaactgtatttctttatagcatacagactaaaaaaacctgtgtacttgggttatatattcagtggccagaggccatcaaagctcaggttaatgaaatgctctttattttgtagccatccagtccaatggatcagatgggcaagatgagacctcagccatatggcgggactaacccatactcgcagcaacagggacctccgtcaggaccgcagcaaggacatgggtacccagggcagccatacgggtcccagaccccgcagcggtacccgatgaccatgcagggccgggcgcagagtgccatgggcggcctctcttatacacagcagattcctccttatggacaacaaggccccagcgggtatggtcaacagggccagactccatattacaaccagcaaagtcctcaccctcagcagcagcagccaccctactcccagcaaccaccgtcccagacccctcatgcccaaccttcgtatcagcagcagccacagtctcaaccaccacagctccagtcctctcagcctccatactcccagcagccatcccagcctccacatcagcagtccccggctccatacccctcccagcagtcgacgacacagcagcacccccagagccagcccccctactcacagccacaggctcagtctccttaccagcagcagcaacctcagcagccagcaccctcgacgctctcccagcaggctgcgtatcctcagccccagtctcagcagtcccagcaaactgcctattcccagcagcgcttccctccaccgcaggagctatctcaagattcatttgggtctcaggcatcctcagccccctcaatgacctccagtaagggagggcaagaagatatgaacctgagccttcagtcaagaccctccagcttgcctgatctatctggttcaatagatgacctccccatggggacagaaggagctctgagtcctggagtgagcacatcagggatttccagcagccaaggagagcagagtaatccagctcagtctcctttctctcctcatacctcccctcacctgcctggcatccgaggcccttccccgtcccctgttggctctcccgccagtgttgctcagtctcgctcaggaccactctcgcctgctgcagtgccaggcaaccagatgccacctcggccacccagtggccagtcggacagcatcatgcatccttccatgaaccaatcaagcattgcccaagatcgaggttatatgcagaggaacccccagatgccccagtacagttccccccagcccggctcagccttatctccgcgtcagccttccggaggacagatacacacaggcatgggctcctaccagcagaactccatggggagctatggtccccaggggggtcagtatggcccacaaggtggctaccccaggcagccaaactataatgccttgcccaatgccaactaccccagtgcaggcatggctggaggcataaaccccatgggtgccggaggtcaaatgcatggacagcctggcatcccaccttatggcacactccctccagggaggatgagtcacgcctccatgggcaaccggccttatggccctaacatggccaatgccacctcaggttgggtcagggatgtgtccccaccagggggcatgaaccggaaaacccaagaaactgctgtcgccatgcatgttgctgccaactctatccaaaacaggccgccaggctaccccaatatgaatcaagggggcatgatgggaactggacctccttatggacaagggattaatagtatggctggcatgatcaaccctcagggacccccatattccatgggtggaaccatggccaacaattctgcagggatggcagccagcccagagatgatgggccttggggatgtaaagttaactccagccaccaaaatgaacaacaaggcagatgggacacccaagacagaatccaaatccaagaaatccagttcttctactacaaccaatgagaagatcaccaagttgtatgagctgggtggtgagcctgagaggaagatgtgggtggaccgttatctggccttcactgaggagaaggccatgggcatgacaaatctgcctgctgtgggtaggaaacctctggacctctatcgcctctatgtgtctgtgaaggagattggtggattgactcaggtcaacaagaacaaaaaatggcgggaacttgcaaccaacctcaatgtgggcacatcaagcagtgctgccagctccttgaaaaagcagtatatccagtgtctctatgcctttgaatgcaagattgaacggggagaagaccctcccccagacatctttgcagctgctgattccaagaagtcccagcccaagatccagcctccctctcctgcgggatcaggatctatgcaggggccccagactccccagtcaaccagcagttccatggcagaaggaggagacttaaagccaccaactccagcatccacaccacacagtcagatccccccattgccaggcatgagcaggagcaattcagttgggatccaggatgcctttaatgatggaagtgactccacattccagaagcggaattccatgactccaaaccctgggtatcagcccagtatgaatacctctgacatgatggggcgcatgtcctatgagccaaataaggatccttatggcagcatgaggaaagctccagggagtgatcccttcatgtcctcagggcagggccccaacggcgggatgggtgacccctacagtcgtgctgccggccctgggctaggaaatgtggcgatgggaccacgacagcactatccctatggaggtccttatgacagagtgaggacggagcctggaatagggcctgagggaaacatgagcactggggccccacagccgaatctcatgccttccaacccagactcggggatgtattctcctagccgctaccccccgcagcagcagcagcagcagcagcaacgacatgattcctatggcaatcagttctccacccaaggcaccccttctggcagccccttccccagccagcagactacaatgtatcaacagcaacagcagaattacaagcggccaatggatggcacatatggccctcctgccaagcggcacgaaggggagatgtacagcgtgccatacagcactgggcaggggcagcctcagcagcagcagttgcccccagcccagccccagcctgccagccagcaacaagctgcccagccttcccctcagcaagatgtatacaaccagtatggcaatgcctatcctgccactgccacagctgctactgagcgccgaccagcaggcggcccccagaaccaatttccattccagtttggccgagaccgtgtctctgcaccccctggcaccaatgcccagcaaaacatgccaccacaaatgatgggcggccccatacaggcatcagctgaggttgctcagcaaggcaccatgtggcaggggcgtaatgacatgacctataattatgccaacaggcagagcacggctctgccccccagggccccgcctatcatggcgtgaaccgaacagatgaaatgctgcacacagatcagagggccaaccacgaaggctcgtggccttcccatggcacacgccagcccccatatggtccctct

SEQ ID NO: 109260 - DNA, 7971 bp, Homo sapiens
  Payload ID: 1462
  Gene Symbol: ARID1B
  Gene Name: AT rich interactive domain 1B (SWI1-like)
  Uniprot ID: Q8NFD5
  ENST ID: ENST00000350026
  CDS Start-End: 2-6712
catggcccataacgcgggcgccgcggccgccgccggcacccacagcgccaagagcggcggctccgaggcggctctcaaggagggtggaagcgccgccgcgctgtcctcctcctcctcctcctccgcggcggcagcggcggcatcctcttcctcctcgtcgggcccgggctcggccatggagacggggctgctccccaaccacaaactgaaaaccgttggcgaagcccccgccgcgccgccccaccagcagcaccaccaccaccaccatgcccaccaccaccaccaccatgcccaccacctccaccaccaccacgcactacagcagcagctaaaccagttccagcagcagcagcagcagcagcaacagcagcagcagcagcagcagcaacagcaacatcccatttccaacaacaacagcttgggcggcgcgggcggcggcgcgcctcagcccggccccgacatggagcagccgcaacatggaggcgccaaggacagtgctgcgggcggccaggccgaccccccgggcccgccgctgctgagcaagccgggcgacgaggacgacgcgccgcccaagatgggggagccggcgggcggccgctacgagcacccgggcttgggcgccctgggcacgcagcagccgccggtcgccgtgcccgggggcggcggcggcccggcggccgtcccggagtttaataattactatggcagcgctgcccctgcgagcggcggccccggcggccgcgctgggccttgctttgatcaacatggcggacaacaaagccccgggatggggatgatgcactccgcctccgccgccgccgccggggcccccggcagcatggaccccctgcagaactcccacgaagggtaccccaacagccagtgcaaccattatccgggctacagccggcccggcgcgggcggcggcggcggcggcggcggcggaggaggaggaggcagcggaggaggaggaggaggaggaggagcaggagcaggaggagcaggagcgggagctgtggcggcggcggccgcggcggcggcggcagcagcaggaggcggcggcggcggcggctatgggggctcgtccgcggggtacggggtgctgagctccccccggcagcagggcggcggcatgatgatgggccccgggggcggcggggccgcgagcctcagcaaggcggccgccggctcggcggcggggggcttccagcgcttcgccggccagaaccagcacccgtcgggggccaccccgaccctcaatcagctgctcacctcgcccagccccatgatgcggagctacggcggcagctaccccgagtacagcagccccagcgcgccgccgccgccgccgtcgcagccccagtcccaggcggcggcggcgggggcggcggcgggcggccagcaggcggccgcgggcatgggcttgggcaaggacatgggcgcccagtacgccgctgccagcccggcctgggcggccgcgcaacaaaggagtcacccggcgatgagccccggcacccccggaccgaccatgggcagatcccagggcagcccaatggatccaatggtgatgaagagacctcagttgtatggcatgggcagtaaccctcattctcagcctcagcagagcagtccgtacccaggaggttcctatggccctccaggcccacagcggtatccaattggcatccagggtcggactcccggggccatggccggaatgcagtaccctcagcagcagatgccacctcagtatggacagcaaggtgtgagtggttactgccagcagggccaacagccatattacagccagcagccgcagcccccgcacctcccaccccaggcgcagtatctgccgtcccagtcccagcagaggtaccagccgcagcaggacatgtctcaggaaggctatggaactagatctcaacctcctctggcccccggaaaacctaaccatgaagacttgaacttaatacagcaagaaagaccatcaagtttaccagatctgtctggctccattgatgacctccccacgggaacggaagcaactttgagctcagcagtcagtgcatccgggtccacgagcagccaaggggatcagagcaacccggcgcagtcgcctttctccccacatgcgtcccctcatctctccagcatcccggggggcccatctccctctcctgttggctctcctgtaggaagcaaccagtctcgatctggcccaatctctcctgcaagtatcccaggtagtcagatgcctccgcagccacccgggagccagtcagaatccagttcccatcccgccttgagccagtcaccaatgccacaggaaagaggttttatggcaggcacacaaagaaaccctcagatggctcagtatggacctcaacagacaggaccatccatgtcgcctcatccttctcctgggggccagatgcatgctggaatcagtagctttcagcagagtaactcaagtgggacttacggtccacagatgagccagtatggaccacaaggtaactactccagacccccagcgtatagtggggtgcccagtgcaagctacagcggcccagggcccggtatgggtatcagtgccaacaaccagatgcatggacaagggccaagccagccatgtggtgctgtgcccctgggacgaatgccatcagctgggatgcagaacagaccatttcctggaaatatgagcagcatgacccccagttctcctggcatgtctcagcagggagggccaggaatggggccgccaatgccaactgtgaaccgtaaggcacaggaggcagccgcagcagtgatgcaggctgctgcgaactcagcacaaagcaggcaaggcagtttccccggcatgaaccagagtggacttatggcttccagctctccctacagccagcccatgaacaacagctctagcctgatgaacacgcaggcgccgccctacagcatggcgcccgccatggtgaacagctcggcagcatctgtgggtcttgcagatatgatgtctcctggtgaatccaaactgcccctgcctctcaaagcagacggcaaagaagaaggcactccacagcccgagagcaagtcaaagaagtccagctcctccaccactactggggagaagatcacgaaggtgtacgagctggggaatgagccagagagaaagctctgggtcgaccgatacctcaccttcatggaagagagaggctctcctgtctcaagtctgcctgccgtgggcaagaagcccctggacctgttccgactctacgtctgcgtcaaagagatcgggggtttggcccaggttaataaaaacaagaagtggcgtgagctggcaaccaacctaaacgttggcacctcaagcagtgcagcgagctccctgaaaaagcagtatattcagtacctgtttgcctttgagtgcaagatcgaacgtggggaggagcccccgccggaagtcttcagcaccggggacaccaaaaagcagcccaagctccagccgccatctcctgctaactcgggatccttgcaaggcccacagaccccccagtcaactggcagcaattccatggcagaggttccaggtgacctgaagccacctaccccagcctccacccctcacggccagatgactccaatgcaaggtggaagaagcagtacaatcagtgtgcacgacccattctcagatgtgagtgattcatccttcccgaaacggaactccatgactccaaacgccccctaccagcagggcatgagcatgcccgatgtgatgggcaggatgccctatgagcccaacaaggacccctttgggggaatgagaaaagtgcctggaagcagcgagccctttatgacgcaaggacagatgcccaacagcagcatgcaggacatgtacaaccaaagtccctccggagcaatgtctaacctgggcatggggcagcgccagcagtttccctatggagccagttacgaccgaaggcatgaaccttatgggcagcagtatccaggccaaggccctccctcgggacagccgccgtatggagggcaccagcccggcctgtacccacagcagccgaattacaaacgccatatggacggcatgtacgggcccccagccaagcgccacgagggcgacatgtacaacatgcagtacagcagccagcagcaggagatgtacaaccagtatggaggctcctactcgggcccggaccgcaggcccatccagggccagtacccgtatccctacagcagggagaggatgcagggcccggggcagatccagacacacggaatcccgcctcagatgatgggcggcccgctgcagtcgtcctccagtgaggggcctcagcagaatatgtgggcagcacgcaatgatatgccttatccctaccagaacaggcagggccctggcggccctacacaggcgcccccttacccaggcatgaaccgcacagacgatatgatggtacccgatcagaggataaatcatgagagccagtggccttctcacgtcagccagcgtcagccttatatgtcgtcctcagcctccatgcagcccatcacacgcccaccacagccgtcctaccagacgccaccgtcactgccaaatcacatctccagggcgcccagcccagcgtccttccagcgctccctggagaaccgcatgtctccaagcaagtctccttttctgccgtctatgaagatgcagaaggtcatgcccacggtccccacatcccaggtcaccgggccaccaccccaaccacccccaatcagaagggagatcacctttcctcctggctcagtagaagcatcacaaccagtcttgaaacaaaggcgaaagattacctccaaagatatcgttactcctgaggcgtggcgtgtgatgatgtcccttaaatcaggtcttttggctgagagtacgtgggctttggacactattaatattcttctgtatgatgacagcactgttgctactttcaatctctcccagttgtctggatttctcgaacttttagtcgagtactttagaaaatgcctgattgacatttttggaattcttatggaatatgaagtgggagaccccagccaaaaagcacttgatcacaacgcagcaaggaaggatgacagccagtccttggcagacgattctgggaaagaggaggaagatgctgaatgtattgatgacgacgaggaagacgaggaggatgaggaggaagacagcgagaagacagaaagcgatgaaaagagcagcatcgctctgactgccccggacgccgctgcagacccaaaggagaagcccaagcaagccagtaagttcgacaagctgccaataaagatagtcaaaaagaacaacctgtttgttgttgaccgatctgacaagttggggcgtgtgcaggagttcaatagtggccttctgcactggcagctcggcgggggtgacaccaccgagcacattcagactcactttgagagcaagatggaaattcctcctcgcaggcgcccacctccccccttaagctccgcaggtagaaagaaagagcaagaaggcaaaggcgactctgaagagcagcaagagaaaagcatcatagcaaccatcgatgacgtcctctctgctcggccaggggcattgcctgaagacgcaaaccctgggccccagaccgaaagcagtaagtttccctttggtatccagcaagccaaaagtcaccggaacatcaagctgctggaggacgagcccaggagccgagacgagactcctctgtgtaccatcgcgcactggcaggactcgctggctaagcgatgcatctgtgtgtccaatattgtccgtagcttgtcattcgtgcctggcaatgatgccgaaatgtccaaacatccaggcctggtgctgatcctggggaagctgattcttcttcaccacgagcatccagagagaaagcgagcaccgcagacctatgagaaagaggaggatgaggacaagggggtggcctgcagcaaagatgagtggtggtgggactgcctcgaggtcttgagggataacacgttggtcacgttggccaacatttccgggcagctagacttgtctgcttacacggaaagcatctgcttgccaattttggatggcttgctgcactggatggtgtgcccgtctgcagaggcacaagatccctttccaactgtgggacccaactcggtcctgtcgcctcagagacttgtgctggagaccctctgtaaactcagtatccaggacaataatgtggacctgatcttggccactcctccatttagtcgtcaggagaaattctatgctacattagttaggtacgttggggatcgcaaaaacccagtctgtcgagaaatgtccatggcgcttttatcgaaccttgcccaaggggacgcactagcagcaagggccatagctgtgcagaaaggaagcattggaaacttgataagcttcctagaggatggggtcacgatggcccagtaccagcagagccagcacaacctcatgcacatgcagcccccgcccctggaaccacctagcgtagacatgatgtgcagggcggccaaggctttgctagccatggccagagtggacgaaaaccgctcggaattccttttgcacgagggccggttgctggatatctcgatatcagctgtcctgaactctctggttgcatctgtcatctgtgatgtactgtttcagattgggcagttatgacataagtgagaaggcaagcatgtgtgagtgaagattagagggtcacatataactggctgttttctgttcttgtttatccagcgtaggaagaaggaaaagaaaatctttgctcctctgccccattcactatttaccaattgggaattaaagaaataattaatttgaacagttatgaaattaatatttgctgtctgtgtgtataagtacatcctttggggttttttttttctcttttttttaaccaaagttgctgtctagtgcattcaaaggtcactttttgttcttcacagatctttttaatgttctttcccatgttgtattgcatttttgggggaagcaaattgactttaaagaaaaaagttgtggcaaaagatgctaagatgcgaaaatttcaccacactgagtcaaaaaggtgaaaaattatccatttcctatgcgttttactcctcagagaatgaaaaaaactgcatcccatcacccaaagttctgtgcaatagaaatttctacagatacaggtataggggctcaaggaggtatgtcggtcagtagtcaaaactatgaaatgatactggtttctccacaggaatatggttccattaggctgggagcaaaaacaatgttttttaagattgagaatacatacctgacaacgatccggaaactgctcctcaccactcccgtcatgcctgctgtcggcgtttgaccttccacgtgacagttcttcacaattcctttcatcattttttaaatattttttttactgcctatgggctgtgatgtatatagaagttgtacattaaacataccctcatttttttcttttcttttttttttttttttttagtacaaagttttagtttctttttcatgatgtggtaactacgaagtgatggtagatttaaataattttttatttttattttatatattttttcattagggccatatctccaaaaaaagaaagaaaaaatacaaaaaacaaaaacaaaaaaaaaagagggtaatgtacaagtttctgtatgtataaagtcatgctcgatttcaggagagcagctgatcacaatttgcttcatgaatcaaggtgtggaaatggttatatatggattgatttagaaaatggttaccagtacagtcaaaaaagagaaaatgaaaaaaatacaactaaaaggaagaaacacaacttcaaagatttttcagtgatgagaatccacatttgtatttcaagataatgtagtttaaaaaaaaaaaaaagaaaaaaa

SEQ ID NO: 109261 - DNA, 2202 bp, Homo sapiens
  Payload ID: 1462
  Gene Symbol: ARID1B
  Gene Name: AT rich interactive domain 1B (SWI1-like)
  ENST ID: ENST00000319584
  CDS Start-End: 1-2187
cagatgccacctcagtatggacagcaaggtgtgagtggttactgccagcagggccaacagccatattacagccagcagccgcagcccccgcacctcccaccccaggcgcagtatctgccgtcccagtcccagcagaggtaccagccgcagcaggacatgtctcaggaaggctatggaactagatctcaacctcctctggcccccggaaaacctaaccatgaagacttgaacttaatacagcaagaaagaccatcaagtttaccagatctgtctggctccattgatgacctccccacgggaacggaagcaactttgagctcagcagtcagtgcatccgggtccacgagcagccaaggggatcagagcaacccggcgcagtcgcctttctccccacatgcgtcccctcatctctccagcatcccggggggcccatctccctctcctgttggctctcctgtaggaagcaaccagtctcgatctggcccaatctctcctgcaagtatcccaggtagtcagatgcctccgcagccacccgggagccagtcagaatccagttcccatcccgccttgagccagtcaccaatgccacaggaaagaggttttatggcaggcacacaaagaaaccctcagatggctcagtatggacctcaacagacaggaccatccatgtcgcctcatccttctcctgggggccagatgcatgctggaatcagtagctttcagcagagtaactcaagtgggacttacggtccacagatgagccagtatggaccacaaggtaactactccagacccccagcgtatagtggggtgcccagtgcaagctacagcggcccagggcccggtatgggtatcagtgccaacaaccagatgcatggacaagggccaagccagccatgtggtgctgtgcccctgggacgaatgccatcagctgggatgcagaacagaccatttcctggaaatatgagcagcatgacccccagttctcctggcatgtctcagcagggagggccaggaatggggccgccaatgccaactgtgaaccgtaaggcacaggaggcagccgcagcagtgatgcaggctgctgcgaactcagcacaaagcaggcaaggcagtttccccggcatgaaccagagtggacttatggcttccagctctccctacagccagcccatgaacaacagctctagcctgatgaacacgcaggcgccgccctacagcatggcgcccgccatggtgaacagctcggcagcatctgtgggtcttgcagatatgatgtctcctggtgaatccaaactgcccctgcctctcaaagcagacggcaaagaagaaggcactccacagcccgagagcaagtcaaaggatagctacagctctcagggtatttctcagcccccaaccccaggcaacctgccagtcccttccccaatgtcccccagctctgctagcatctcctcatttcatggagatgaaagtgatagcattagcagcccaggctggccaaagactccatcaagccctaagtccagctcctccaccactactggggagaagatcacgaaggtgtacgagctggggaatgagccagagagaaagctctgggtcgaccgatacctcaccttcatggaagagagaggctctcctgtctcaagtctgcctgccgtgggcaagaagcccctggacctgttccgactctacgtctgcgtcaaagagatcgggggtttggcccaggttaataaaaacaagaagtggcgtgagctggcaaccaacctaaacgttggcacctcaagcagtgcagcgagctccctgaaaaagcagtatattcagtacctgtttgcctttgagtgcaagatcgaacgtggggaggagcccccgccggaagtcttcagcaccggggacaccaaaaagcagcccaagctccagccgccatctcctgtagtccagatggagccgagggcctgtgacacaggaggcagtggaaggaaagcctcctggtctcgtccagccccgagagcgcgtgcagggggctccaggcacacacaggcgtctgggggtcgcaggcagaggcaccctggtcttcagaagcctctcgattcactgccacccacacagcaggtggcctctccgattccagtcccatcattagggaaagtgtctggaaacatttttgttgttaaaggaaaataaaattattcccaacta

SEQ ID NO: 109262 - DNA, 10194 bp, Homo sapiens
  Payload ID: 1462
  Gene Symbol: ARID1B
  Gene Name: AT rich interactive domain 1B (SWI1-like)
  Uniprot ID: Q8NFD5
  ENST ID: ENST00000346085
  CDS Start-End: 557-7306
tctcaagccatgctgggcccgataggctcagctagtcgtgtatttacccatatccgggctagagaggaaaagagaaaagtttcatttaaacctgaactaaaaactttcaccatgaaagcacacagcaggagcaggcccagagcgtaaggcgtgcccggcccggcgctccggcggggcctgcggagggggagggggtcgcggcttcccggcgggccgcgtggatgcgcacaggaggggccgcggcctgaaaagtgggggttattgtctccccccgccccccgcccggcctcgccacgccgcggcgatcatggccgcgcgggcagcagcggcggcggcggcggcggcggcgcgggcgcgggcgcgggcaggcagcggcgaacggcgggcgccccccgggccgcggccggcgcccggagcccgggacctggaggcgggggcgcgcggcgcggcggcggcggcggcggcaccgggacccatgctggggggcggcggcgacggcggcggcggcctgaacagtgtgcaccaccaccccctgctcccccgtcacgaactcaacatggcccataacgcgggcgccgcggccgccgccggcacccacagcgccaagagcggcggctccgaggcggctctcaaggagggtggaagcgccgccgcgctgtcctcctcctcctcctcctccgcggcggcagcggcggcatcctcttcctcctcgtcgggcccgggctcggccatggagacggggctgctccccaaccacaaactgaaaaccgttggcgaagcccccgccgcgccgccccaccagcagcaccaccaccaccaccatgcccaccaccaccaccaccatgcccaccacctccaccaccaccacgcactacagcagcagctaaaccagttccagcagcagcagcagcagcagcaacagcagcagcagcagcagcagcaacagcaacatcccatttccaacaacaacagcttgggcggcgcgggcggcggcgcgcctcagcccggccccgacatggagcagccgcaacatggaggcgccaaggacagtgctgcgggcggccaggccgaccccccgggcccgccgctgctgagcaagccgggcgacgaggacgacgcgccgcccaagatgggggagccggcgggcggccgctacgagcacccgggcttgggcgccctgggcacgcagcagccgccggtcgccgtgcccgggggcggcggcggcccggcggccgtcccggagtttaataattactatggcagcgctgcccctgcgagcggcggccccggcggccgcgctgggccttgctttgatcaacatggcggacaacaaagccccgggatggggatgatgcactccgcctccgccgccgccgccggggcccccggcagcatggaccccctgcagaactcccacgaagggtaccccaacagccagtgcaaccattatccgggctacagccggcccggcgcgggcggcggcggcggcggcggcggcggaggaggaggaggcagcggaggaggaggaggaggaggaggagcaggagcaggaggagcaggagcgggagctgtggcggcggcggccgcggcggcggcggcagcagcaggaggcggcggcggcggcggctatgggggctcgtccgcggggtacggggtgctgagctccccccggcagcagggcggcggcatgatgatgggccccgggggcggcggggccgcgagcctcagcaaggcggccgccggctcggcggcggggggcttccagcgcttcgccggccagaaccagcacccgtcgggggccaccccgaccctcaatcagctgctcacctcgcccagccccatgatgcggagctacggcggcagctaccccgagtacagcagccccagcgcgccgccgccgccgccgtcgcagccccagtcccaggcggcggcggcgggggcggcggcgggcggccagcaggcggccgcgggcatgggcttgggcaaggacatgggcgcccagtacgccgctgccagcccggcctgggcggccgcgcaacaaaggagtcacccggcgatgagccccggcacccccggaccgaccatgggcagatcccagggcagcccaatggatccaatggtgatgaagagacctcagttgtatggcatgggcagtaaccctcattctcagcctcagcagagcagtccgtacccaggaggttcctatggccctccaggcccacagcggtatccaattggcatccagggtcggactcccggggccatggccggaatgcagtaccctcagcagcaggactctggagatgccacatggaaagaaacattctggttgatgccacctcagtatggacagcaaggtgtgagtggttactgccagcagggccaacagccatattacagccagcagccgcagcccccgcacctcccaccccaggcgcagtatctgccgtcccagtcccagcagaggtaccagccgcagcaggacatgtctcaggaaggctatggaactagatctcaacctcctctggcccccggaaaacctaaccatgaagacttgaacttaatacagcaagaaagaccatcaagtttaccagatctgtctggctccattgatgacctccccacgggaacggaagcaactttgagctcagcagtcagtgcatccgggtccacgagcagccaaggggatcagagcaacccggcgcagtcgcctttctccccacatgcgtcccctcatctctccagcatcccggggggcccatctccctctcctgttggctctcctgtaggaagcaaccagtctcgatctggcccaatctctcctgcaagtatcccaggtagtcagatgcctccgcagccacccgggagccagtcagaatccagttcccatcccgccttgagccagtcaccaatgccacaggaaagaggttttatggcaggcacacaaagaaaccctcagatggctcagtatggacctcaacagacaggaccatccatgtcgcctcatccttctcctgggggccagatgcatgctggaatcagtagctttcagcagagtaactcaagtgggacttacggtccacagatgagccagtatggaccacaaggtaactactccagacccccagcgtatagtggggtgcccagtgcaagctacagcggcccagggcccggtatgggtatcagtgccaacaaccagatgcatggacaagggccaagccagccatgtggtgctgtgcccctgggacgaatgccatcagctgggatgcagaacagaccatttcctggaaatatgagcagcatgacccccagttctcctggcatgtctcagcagggagggccaggaatggggccgccaatgccaactgtgaaccgtaaggcacaggaggcagccgcagcagtgatgcaggctgctgcgaactcagcacaaagcaggcaaggcagtttccccggcatgaaccagagtggacttatggcttccagctctccctacagccagcccatgaacaacagctctagcctgatgaacacgcaggcgccgccctacagcatggcgcccgccatggtgaacagctcggcagcatctgtgggtcttgcagatatgatgtctcctggtgaatccaaactgcccctgcctctcaaagcagacggcaaagaagaaggcactccacagcccgagagcaagtcaaagaagtccagctcctccaccactactggggagaagatcacgaaggtgtacgagctggggaatgagccagagagaaagctctgggtcgaccgatacctcaccttcatggaagagagaggctctcctgtctcaagtctgcctgccgtgggcaagaagcccctggacctgttccgactctacgtctgcgtcaaagagatcgggggtttggcccaggttaataaaaacaagaagtggcgtgagctggcaaccaacctaaacgttggcacctcaagcagtgcagcgagctccctgaaaaagcagtatattcagtacctgtttgcctttgagtgcaagatcgaacgtggggaggagcccccgccggaagtcttcagcaccggggacaccaaaaagcagcccaagctccagccgccatctcctgctaactcgggatccttgcaaggcccacagaccccccagtcaactggcagcaattccatggcagaggttccaggtgacctgaagccacctaccccagcctccacccctcacggccagatgactccaatgcaaggtggaagaagcagtacaatcagtgtgcacgacccattctcagatgtgagtgattcatccttcccgaaacggaactccatgactccaaacgccccctaccagcagggcatgagcatgcccgatgtgatgggcaggatgccctatgagcccaacaaggacccctttgggggaatgagaaaagtgcctggaagcagcgagccctttatgacgcaaggacagatgcccaacagcagcatgcaggacatgtacaaccaaagtccctccggagcaatgtctaacctgggcatggggcagcgccagcagtttccctatggagccagttacgaccgaaggcatgaaccttatgggcagcagtatccaggccaaggccctccctcgggacagccgccgtatggagggcaccagcccggcctgtacccacagcagccgaattacaaacgccatatggacggcatgtacgggcccccagccaagcgccacgagggcgacatgtacaacatgcagtacagcagccagcagcaggagatgtacaaccagtatggaggctcctactcgggcccggaccgcaggcccatccagggccagtacccgtatccctacagcagggagaggatgcagggcccggggcagatccagacacacggaatcccgcctcagatgatgggcggcccgctgcagtcgtcctccagtgaggggcctcagcagaatatgtgggcagcacgcaatgatatgccttatccctaccagaacaggcagggccctggcggccctacacaggcgcccccttacccaggcatgaaccgcacagacgatatgatggtacccgatcagaggataaatcatgagagccagtggccttctcacgtcagccagcgtcagccttatatgtcgtcctcagcctccatgcagcccatcacacgcccaccacagccgtcctaccagacgccaccgtcactgccaaatcacatctccagggcgcccagcccagcgtccttccagcgctccctggagaaccgcatgtctccaagcaagtctccttttctgccgtctatgaagatgcagaaggtcatgcccacggtccccacatcccaggtcaccgggccaccaccccaaccacccccaatcagaagggagatcacctttcctcctggctcagtagaagcatcacaaccagtcttgaaacaaaggcgaaagattacctccaaagatatcgttactcctgaggcgtggcgtgtgatgatgtcccttaaatcaggtcttttggctgagagtacgtgggctttggacactattaatattcttctgtatgatgacagcactgttgctactttcaatctctcccagttgtctggatttctcgaacttttagtcgagtactttagaaaatgcctgattgacatttttggaattcttatggaatatgaagtgggagaccccagccaaaaagcacttgatcacaacgcagcaaggaaggatgacagccagtccttggcagacgattctgggaaagaggaggaagatgctgaatgtattgatgacgacgaggaagacgaggaggatgaggaggaagacagcgagaagacagaaagcgatgaaaagagcagcatcgctctgactgccccggacgccgctgcagacccaaaggagaagcccaagcaagccagtaagttcgacaagctgccaataaagatagtcaaaaagaacaacctgtttgttgttgaccgatctgacaagttggggcgtgtgcaggagttcaatagtggccttctgcactggcagctcggcgggggtgacaccaccgagcacattcagactcactttgagagcaagatggaaattcctcctcgcaggcgcccacctccccccttaagctccgcaggtagaaagaaagagcaagaaggcaaaggcgactctgaagagcagcaagagaaaagcatcatagcaaccatcgatgacgtcctctctgctcggccaggggcattgcctgaagacgcaaaccctgggccccagaccgaaagcagtaagtttccctttggtatccagcaagccaaaagtcaccggaacatcaagctgctggaggacgagcccaggagccgagacgagactcctctgtgtaccatcgcgcactggcaggactcgctggctaagcgatgcatctgtgtgtccaatattgtccgtagcttgtcattcgtgcctggcaatgatgccgaaatgtccaaacatccaggcctggtgctgatcctggggaagctgattcttcttcaccacgagcatccagagagaaagcgagcaccgcagacctatgagaaagaggaggatgaggacaagggggtggcctgcagcaaagatgagtggtggtgggactgcctcgaggtcttgagggataacacgttggtcacgttggccaacatttccgggcagctagacttgtctgcttacacggaaagcatctgcttgccaattttggatggcttgctgcactggatggtgtgcccgtctgcagaggcacaagatccctttccaactgtgggacccaactcggtcctgtcgcctcagagacttgtgctggagaccctctgtaaactcagtatccaggacaataatgtggacctgatcttggccactcctccatttagtcgtcaggagaaattctatgctacattagttaggtacgttggggatcgcaaaaacccagtctgtcgagaaatgtccatggcgcttttatcgaaccttgcccaaggggacgcactagcagcaagggccatagctgtgcagaaaggaagcattggaaacttgataagcttcctagaggatggggtcacgatggcccagtaccagcagagccagcacaacctcatgcacatgcagcccccgcccctggaaccacctagcgtagacatgatgtgcagggcggccaaggctttgctagccatggccagagtggacgaaaaccgctcggaattccttttgcacgagggccggttgctggatatctcgatatcagctgtcctgaactctctggttgcatctgtcatctgtgatgtactgtttcagattgggcagttatgacataagtgagaaggcaagcatgtgtgagtgaagattagagggtcacatataactggctgttttctgttcttgtttatccagcgtaggaagaaggaaaagaaaatctttgctcctctgccccattcactatttaccaattgggaattaaagaaataattaatttgaacagttatgaaattaatatttgctgtctgtgtgtataagtacatcctttggggttttttttttctcttttttttaaccaaagttgctgtctagtgcattcaaaggtcactttttgttcttcacagatctttttaatgttctttcccatgttgtattgcatttttgggggaagcaaattgactttaaagaaaaaagttgtggcaaaagatgctaagatgcgaaaatttcaccacactgagtcaaaaaggtgaaaaattatccatttcctatgcgttttactcctcagagaatgaaaaaaactgcatcccatcacccaaagttctgtgcaatagaaatttctacagatacaggtataggggctcaaggaggtatgtcggtcagtagtcaaaactatgaaatgatactggtttctccacaggaatatggttccattaggctgggagcaaaaacaatgttttttaagattgagaatacatacctgacaacgatccggaaactgctcctcaccactcccgtcatgcctgctgtcggcgtttgaccttccacgtgacagttcttcacaattcctttcatcattttttaaatattttttttactgcctatgggctgtgatgtatatagaagttgtacattaaacataccctcatttttttcttttcttttttttttttttttttagtacaaagttttagtttctttttcatgatgtggtaactacgaagtgatggtagatttaaataattttttatttttattttatatattttttcattagggccatatctccaaaaaaagaaagaaaaaatacaaaaaacaaaaacaaaaaaaaaagagggtaatgtacaagtttctgtatgtataaagtcatgctcgatttcaggagagcagctgatcacaatttgcttcatgaatcaaggtgtggaaatggttatatatggattgatttagaaaatggttaccagtacagtcaaaaaagagaaaatgaaaaaaatacaactaaaaggaagaaacacaacttcaaagatttttcagtgatgagaatccacatttgtatttcaagataatgtagtttaaaaaaaaaaaaaagaaaaaaacttgatgtaaattcctccttttcctctggcttaatgaatatcatttattcagtataaaatctttatatgttccacatgttaagaataaatgtacattaaatcttgttaagcactgtgatgggtgttcttgaatactgttctagtttccttaaagtggtttcctagtaatcaagttatttacaagaaataggggaatgcagcagtgtattcacattataaaaccctacatttggaagagacctttaggggttacctactttagagtggggagcaacagtttgattttctcaaattacttagctaattagtctttctttgaagcaattaactctaacgacattgaggtatgatcattttcagtatttatgggaggtggctgctgacccacttgaggtgagatctcagaagcttaactggcctgaaaatgtaacattctgccttttactaactccatcttagtttaatcaaagttcaatctattccttgtttcttctgtgtgcctcagagttattttgcatttagtttactccaccgtgtataatatttatactgtgcaatgttaaaaaagaatctgttatattgtatgtggtgtacatagtgcaaagtgatgatttctatttcagggcatattatggttctcatattccttcctacctggtgcacagtagctttttaatactagtcacttctaatttaaactttctcttcctgggtcattgactgttactgtgtaataatcgatttctttgaaactgctgcataattatgctgttagtggacctctacctcttctcttccctctcccaatcacagtatactcagaatccccagcccctcgcatacattgtgtcggttcacattactcacagtaatatatggaagagttagacaagaacatgcagttacagtcattgtgagacgtgactctccagtgtcacgaggaaaaaaatcatcttttctgcaaacagtctctcatctgtcaactcccacattactgagtcaaacagtcttcttacataacaatgcaaccaaatatatgttgaattaaagacccatttataattctgctttaaatacatctgcttgctaagaacagatttcagtgctccaagcttcaaatatggagatttgtaagagggaattcaatattattctaatttctctcttacagagtacaaataaaaggtgtatacaaactccgaacatatccagtattccaattcctttgtcaatcagaagagtaaaataattaacaaaagactgttgttatggtttgcattgtaaccgatacgcagagtctgaccgttgggcaacaagtttttctatcctgatgcgcaacacagtctctagagactaatccaggaagactttagcctcctttccatattctcacccccgaatcaagatttacagaagcccacgaagaatttacagcctgcttgagatcatcttgcctataaactgagttattgctttgtcctaaaaattagtcggtttttttttttctatgaggcttttcagaaatttacaggatgcccagactttacatgtgtaccaaaaaaaaaaaaaagataaaaaataaaggtgcaaagaaagtttagtattttggaatggtgctataaagttgaa

SEQ ID NO: 109263 - DNA, 2887 bp, Homo sapiens
  Payload ID: 1462
  Gene Symbol: ARID1B
  Gene Name: AT rich interactive domain 1B (SWI1-like)
  ENST ID: ENST00000400790
  CDS Start-End: 1-822
gcagcagtgatgcaggctgctgcgaactcagcacaaagcaggcaaggcagtttccccggcatgaaccagagtggacttatggcttccagctctccctacagccagcccatgaacaacagctctagcctgatgaacacgcaggcgccgccctacagcatggcgcccgccatggtgaacagctcggcagcatctgtgggtcttgcagatatgatgtctcctggtgaatccaaactgcccctgcctctcaaagcagacggcaaagaagaaggcactccacagcccgagagcaagtcaaagaagtccagctcctccaccactactggggagaagatcacgaaggtgtacgagctggggaatgagccagagagaaagctctgggtcgaccgatacctcaccttcatggaagagagaggctctcctgtctcaagtctgcctgccgtgggcaagaagcccctggacctgttccgactctacgtctgcgtcaaagagatcgggggtttggcccaggttaataaaaacaagaagtggcgtgagctggcaaccaacctaaacgttggcacctcaagcagtgcagcgagctccctgaaaaagcagtatattcagtacctgtttgcctttgagtgcaagatcgaacgtggggaggagcccccgccggaagtcttcagcaccggggacaccaaaaagcagcccaagctccagccgccatctcctggtaagtggcggcgctgcagtcactggcccaggaaagcccaggcgcctggcctgggaggttccgggaaggtggtttcacagtcaggccaacagggaacttgggacttttgagaggtggggggttcctgtgtcgttttgtttatttaattggacgcccactggcagtgttaagggatgagagaattaaatctgggatatggccatttctggttgacacttggaaggcaccccttcttttgctttaccttaatcaaaacaggctttcgaattctaagccatatacgtttattgcttatacaagtattcaaaaagattccatctacctctacacaaaataaagatcccccagtggccagtttgaatacatgtgcacttctaggaaatgccaccctacaggttcgacagctcgagctcccccgccctctttcggaaatcctcagatttgaactttagtaaaatgaagcctgggcttcgtttctaatgtcccctacccagcaagttctcacttctagggaatttaacaagctgtcgtggtaaggatccacacggccttgttttggaaacaggtggtcttttgcagccttgttctggaagtcaggggtcttaggaatgggtgcagcgctggccaccaacacgctcgcaggccgagccacatcagtgacgcctgctggctcccttccctctcctccccactgacagagaccctcccattcctttcagctcccctgccagccttcgttctaccgtttggctttcagatttgaaatgacaaaatcatatattctgataaatgcaatagtagagaggggaagaaattggcaccttagtgctgggtggtgaccttactccagtagatccgaccattctcttatctgtgtctgcctcgcagtcagcgaccttcagcacattagcctcactgttcctggtccctgtctatgagatgtggctgcacccaccgctcctgtacacagcttgttctgagcgtggctggcagcccatgtttcctgagcacttccagtgtgctgggcccttttctaagtgctatcatttcattttcacatcagccctgtgacattgatactattttaaaatccatgagaaaatgaaggtctcgtggaatctaagtacttgcccaaagccaactagctggggagtagaaggtcttatctggggcatctggtgctacagtatacacgatacccaccagacacctctggctgtattgaaaatacctttgtaatatgtgaaatgtttacacatagaagccagagaaagaggtcatttcatttttaatgatttcctctagctgctgtctggatggcaaagctgatatccaaggttgctaatcaagggatctcacataaatacgttttaggcccaaagtgcacttgtagtgaatatacctagaattacatctgtaggctctaaaaacaagtagaaatcctcgctaacctcatccttaaagattcaaaggctttaccaactcaggtgtcccttaaaaactgggaaatctaattttaaaaatctcacaacattacatccagttcacagagtaaaacaagctgcctgtgaacagctctgaaactatttttccaaaataaaaacccagtggggcgtagggaccaaagtggtgatgtctgtaaagatctaagggtacattttatttgccaggaaagaactcgtgtcactgaatgggctgcacttgtgtatggagaatagctctcccagtgtgcatcagcttcaggacgggggccctgctgaggcgtatagatccttcagaaagtggagggcctgttctcttaacagccagccgttcccttttccccttttttaaactgtcatttttatggcaacattatcattttaactacacaaaagagcttggattgcaaatggactcctggtatacattcttctcagtagtccagatggagccgagggcctgtgacacaggaggcagtggaaggaaagcctcctggtctcgtccagccccgagagcgcgtgcagggggctccaggcacacacaggcgtctgggggtcgcaggcagaggcaccctggtcttcagaagcctctcgattcactgccacccacacagcaggtggcctctccgattccagtcccatcattagggaaagtgtctggaaacatttttgttgttaaaggaaaataaaatta

SEQ ID NO: 109264 - DNA, 6653 bp, Homo sapiens
  Payload ID: 1462
  Gene Symbol: ARID1B
  Gene Name: AT rich interactive domain 1B (SWI1-like)
  ENST ID: ENST00000414678
  CDS Start-End: 1-5277
agccccggcacccccggaccgaccatgggcagatcccagggcagcccaatggatccaatggtgatgaagagacctcagttgtatggcatgggcagtaaccctcattctcagcctcagcagagcagtccgtacccaggaggttcctatggccctccaggcccacagcggtatccaattggcatccagggtcggactcccggggccatggccggaatgcagtaccctcagcagcagatgccacctcagtatggacagcaaggtgtgagtggttactgccagcagggccaacagccatattacagccagcagccgcagcccccgcacctcccaccccaggcgcagtatctgccgtcccagtcccagcagaggtaccagccgcagcaggacatgtctcaggaaggctatggaactagatctcaacctcctctggcccccggaaaacctaaccatgaagacttgaacttaatacagcaagaaagaccatcaagtttaccagatctgtctggctccattgatgacctccccacgggaacggaagcaactttgagctcagcagtcagtgcatccgggtccacgagcagccaaggggatcagagcaacccggcgcagtcgcctttctccccacatgcgtcccctcatctctccagcatcccggggggcccatctccctctcctgttggctctcctgtaggaagcaaccagtctcgatctggcccaatctctcctgcaagtatcccaggttttatggcaggcacacaaagaaaccctcagatggctcagtatggacctcaacagacaggaccatccatgtcgcctcatccttctcctgggggccagatgcatgctggaatcagtagctttcagcagagtaactcaagtgggacttacggtccacagatgagccagtatggaccacaaggtaactactccagacccccagcgtatagtggggtgcccagtgcaagctacagcggcccagggcccggtatgggtatcagtgccaacaaccagatgcatggacaagggccaagccagccatgtggtgctgtgcccctgggacgaatgccatcagctgggatgcagaacagaccatttcctggaaatatgagcagcatgacccccagttctcctggcatgtctcagcagggagggccaggaatggggccgccaatgccaactgtgaaccgtaaggcacaggaggcagccgcagcagtgatgcaggctgctgcgaactcagcacaaagcaggcaaggcagtttccccggcatgaaccagagtggacttatggcttccagctctccctacagccagcccatgaacaacagctctagcctgatgaacacgcaggcgccgccctacagcatggcgcccgccatggtgaacagctcggcagcatctgtgggtcttgcagatatgatgtctcctggtgaatccaaactgcccctgcctctcaaagcagacggcaaagaagaaggcactccacagcccgagagcaagtcaaaggatagctacagctctcagggtatttctcagcccccaaccccaggcaacctgccagtcccttccccaatgtcccccagctctgctagcatctcctcatttcatggagatgaaagtgatagcattagcagcccaggctggccaaagactccatcaagccctaagtccagctcctccaccactactggggagaagatcacgaaggtgtacgagctggggaatgagccagagagaaagctctgggtcgaccgatacctcaccttcatggaagagagaggctctcctgtctcaagtctgcctgccgtgggcaagaagcccctggacctgttccgactctacgtctgcgtcaaagagatcgggggtttggcccaggttaataaaaacaagaagtggcgtgagctggcaaccaacctaaacgttggcacctcaagcagtgcagcgagctccctgaaaaagcagtatattcagtacctgtttgcctttgagtgcaagatcgaacgtggggaggagcccccgccggaagtcttcagcaccggggacaccaaaaagcagcccaagctccagccgccatctcctgctaactcgggatccttgcaaggcccacagaccccccagtcaactggcagcaattccatggcagaggttccaggtgacctgaagccacctaccccagcctccacccctcacggccagatgactccaatgcaaggtggaagaagcagtacaatcagtgtgcacgacccattctcagatgtgagtgattcatccttcccgaaacggaactccatgactccaaacgccccctaccagcagggcatgagcatgcccgatgtgatgggcaggatgccctatgagcccaacaaggacccctttgggggaatgagaaaagtgcctggaagcagcgagccctttatgacgcaaggacagatgcccaacagcagcatgcaggacatgtacaaccaaagtccctccggagcaatgtctaacctgggcatggggcagcgccagcagtttccctatggagccagttacgaccgaaggcatgaaccttatgggcagcagtatccaggccaaggccctccctcgggacagccgccgtatggagggcaccagcccggcctgtacccacagcagccgaattacaaacgccatatggacggcatgtacgggcccccagccaagcgccacgagggcgacatgtacaacatgcagtacagcagccagcagcaggagatgtacaaccagtatggaggctcctactcgggcccggaccgcaggcccatccagggccagtacccgtatccctacagcagggagaggatgcagggcccggggcagatccagacacacggaatcccgcctcagatgatgggcggcccgctgcagtcgtcctccagtgaggggcctcagcagaatatgtgggcagcacgcaatgatatgccttatccctaccagaacaggcagggccctggcggccctacacaggcgcccccttacccaggcatgaaccgcacagacgatatgatggtacccgatcagaggataaatcatgagagccagtggccttctcacgtcagccagcgtcagccttatatgtcgtcctcagcctccatgcagcccatcacacgcccaccacagccgtcctaccagacgccaccgtcactgccaaatcacatctccagggcgcccagcccagcgtccttccagcgctccctggagaaccgcatgtctccaagcaagtctccttttctgccgtctatgaagatgcagaaggtcatgcccacggtccccacatcccaggtcaccgggccaccaccccaaccacccccaatcagaagggagatcacctttcctcctggctcagtagaagcatcacaaccagtcttgaaacaaaggcgaaagattacctccaaagatatcgttactcctgaggcgtggcgtgtgatgatgtcccttaaatcaggtcttttggctgagagtacgtgggctttggacactattaatattcttctgtatgatgacagcactgttgctactttcaatctctcccagttgtctggatttctcgaacttttagtcgagtactttagaaaatgcctgattgacatttttggaattcttatggaatatgaagtgggagaccccagccaaaaagcacttgatcacaacgcagcaaggaaggatgacagccagtccttggcagacgattctgggaaagaggaggaagatgctgaatgtattgatgacgacgaggaagacgaggaggatgaggaggaagacagcgagaagacagaaagcgatgaaaagagcagcatcgctctgactgccccggacgccgctgcagacccaaaggagaagcccaagcaagccagtaagttcgacaagctgccaataaagatagtcaaaaagaacaacctgtttgttgttgaccgatctgacaagttggggcgtgtgcaggagttcaatagtggccttctgcactggcagctcggcgggggtgacaccaccgagcacattcagactcactttgagagcaagatggaaattcctcctcgcaggcgcccacctccccccttaagctccgcaggtagaaagaaagagcaagaaggcaaaggcgactctgaagagcagcaagagaaaagcatcatagcaaccatcgatgacgtcctctctgctcggccaggggcattgcctgaagacgcaaaccctgggccccagaccgaaagcagtaagtttccctttggtatccagcaagccaaaagtcaccggaacatcaagctgctggaggacgagcccaggagccgagacgagactcctctgtgtaccatcgcgcactggcaggactcgctggctaagcgatgcatctgtgtgtccaatattgtccgtagcttgtcattcgtgcctggcaatgatgccgaaatgtccaaacatccaggcctggtgctgatcctggggaagctgattcttcttcaccacgagcatccagagagaaagcgagcaccgcagacctatgagaaagaggaggatgaggacaagggggtggcctgcagcaaagatgagtggtggtgggactgcctcgaggtcttgagggataacacgttggtcacgttggccaacatttccgggcagctagacttgtctgcttacacggaaagcatctgcttgccaattttggatggcttgctgcactggatggtgtgcccgtctgcagaggcacaagatccctttccaactgtgggacccaactcggtcctgtcgcctcagagacttgtgctggagaccctctgtaaactcagtatccaggacaataatgtggacctgatcttggccactcctccatttagtcgtcaggagaaattctatgctacattagttaggtacgttggggatcgcaaaaacccagtctgtcgagaaatgtccatggcgcttttatcgaaccttgcccaaggggacgcactagcagcaagggccatagctgtgcagaaaggaagcattggaaacttgataagcttcctagaggatggggtcacgatggcccagtaccagcagagccagcacaacctcatgcacatgcagcccccgcccctggaaccacctagcgtagacatgatgtgcagggcggccaaggctttgctagccatggccagagtggacgaaaaccgctcggaattccttttgcacgagggccggttgctggatatctcgatatcagctgtcctgaactctctggttgcatctgtcatctgtgatgtactgtttcagattgggcagttatgacataagtgagaaggcaagcatgtgtgagtgaagattagagggtcacatataactggctgttttctgttcttgtttatccagcgtaggaagaaggaaaagaaaatctttgctcctctgccccattcactatttaccaattgggaattaaagaaataattaatttgaacagttatgaaattaatatttgctgtctgtgtgtataagtacatcctttggggttttttttttctcttttttttaaccaaagttgctgtctagtgcattcaaaggtcactttttgttcttcacagatctttttaatgttctttcccatgttgtattgcatttttgggggaagcaaattgactttaaagaaaaaagttgtggcaaaagatgctaagatgcgaaaatttcaccacactgagtcaaaaaggtgaaaaattatccatttcctatgcgttttactcctcagagaatgaaaaaaactgcatcccatcacccaaagttctgtgcaatagaaatttctacagatacaggtataggggctcaaggaggtatgtcggtcagtagtcaaaactatgaaatgatactggtttctccacaggaatatggttccattaggctgggagcaaaaacaatgttttttaagattgagaatacatacctgacaacgatccggaaactgctcctcaccactcccgtcatgcctgctgtcggcgtttgaccttccacgtgacagttcttcacaattcctttcatcattttttaaatattttttttactgcctatgggctgtgatgtatatagaagttgtacattaaacataccctcatttttttcttttcttttttttttttttttttagtacaaagttttagtttctttttcatgatgtggtaactacgaagtgatggtagatttaaataattttttatttttattttatatattttttcattagggccatatctccaaaaaaagaaagaaaaaatacaaaaaacaaaaacaaaaaaaaaagagggtaatgtacaagtttctgtatgtataaagtcatgctcgatttcaggagagcagctgatcacaatttgcttcatgaatcaaggtgtggaaatggttatatatggattgatttagaaaatggttaccagtacagtcaaaaaagagaaaatgaaaaaaatacaactaaaaggaagaaacacaacttcaaagatttttcagtgatgagaatccacatttgtatttcaagataatgtagtttaaaaaaaaaaaaaagaaaaaaacttgatgtaaattcctccttttcctctggcttaatgaatatcatttattcagtataaaatctttatatgttccacatgttaagaataaatgtacattaaatcttgttaagcactgtg

SEQ ID NO: 109265 - DNA, 916 bp, Homo sapiens
  Payload ID: 1462
  Gene Symbol: ARID1B
  Gene Name: AT rich interactive domain 1B (SWI1-like)
  ENST ID: ENST00000478761
  CDS Start-End: 1-916
cagaccatttcctggaaatatgagcagcatgacccccagttctcctggcatgtctcagcagggagggccaggaatggggccgccaatgccaactgtgaaccgtaaggcacaggaggcagccgcagcagtgatgcaggctgctgcgaactcagcacaaagcaggccaccatacattaggtcgcctgcttatcccagccagtctggggctggcggacgccccatgttttcttcccagcaccccaactatggcaactctcaggctcccatggtgcaccagcctgaccagtacgggcaaggcagtttccccggcatgaaccagagtggacttatggcttccagctctccctacagccagcccatgaacaacagctctagcctgatgaacacgcaggcgccgccctacagcatggcgcccgccatggtgaacagctcggcagcatctgtgggtcttgcagatatgatgtctcctggtgaatccaaactgcccctgcctctcaaagcagacggcaaagaagaaggcactccacagcccgagagcaagtcaaaggatagctacagctctcagggtatttctcagcccccaaccccaggcaacctgccagtcccttccccaatgtcccccagctctgctagcatctcctcatttcatggagatgaaagtgatagcattagcagcccaggctggccaaagactccatcaagccctaagtccagctcctccaccactactggggagaagatcacgaaggtgtacgagctggggaatgagccagagagaaagctctgggtcgaccgatacctcaccttcatggaagagagaggctctcctgtctcaagtctgcctgccgtgggcaagaagcccctggacctgttccgactctacgtctgcgtcaaagagatcgggggtttggcccag

SEQ ID NO: 109266 - DNA, 8642 bp, Homo sapiens
  Payload ID: 1463
  Gene Symbol: ARID2
  Gene Name: AT rich interactive domain 2 (ARID, RFX-like)
  Uniprot ID: Q68CP9
  ENST ID: ENST00000334344
  CDS Start-End: 173-5680
gcgccgccgccgccgccgccgccgccgccgccgccgccaccgccggcccatgactgagccccgccgccgccggccgaggaatgggctccgggctctggtaggaagcgctgggagcggggggcgcttttaaaacaccgatctgggttttttaaaaacctcctttgaaaaaataatggcaaactcgacggggaaggcgcctccggacgagcggagaaagggactcgctttcctggacgagctgcggcagttccaccacagcagagggtcgccttttaaaaaaatccctgcggtgggtgggaaggagctggatcttcacggtctctacaccagagtcactactttaggcggattcgcgaaggtttctgagaagaatcagtggggagaaattgttgaagagttcaactttcccagaagttgttctaacgctgcctttgctttaaaacagtattacttgcgttacctagaaaagtacgagaaagttcatcattttggggaggatgatgatgaggtaccaccaggcaatccaaagccacagcttcctattggtgcaattccatcttcctacaattaccagcaacacagtgtgtcggattatctgcgtcaaagttatgggctgtccatggactttaattcgccaaatgattataataaattggtgctttcactgttatctggactcccaaatgaagtggactttgctattaacgtatgcactctcctatcaaatgaaagcaagcacgtcatgcaacttgaaaaagatcctaaaatcatcactttactacttgctaatgccggggtgtttgacgacactttaggatccttttccactgtatttggagaagaatggaaagagaagactgatagagacttcgttaagttttggaaagacatcgttgatgataatgaagttcgtgacctcatttctgacagaaacaagtctcatgaaggtacatcaggagaatggatttgggagtctttatttcatccacctcgaaagctgggcattaacgatattgaaggacagcgggtacttcagattgcagtgattttgagaaatctttcctttgaggagggcaatgttaagctcttggcagctaatcgtacctgtcttcgtttcctattactttctgcacatagtcattttatttctttaaggcaattaggccttgacacattaggaaatattgcagctgagcttttactggaccctgttgatttcaaaactactcatctgatgtttcatactgttacaaaatgtctaatgtcaagggatagatttttaaagatgagaggcatggaaattttgggaaatctttgcaaagcagaagataatggtgttttaatttgtgaatatgtggatcaggattcctacagagagatcatttgtcatctcactttacctgatgtgctgcttgtaatctcaacactcgaggtgctatacatgctcacggaaatgggagatgttgcttgcacaaaaattgcaaaagtagaaaagagcatagacatgttagtgtgtctggtttctatggatattcagatgtttggccctgatgcactagctgcggtaaaactcattgaacacccaagttccagtcatcaaatgttatctgaaattaggccacaagctatagagcaagtccaaacccagactcatgtagcatctgccccagcttccagagcagttgtagcgcagcatgttgctccacctccaggaatagtggaaatagatagtgagaagtttgcttgtcagtggctaaatgctcattttgaagtaaatccagattgttctgtttctcgagcagaaatgtattctgaatacctctcgacttgcagtaaattagctcgtggtggaatcctaacatcaactggattttataaatgtcttagaacggtctttccaaatcatacagtgaagagagtggaggattccagtagcaatgggcaggcacatattcatgtggtaggagtaaaacggagggctataccacttcccattcagatgtactatcagcagcaaccagtttctacttctgttgttcgtgttgattctgttcctgatgtatctcctgctccttcacctgcaggaatccctcatggatcacaaaccataggaaaccattttcagaggactcctgttgccaaccaatcttcaaatctgactgcaacacaaatgtcttttcctgtacaaggtgttcatactgtggcacaaactgtttcaagaattccacaaaatccttcacctcatacccaccagcaacaaaatgctccagtgactgtcattcaaagtaaagctccaattccttgtgaagttgttaaggctacagttatccagaattccataccccagacaggagttcctgttagtattgctgttggaggaggacctccacagagttctgttgttcagaatcatagtacagggccacaacctgttacagttgtgaattctcagacattgcttcaccatccatctgtaattccacagcagtctccattacacacagtggtaccaggacagatcccttcaggcactcctgttacagtaattcaacaagctgtcccacagagtcatatgtttggcagagtacagaacataccagcatgtacttctacagtttcacagggtcaacagttaatcaccacatcaccccaacctgtgcaaacttcatctcaacagacatcagctggtagccagtcacaagatactgttatcatagcacccccacagtatgtaacaacttctgcatccaatattgtctcagcaacttcagtacagaattttcaggtagctacaggacaaatggttactattgctggtgtcccaagtccacaagcctcaagggtagggtttcagaacattgcaccaaaacctctcccttctcagcaagtttcatctacagtggtacagcagcctattcaacaaccacagcagccaacccaacaaagcgtagtgattgtaagccagccagctcaacaaggtcaaacttatgcaccagccattcaccaaattgttcttgctaatccagcagctcttccagctggtcagacagttcagctaactggacaacctaacataactccatcttcttcaccatcacctgtcccagctactaataaccaagtccctactgccatgtcgtcgtcctctacccctcaatcacagggaccacctcctactgtcagtcaaatgttatctgtgaaaaggcagcaacagcagcaacattcaccagcacccccaccacagcaggtacaagtacaagttcagcagccccaacaagtacagatgcaagttcaacctcaacagtcgaatgcaggagttggtcagcctgcctctggtgagtcgagtctgattaaacagcttctgcttccgaaacgtggtccttcaacaccaggtggtaagcttattctcccagctccacagattcctccccctaataatgcaagagctcctagccctcaggtggtctatcaggtggccagtaaccaagccgcaggttttggagtgcaggggcaaactccagctcagcagctattggttgggcagcaaaatgttcagttggtcccaagtgcaatgccaccctcagggggagtacaaactgtgcccatttcgaacttacaaatattgccaggtccactgatctcaaatagcccagcaaccattttccaagggacttctggcaaccaggtaaccataacagttgtgccaaatacgagttttgcacctgcaactgtgagtcagggaaatgcaactcagctcattgctccagcaggaattaccatgagcggaacgcagacaggagttggacttccagtacaaacgcttccagccactcaagcatctcctgctggacaatcatcatgtactactgctactcccccattcaaaggtgataaaataatttgccaaaaggaggaggaagcaaaggaagcaacaggtttacatgttcatgaacgtaaaattgaagtcatggagaacccgtcctgccgacgaggagccacaaacaccagcaatggggatacaaaggaaaatgaaatgcatgtgggaagtcttttaaatgggagaaagtacagtgactcaagtctacctccttcaaactcagggaaaattcaaagtgagactaatcagtgctcactaatcagtaatgggccatcattggaattaggtgagaatggagcatctgggaaacagaactcagaacaaatagacatgcaagatatcaaaagtgatttgagaaaaccgctagttaatggaatctgtgattttgataaaggagatggttctcatttaagcaaaaacattccaaatcataaaacttccaatcatgtaggaaatggtgagatatctccaatggaaccacaagggactttagatatcactcagcaagatactgccaaaggtgatcaactagaaagaatttctaatggacctgtattaactttgggtggttcatctgtgagcagtatacaggaggcttcaaatgcggcaacacagcaatttagtggtactgatttgcttaatggacctctagcttcaagtttgaattcagatgtgcctcagcaacgcccaagtgtagttgtctcaccacattctacaacctctgttatacagggacatcaaatcatagcagttcccgactcaggatcaaaagtatcccattctcctgccctatcatctgacgttcggtctacaaatggcacagcagaatgcaaaactgtaaagaggccagcagaggatactgatagggaaacagtcgcaggaattccaaataaagtaggagttagaattgttacaatcagtgaccccaacaatgctggctgcagcgcaacaatggttgctgtgccagcaggagcagatccaagcactgtagctaaagtagcaatagaaagtgctgttcagcaaaagcaacagcatccaccaacatatgtacagaatgtggtcccgcagaacactcctatgccaccttcaccagctgtacaagtgcagggccagcctaacagttctcagccttctccattcagtggatccagtcagcctggagatccaatgagaaaacctggacagaacttcatgtgtctgtggcagtcttgtaaaaagtggtttcagacaccctcacaggttttctaccatgcagcaactgaacatggaggaaaagatgtatatccagggcagtgtctttgggaaggttgtgagccttttcagcgacagcggttttcttttattacccacttgcaggataagcactgttcaaaggatgccctacttgcaggattaaaacaagatgaaccaggacaagcaggaagtcagaagtcttctaccaagcagccaactgtagggggcacaagctcaactcctagagcacaaaaggccattgtgaatcatcccagtgctgcacttatggctctgaggagaggatcaagaaaccttgtctttcgagattttacagatgaaaaagagggaccaataactaaacacatccgactaacagctgccttaatattaaaaaatattggtaaatattcagaatgtggtcgcagattgttaaagagacatgaaaataacttatcagtgctagccattagtaacatggaagcttcctccacccttgccaaatgcctttatgaacttaattttacagttcagagtaaggaacaagaaaaagactcagaaatgctgcagtgaaaaataattccacttacacagtgggggactcaaagtcagccacatttcacatactgttactgaagaaagcaccaagtcttaatggaacaaagaccatagaatgaattattttatctcctcccatgatgctgagaggaagcttcgtattctgatctctgagtgaatccctttgttctctgtttaaaaaaatctaaaaagaaaaaggaaaaaaaaaaaagaactgctgtgggattgtcaaccagcttatctgcaggatgtttcagatctgataaatcctgatggaaactggtatgatcagaattcagtaccatccacattggaatatacatggaatattgtaaaacctacatgagcagatgaaatagaagcattaaatatttttatctatatccaaaaaggagcacatttttatatttacaaaaccgtttaagctggtttgaataatttaaaaaagtttcagcacacctatacccccgatctcagagggggccaccaatatctagctatggatcgtgtgttttgtttagaaatcagtagcttggttttcttacttgagccaatatattttcacttatttattatcataaaaatttaccagtctgaatagatcttgtaaatatttgtgaatagaatgaatacctttcatgccactgcagccactggaaatacattctgtggtgtcctagaagcattattggtaggttctaaagttttctagactttcctgtcaattgtaagtaattgtgatatattctatgcagtggatgaatgttctttaaatttgtgtaaatacttctgcaaaggtactgatgctgtaaagtcaaaacagttttgtggaactgtgatttttttttcttttttctttttttttttctttttttttttgtattatacaccttgtagaactcattttgctggctgaaagagtatggaataatatatctcatgtcattttttagaagaaaaactatttgaaggtattttttggttttccttaacatgtatccactgtaaacgtttgtcgtgtacaagctcagagcttggacagaattttttgtatttgtaaattggtttaaatacatggaattttatacaggttttctcctgtgttatatatgcattatgtgcaggtatgatattttcttcactactttttctatcttaatatagtgtggaattttattgtattattcttccattcttaatactgtaccacattcctgctcagaaactgctcacttccttaaattgtcttttttcccccagcgtgaaatgtatccatttataactgcctattgcctgttctattagcatccaaaaatgtggaaggcctcccaaccaccatttctgctgtgtccttaggatgtgcagtaaaaaatatagacctaacagtttatgttatagaatggctttatttactttggtgactgtttatagtttttaaataaaagactgaacattttcttgagtccttcatttctgagtatgcttaagacatcttaaaaatatagagagaattctaaattcagctgaaggcaaggtataacggtcacctacctatttgattatatgttgattgataacatattaaatagagaacaaataagagaggtcctttacatgacaaatttgcatgaaataagcagattaaccaagtatttatttttcatcttgttataatgcagagcaaatgtagagaacagcaaatgattgatgcagttaaagctcaatatgcctttttttactggatactgtacatttggctaaaagcttttattgtttgatgttgtgtttcttgactgtttattcagaatcacagtgtatccaaatcttcagcttgaatttggaggcagattcttagagtgaaaaagcctcagtttccatattaaaaatgttttaaatattttgattgaattagtaccaatgtaaaatctagtttcttcctgaaggaggatccctggcgctgtcctgccatgtctcaaaggaatgtttgagaaacttcatctaatattagttataaggttgtggaatttatgcttggcccaccttccaagactggcactgcccaacagacaccgctgaaatcatgtgggtatccctaggatggccttcagagccctcaaacttacaagcacctggtagttgacatcatatggggaattttctattcaccgtacttatccaaaaatctcttttaaaaagtaaatttgtgcaacaacgtttatttgaaagataatgtcttctcaaaatcagaaactgcagtggtaattaaattaatagaaaagagaacaaactgcaggtttagaaaaatggttttcatattcaccattcttccacctcattgaattgcatgctgtagttctagcttttctgctataatatgtaaatatgactgtagccttttaagcttcagtctcagcagagaatttcctaaatgcgtttgacctaatgaaactgatcatggcttcccacttaggtttttcttcttatagctttatagaactatataataatatggacttgctgtgtaatggaattaaagtgcttttgcacaataagttctgcaaaaccctctcattcatgaaaaggtgctccttgctagacagaaacttgctgatttacagtattgttatttttgtctaaagttctgtaaatacatgctttaatgttatctttgagaaatctatgtaaataatatagtctacaacatagagactgtataattctgtgttatatatgtgcctagtgctctgttggcactcaataaattttaagtaacaaaattgataatcatatagcgaaggcatatttttcttccaagctcaagtcaggattgtgactatatattaatgagactcagtaatccaacccacacctgagaactcgtctcattactttatagtcatgtcatgtatgtttttttaaccatgaaatgacaataaaatgatttttaaaatgagaa

SEQ ID NO: 109267 - DNA, 4356 bp, Homo sapiens
  Payload ID: 1463
  Gene Symbol: ARID2
  Gene Name: AT rich interactive domain 2 (ARID, RFX-like)
  ENST ID: ENST00000457135
  CDS Start-End: 6-1211
ctccaatggaaccacaagggactttagatatcactcagcaagatactgccaaaggtgatcaactagaaagaatttctaatggacctgtattaactttgggtggttcatctgtgagcagtatacaggaggcttcaaatgcggcaacacagcaatttagtggtactgatttgcttaatggacctctagcttcaagtttgaattcagatgtgcctcagcaacgcccaagtgtagttgtctcaccacattctacaacctctgttatacagggacatcaaatcatagcagttcccgactcaggatcaaaagtatcccattctcctgccctatcatctgacgttcggtctacaaatggcacagcagaatgcaaaactgtaaagaggccagcagaggatactgatagggaaacagtcgcaggaattccaaataaagtaggagttagaattgttacaatcagtgaccccaacaatgctggctgcagcgcaacaatggttgctgtgccagcaggagcagatccaagcactgtagctaaagtagcaatagaaagtgctgttcagcaaaagcaacagcatccaccaacatatgtacagaatgtggtcccgcagaacactcctatgccaccttcaccagctgtacaagtgcagggccagcctaacagttctcagccttctccattcagtggatccagtcagcctggagatccaatgagaaaacctggacagaacttcatgtgtctgtggcagtcttgtaaaaagtggtttcagacaccctcacaggttttctaccatgcagcaactgaacatggaggaaaagatgtatatccagggcagtgtctttgggaaggttgtgagccttttcagcgacagcggttttcttttattacccacttgcaggataagcactgttcaaaggatgccctacttgcaggattaaaacaagatgaaccaggacaagcaggaagtcagaagtcttctaccaagcagccaactgtagggggcacaagctcaactcctagagcacaaaaggccattgtgaatcatcccagtgctgcacttatggctctgaggagaggatcaagaaaccttgtctttcgagattttacagatgaaaaagagggaccaataactaaacacatccgactaacagctgccttaatattaaaaaatattggtaaatattcagaatgtggtcgcagaaacatgaatgaagattgaaaaagaattttgctgtgcagccttccatatttagaaagattgttaaagagacatgaaaataacttatcagtgctagccattagtaacatggaagcttcctccacccttgccaaatgcctttatgaacttaattttacagttcagagtaaggaacaagaaaaagactcagaaatgctgcagtgaaaaataattccacttacacagtgggggactcaaagtcagccacatttcacatactgttactgaagaaagcaccaagtcttaatggaacaaagaccatagaatgaattattttatctcctcccatgatgctgagaggaagcttcgtattctgatctctgagtgaatccctttgttctctgtttaaaaaaatctaaaaagaaaaaggaaaaaaaaaaaagaactgctgtgggattgtcaaccagcttatctgcaggatgtttcagatctgataaatcctgatggaaactggtatgatcagaattcagtaccatccacattggaatatacatggaatattgtaaaacctacatgagcagatgaaatagaagcattaaatatttttatctatatccaaaaaggagcacatttttatatttacaaaaccgtttaagctggtttgaataatttaaaaaagtttcagcacacctatacccccgatctcagagggggccaccaatatctagctatggatcgtgtgttttgtttagaaatcagtagcttggttttcttacttgagccaatatattttcacttatttattatcataaaaatttaccagtctgaatagatcttgtaaatatttgtgaatagaatgaatacctttcatgccactgcagccactggaaatacattctgtggtgtcctagaagcattattggtaggttctaaagttttctagactttcctgtcaattgtaagtaattgtgatatattctatgcagtggatgaatgttctttaaatttgtgtaaatacttctgcaaaggtactgatgctgtaaagtcaaaacagttttgtggaactgtgatttttttttcttttttctttttttttttctttttttttttgtattatacaccttgtagaactcattttgctggctgaaagagtatggaataatatatctcatgtcattttttagaagaaaaactatttgaaggtattttttggttttccttaacatgtatccactgtaaacgtttgtcgtgtacaagctcagagcttggacagaattttttgtatttgtaaattggtttaaatacatggaattttatacaggttttctcctgtgttatatatgcattatgtgcaggtatgatattttcttcactactttttctatcttaatatagtgtggaattttattgtattattcttccattcttaatactgtaccacattcctgctcagaaactgctcacttccttaaattgtcttttttcccccagcgtgaaatgtatccatttataactgcctattgcctgttctattagcatccaaaaatgtggaaggcctcccaaccaccatttctgctgtgtccttaggatgtgcagtaaaaaatatagacctaacagtttatgttatagaatggctttatttactttggtgactgtttatagtttttaaataaaagactgaacattttcttgagtccttcatttctgagtatgcttaagacatcttaaaaatatagagagaattctaaattcagctgaaggcaaggtataacggtcacctacctatttgattatatgttgattgataacatattaaatagagaacaaataagagaggtcctttacatgacaaatttgcatgaaataagcagattaaccaagtatttatttttcatcttgttataatgcagagcaaatgtagagaacagcaaatgattgatgcagttaaagctcaatatgcctttttttactggatactgtacatttggctaaaagcttttattgtttgatgttgtgtttcttgactgtttattcagaatcacagtgtatccaaatcttcagcttgaatttggaggcagattcttagagtgaaaaagcctcagtttccatattaaaaatgttttaaatattttgattgaattagtaccaatgtaaaatctagtttcttcctgaaggaggatccctggcgctgtcctgccatgtctcaaaggaatgtttgagaaacttcatctaatattagttataaggttgtggaatttatgcttggcccaccttccaagactggcactgcccaacagacaccgctgaaatcatgtgggtatccctaggatggccttcagagccctcaaacttacaagcacctggtagttgacatcatatggggaattttctattcaccgtacttatccaaaaatctcttttaaaaagtaaatttgtgcaacaacgtttatttgaaagataatgtcttctcaaaatcagaaactgcagtggtaattaaattaatagaaaagagaacaaactgcaggtttagaaaaatggttttcatattcaccattcttccacctcattgaattgcatgctgtagttctagcttttctgctataatatgtaaatatgactgtagccttttaagcttcagtctcagcagagaatttcctaaatgcgtttgacctaatgaaactgatcatggcttcccacttaggtttttcttcttatagctttatagaactatataataatatggacttgctgtgtaatggaattaaagtgcttttgcacaataagttctgcaaaaccctctcattcatgaaaaggtgctccttgctagacagaaacttgctgatttacagtattgttatttttgtctaaagttctgtaaatacatgctttaatgttatctttgagaaatctatgtaaataatatagtctacaacatagagactgtataattctgtgttatatatgtgcctagtgctctgttggcactcaataaattttaagtaacaaaattgataatcatatagcgaaggcatatttttcttccaagctcaagtcaggattgtgactatatattaatgagactcagtaatccaacccacacctgagaactcgtctcattactttatagtcatgtcatgtatgtttttttaaccatgaaatgacaataaaatgatttttaaaatgagaa

SEQ ID NO: 109268 - DNA, 7316 bp, Homo sapiens
  Payload ID: 1463
  Gene Symbol: ARID2
  Gene Name: AT rich interactive domain 2 (ARID, RFX-like)
  ENST ID: ENST00000444670
  CDS Start-End: 17-4354
ggatagatttttaaagatgagaggcatggaaattttgggaaatctttgcaaagcagaagataatggtgttttaatttgtgaatatgtggatcaggattcctacagagagatcatttgtcatctcactttacctgatgtgctgcttgtaatctcaacactcgaggtgctatacatgctcacggaaatgggagatgttgcttgcacaaaaattgcaaaagtagaaaagagcatagctgcggtaaaactcattgaacacccaagttccagtcatcaaatgttatctgaaattaggccacaagctatagagcaagtccaaacccagactcatgtagcatctgccccagcttccagagcagttgtagcgcagcatgttgctccacctccaggaatagtggaaatagatagtgagaagtttgcttgtcagtggctaaatgctcattttgaagtaaatccagattgttctgtttctcgagcagaaatgtattctgaatacctctcgacttgcagtaaattagctcgtggtggaatcctaacatcaactggattttataaatgtcttagaacggtctttccaaatcatacagtgaagagagtggaggattccagtagcaatgggcaggcacatattcatgtggtaggagtaaaacggagggctataccacttcccattcagatgtactatcagcagcaaccagtttctacttctgttgttcgtgttgattctgttcctgatgtatctcctgctccttcacctgcaggaatccctcatggatcacaaaccataggaaaccattttcagaggactcctgttgccaaccaatcttcaaatctgactgcaacacaaatgtcttttcctgtacaaggtgttcatactgtggcacaaactgtttcaagaattccacaaaatccttcacctcatacccaccagcaacaaaatgctccagtgactgtcattcaaagtaaagctccaattccttgtgaagttgttaaggctacagttatccagaattccataccccagacaggagttcctgttagtattgctgttggaggaggacctccacagagttctgttgttcagaatcatagtacagggccacaacctgttacagttgtgaattctcagacattgcttcaccatccatctgtaattccacagcagtctccattacacacagtggtaccaggacagatcccttcaggcactcctgttacagtaattcaacaagctgtcccacagagtcatatgtttggcagagtacagaacataccagcatgtacttctacagtttcacagggtcaacagttaatcaccacatcaccccaacctgtgcaaacttcatctcaacagacatcagctggtagccagtcacaagatactgttatcatagcacccccacagtatgtaacaacttctgcatccaatattgtctcagcaacttcagtacagaattttcaggtagctacaggacaaatggttactattgctggtgtcccaagtccacaagcctcaagggtagggtttcagaacattgcaccaaaacctctcccttctcagcaagtttcatctacagtggtacagcagcctattcaacaaccacagcagccaacccaacaaagcgtagtgattgtaagccagccagctcaacaaggtcaaacttatgcaccagccattcaccaaattgttcttgctaatccagcagctcttccagctggtcagacagttcagctaactggacaacctaacataactccatcttcttcaccatcacctgtcccagctactaataaccaagtccctactgccatgtcgtcgtcctctacccctcaatcacagggaccacctcctactgtcagtcaaatgttatctgtgaaaaggcagcaacagcagcaacattcaccagcacccccaccacagcaggtacaagtacaagttcagcagccccaacaagtacagatgcaagttcaacctcaacagtcgaatgcaggagttggtcagcctgcctctggtgagtcgagtctgattaaacagcttctgcttccgaaacgtggtccttcaacaccaggtggtaagcttattctcccagctccacagattcctccccctaataatgcaagagctcctagccctcaggtggtctatcaggtggccagtaaccaagccgcaggttttggagtgcaggggcaaactccagctcagcagctattggttgggcagcaaaatgttcagttggtcccaagtgcaatgccaccctcagggggagtacaaactgtgcccatttcgaacttacaaatattgccaggtccactgatctcaaatagcccagcaaccattttccaagggacttctggcaaccaggtaaccataacagttgtgccaaatacgagttttgcacctgcaactgtgagtcagggaaatgcaactcagctcattgctccagcaggaattaccatgagcggaacgcagacaggagttggacttccagtacaaacgcttccagccactcaagcatctcctgctggacaatcatcatgtactactgctactcccccattcaaaggtgataaaataatttgccaaaaggaggaggaagcaaaggaagcaacaggtttacatgttcatgaacgtaaaattgaagtcatggagaacccgtcctgccgacgaggagccacaaacaccagcaatggggatacaaaggaaaatgaaatgcatgtgggaagtcttttaaatgggagaaagtacagtgactcaagtctacctccttcaaactcagggaaaattcaaagtgagactaatcagtgctcactaatcagtaatgggccatcattggaattaggtgagaatggagcatctgggaaacagaactcagaacaaatagacatgcaagatatcaaaagtgatttgagaaaaccgctagttaatggaatctgtgattttgataaaggagatggttctcatttaagcaaaaacattccaaatcataaaacttccaatcatgtaggaaatggtgagatatctccaatggaaccacaagggactttagatatcactcagcaagatactgccaaaggtgatcaactagaaagaatttctaatggacctgtattaactttgggtggttcatctgtgagcagtatacaggaggcttcaaatgcggcaacacagcaatttagtggtactgatttgcttaatggacctctagcttcaagtttgaattcagatgtgcctcagcaacgcccaagtgtagttgtctcaccacattctacaacctctgttatacagggacatcaaatcatagcagttcccgactcaggatcaaaagtatcccattctcctgccctatcatctgacgttcggtctacaaatggcacagcagaatgcaaaactgtaaagaggccagcagaggatactgatagggaaacagtcgcaggaattccaaataaagtaggagttagaattgttacaatcagtgaccccaacaatgctggctgcagcgcaacaatggttgctgtgccagcaggagcagatccaagcactgtagctaaagtagcaatagaaagtgctgttcagcaaaagcaacagcatccaccaacatatgtacagaatgtggtcccgcagaacactcctatgccaccttcaccagctgtacaagtgcagggccagcctaacagttctcagccttctccattcagtggatccagtcagcctggagatccaatgagaaaacctggacagaacttcatgtgtctgtggcagtcttgtaaaaagtggtttcagacaccctcacaggttttctaccatgcagcaactgaacatggaggaaaagatgtatatccagggcagtgtctttgggaaggttgtgagccttttcagcgacagcggttttcttttattacccacttgcaggataagcactgttcaaaggatgccctacttgcaggattaaaacaagatgaaccaggacaagcaggaagtcagaagtcttctaccaagcagccaactgtagggggcacaagctcaactcctagagcacaaaaggccattgtgaatcatcccagtgctgcacttatggctctgaggagaggatcaagaaaccttgtctttcgagattttacagatgaaaaagagggaccaataactaaacacatccgactaacagctgccttaatattaaaaaatattggtaaatattcagaatgtggtcgcagattgttaaagagacatgaaaataacttatcagtgctagccattagtaacatggaagcttcctccacccttgccaaatgcctttatgaacttaattttacagttcagagtaaggaacaagaaaaagactcagaaatgctgcagtgaaaaataattccacttacacagtgggggactcaaagtcagccacatttcacatactgttactgaagaaagcaccaagtcttaatggaacaaagaccatagaatgaattattttatctcctcccatgatgctgagaggaagcttcgtattctgatctctgagtgaatccctttgttctctgtttaaaaaaatctaaaaagaaaaaggaaaaaaaaaaaagaactgctgtgggattgtcaaccagcttatctgcaggatgtttcagatctgataaatcctgatggaaactggtatgatcagaattcagtaccatccacattggaatatacatggaatattgtaaaacctacatgagcagatgaaatagaagcattaaatatttttatctatatccaaaaaggagcacatttttatatttacaaaaccgtttaagctggtttgaataatttaaaaaagtttcagcacacctatacccccgatctcagagggggccaccaatatctagctatggatcgtgtgttttgtttagaaatcagtagcttggttttcttacttgagccaatatattttcacttatttattatcataaaaatttaccagtctgaatagatcttgtaaatatttgtgaatagaatgaatacctttcatgccactgcagccactggaaatacattctgtggtgtcctagaagcattattggtaggttctaaagttttctagactttcctgtcaattgtaagtaattgtgatatattctatgcagtggatgaatgttctttaaatttgtgtaaatacttctgcaaaggtactgatgctgtaaagtcaaaacagttttgtggaactgtgatttttttttcttttttctttttttttttctttttttttttgtattatacaccttgtagaactcattttgctggctgaaagagtatggaataatatatctcatgtcattttttagaagaaaaactatttgaaggtattttttggttttccttaacatgtatccactgtaaacgtttgtcgtgtacaagctcagagcttggacagaattttttgtatttgtaaattggtttaaatacatggaattttatacaggttttctcctgtgttatatatgcattatgtgcaggtatgatattttcttcactactttttctatcttaatatagtgtggaattttattgtattattcttccattcttaatactgtaccacattcctgctcagaaactgctcacttccttaaattgtcttttttcccccagcgtgaaatgtatccatttataactgcctattgcctgttctattagcatccaaaaatgtggaaggcctcccaaccaccatttctgctgtgtccttaggatgtgcagtaaaaaatatagacctaacagtttatgttatagaatggctttatttactttggtgactgtttatagtttttaaataaaagactgaacattttcttgagtccttcatttctgagtatgcttaagacatcttaaaaatatagagagaattctaaattcagctgaaggcaaggtataacggtcacctacctatttgattatatgttgattgataacatattaaatagagaacaaataagagaggtcctttacatgacaaatttgcatgaaataagcagattaaccaagtatttatttttcatcttgttataatgcagagcaaatgtagagaacagcaaatgattgatgcagttaaagctcaatatgcctttttttactggatactgtacatttggctaaaagcttttattgtttgatgttgtgtttcttgactgtttattcagaatcacagtgtatccaaatcttcagcttgaatttggaggcagattcttagagtgaaaaagcctcagtttccatattaaaaatgttttaaatattttgattgaattagtaccaatgtaaaatctagtttcttcctgaaggaggatccctggcgctgtcctgccatgtctcaaaggaatgtttgagaaacttcatctaatattagttataaggttgtggaatttatgcttggcccaccttccaagactggcactgcccaacagacaccgctgaaatcatgtgggtatccctaggatggccttcagagccctcaaacttacaagcacctggtagttgacatcatatggggaattttctattcaccgtacttatccaaaaatctcttttaaaaagtaaatttgtgcaacaacgtttatttgaaagataatgtcttctcaaaatcagaaactgcagtggtaattaaattaatagaaaagagaacaaactgcaggtttagaaaaatggttttcatattcaccattcttccacctcattgaattgcatgctgtagttctagcttttctgctataatatgtaaatatgactgtagccttttaagcttcagtctcagcagagaatttcctaaatgcgtttgacctaatgaaactgatcatggcttcccacttaggtttttcttcttatagctttatagaactatataataatatggacttgctgtgtaatggaattaaagtgcttttgcacaataagttctgcaaaaccctctcattcatgaaaaggtgctccttgctagacagaaacttgctgatttacagtattgttatttttgtctaaagttctgtaaatacatgctttaatgttatctttgagaaatctatgtaaataatatagtctacaacatagagactgtataattctgtgttatatatgtgcctagtgctctgttggcactcaataaattttaagtaacaaaattgataatcatatagcgaaggcatatttttcttccaagctcaagtcaggattgtgactatatattaatgagactcagtaatccaacccacacctgagaactcgtctcattactttatagtcatgtcatgtatgtttttttaaccatgaaatgacaataaaatgatttttaaaatgagaa

SEQ ID NO: 109269 - DNA, 5481 bp, Homo sapiens
  Payload ID: 1463
  Gene Symbol: ARID2
  Gene Name: AT rich interactive domain 2 (ARID, RFX-like)
  ENST ID: ENST00000422737
  CDS Start-End: 369-5288
accacagcagagggtcgccttttaaaaaaatccctgcggtgggtgggaaggagctggatcttcacggtctctacaccagagtcactactttaggcggattcgcgaaggtttctgagaagaatcagtggggagaaattgttgaagagttcaactttcccagaagttgttctaacgctgcctttgctttaaaacagtattacttgcgttacctagaaaagtacgagaaagttcatcattttggggaggatgatgatgaggtaccaccaggcaatccaaagccacagcttcctattggtgcaattccatcttcctacaattaccagcaacacagtgtgtcggattatctgcgtcaaagttatgggctgtccatggactttaattcgccaaatgattataataaattggtgctttcactgttatctggactcccaaatgaagtggactttgctattaacgtatgcactctcctatcaaatgaaagcaagcacgtcatgcaacttgaaaaagatcctaaaatcatcactttactacttgctaatgccggggtgtttgacgacactttaggatccttttccactgtatttggagaagaatggaaagagaagactgatagagacttcgttaagttttggaaagacatcgttgatgataatgaagttcgtgacctcatttctgacagaaacaagtctcatgaaggtacatcaggagaatggatttgggagtctttatttcatccacctcgaaagctgggcattaacgatattgaaggacagcgggtacttcagattgcagtgattttgagaaatctttcctttgaggagggcaatgttaagctcttggcagctaatcgtacctgtcttcgtttcctattactttctgcacatagtcattttatttctttaaggcaattaggccttgacacattaggaaatattgcagctgagcttttactggaccctgttgatttcaaaactactcatctgatgtttcatactgttacaaaatgtctaatgtcaagggatagatttttaaagatgagaggcatggaaattttgggaaatctttgcaaagcagaagataatggtgttttaatttgtgaatatgtggatcaggattcctacagagagatcatttgtcatctcactttacctgatgtgctgcttgtaatctcaacactcgaggtgctatacatgctcacggaaatgggagatgttgcttgcacaaaaattgcaaaagtagaaaagagcatagacatgttagtgtgtctggtttctatggatattcagatgtttggccctgatgcactagctgcggtaaaactcattgaacacccaagttccagtcatcaaatgttatctgaaattaggccacaagctatagagcaagtccaaacccagactcatgtagcatctgccccagcttccagagcagttgtagcgcagcatgttgctccacctccaggaatagtggaaatagatagtgagaagtttgcttgtcagtggctaaatgctcattttgaagtaaatccagattgttctgtttctcgagcagaaatgtattctgaatacctctcgacttgcagtaaattagctcgtggtggaatcctaacatcaactggattttataaatgtcttagaacggtctttccaaatcatacagtgaagagagtggaggattccagtagcaatgggcaggcacatattcatgtggtaggagtaaaacggagggctataccacttcccattcagatgtactatcagcagcaaccagtttctacttctgttgttcgtgttgattctgttcctgatgtatctcctgctccttcacctgcaggaatccctcatggatcacaaaccataggaaaccattttcagaggactcctgttgccaaccaatcttcaaatctgactgcaacacaaatgtcttttcctgtacaaggtgttcatactgtggcacaaactgtttcaagaattccacaaaatccttcacctcatacccaccagcaacaaaatgctccagtgactgtcattcaaagtaaagctccaattccttgtgaagttgttaaggctacagttatccagaattccataccccagacaggagttcctgttagtattgctgttggaggaggacctccacagagttctgttgttcagaatcatagtacagggccacaacctgttacagttgtgaattctcagacattgcttcaccatccatctgtaattccacagcagtctccattacacacagtggtaccaggacagatcccttcaggcactcctgttacagtaattcaacaagctgtcccacagagtcatatgtttggcagagtacagaacataccagcatgtacttctacagtttcacagggtcaacagttaatcaccacatcaccccaacctgtgcaaacttcatctcaacagacatcagctggtagccagtcacaagatactgttatcatagcacccccacagtatgtaacaacttctgcatccaatattgtctcagcaacttcagtacagaattttcaggtagctacaggacaaatggttactattgctggtgtcccaagtccacaagcctcaagggtagggtttcagaacattgcaccaaaacctctcccttctcagcaagtttcatctacagtggtacagcagcctattcaacaaccacagcagccaacccaacaaagcgtagtgattgtaagccagccagctcaacaaggtcaaacttatgcaccagccattcaccaaattgttcttgctaatccagcagctcttccagctggtcagacagttcagctaactggacaacctaacataactccatcttcttcaccatcacctgtcccagctactaataaccaagtccctactgccatgtcgtcgtcctctacccctcaatcacagggaccacctcctactgtcagtcaaatgttatctgtgaaaaggcagcaacagcagcaacattcaccagcacccccaccacagcaggtacaagtacaagttcagcagccccaacaagtacagatgcaagttcaacctcaacagtcgaatgcaggagttggtcagcctgcctctggtgagtcgagtctgattaaacagcttctgcttccgaaacgtggtccttcaacaccaggtggtaagcttattctcccagctccacagattcctccccctaataatgcaagagctcctagccctcaggtggtctatcaggtggccagtaaccaagccgcaggttttggagtgcaggggcaaactccagctcagcagctattggttgggcagcaaaatgttcagttggtcccaagtgcaatgccaccctcagggggagtacaaactgtgcccatttcgaacttacaaatattgccaggtccactgatctcaaatagcccagcaaccattttccaagggacttctggcaaccaggtaaccataacagttgtgccaaatacgagttttgcacctgcaactgtgagtcagggaaatgcaactcagctcattgctccagcaggaattaccatgagcggaacgcagacaggagttggacttccagtacaaacgcttccagccactcaagcatctcctgctggacaatcatcatgtactactgctactcccccattcaaaggtgataaaataatttgccaaaaggaggaggaagcaaaggaagcaacaggtttacatgttcatgaacgtaaaattgaagtcatggagaacccgtcctgccgacgaggagccacaaacaccagcaatggggatacaaaggaaaatgaaatgcatgtgggaagtcttttaaatgggagaaagtacagtgactcaagtctacctccttcaaactcagggaaaattcaaagtgagactaatcagtgctcactaatcagtaatgggccatcattggaattaggtgagaatggagcatctgggaaacagaactcagaacaaatagacatgcaagatatcaaaagtgatttgagaaaaccgctagttaatggaatctgtgattttgataaaggagatggttctcatttaagcaaaaacattccaaatcataaaacttccaatcatgtaggaaatggtgagatatctccaatggaaccacaagggactttagatatcactcagcaagatactgccaaaggtgatcaactagaaagaatttctaatggacctgtattaactttgggtggttcatctgtgagcagtatacaggaggcttcaaatgcggcaacacagcaatttagtggtactgatttgcttaatggacctctagcttcaagtttgaattcagatgtgcctcagcaacgcccaagtgtagttgtctcaccacattctacaacctctgttatacagggacatcaaatcatagcagttcccgactcaggatcaaaagtatcccattctcctgccctatcatctgacgttcggtctacaaatggcacagcagaatgcaaaactgtaaagaggccagcagaggatactgatagggaaacagtcgcaggaattccaaataaagtaggagttagaattgttacaatcagtgaccccaacaatgctggctgcagcgcaacaatggttgctgtgccagcaggagcagatccaagcactgtagctaaagtagcaatagaaagtgctgttcagcaaaagcaacagcatccaccaacatatgtacagaatgtggtcccgcagaacactcctatgccaccttcaccagctgtacaagtgcagggccagcctaacagttctcagccttctccattcagtggatccagtcagcctggagatccaatgagaaaacctggacagaacttcatgtgtctgtggcagtcttgtaaaaagtggtttcagacaccctcacaggttttctaccatgcagcaactgaacatggaggaaaagatgtatatccagggcagtgtctttgggaaggttgtgagccttttcagcgacagcggttttcttttattacccacttgcaggataagcactgttcaaaggatgccctacttgcaggattaaaacaagatgaaccaggacaagcaggaagtcagaagtcttctaccaagcagccaactgtagggggcacaagctcaactcctagagcacaaaaggccattgtgaatcatcccagtgctgcacttatggctctgaggagaggatcaagaaaccttgtctttcgagattttacagatgaaaaagagggaccaataactaaacacatccgactaacagctgccttaatattaaaaaatattggtaaatattcagaatgtggtcgcaggtgagtaatatgttttctgtagccaaagtgaatttagtttattttatttttacatataagttaataaaattagataactgtattttcttcattgtttttctcatcaattttgcaaatacatccaaaagtttatgcctaggtcaggccatgatgagctcttaaaagtcaaaaataaatagaagttaaaacaaccaaaa

SEQ ID NO: 109270 - DNA, 523 bp, Homo sapiens
  Payload ID: 1463
  Gene Symbol: ARID2
  Gene Name: AT rich interactive domain 2 (ARID, RFX-like)
  ENST ID: ENST00000477947
  CDS Start-End: 1-193
aggattaaaacaagatgaaccaggacaagcaggaagtcagaagtcttctaccaagcagccaactgtagggggcacaagctcaactcctagagcacaaaaggccattgtgaatcatcccagtgctgcacttatggctctgaggagaggatcaagaaaccttgtctttcgagattttacagtaagcatgccttgaaacccttatctgtaaaagtctgagtcctgtatgatttagatctttattcttttttttcctttctttttaaggatgaaaaagagggaccaataactaaacacatccgactaacagctgccttaatattaaaaaatattggtaaatattcagaatgtggtcgcaggtgagtaatatgttttctgtagccaaagtgaatttagtttattttatttttacatataagttaataaaattagataactgtattttcttcattgtttttctcatcaattttgcaaatacatccaaaagtttatgcctaggtcaggccatgatgagctcttaaaagtc

SEQ ID NO: 109271 - DNA, 5941 bp, Homo sapiens
  Payload ID: 1464
  Gene Symbol: ARID3A
  Gene Name: AT rich interactive domain 3A (BRIGHT-like)
  Uniprot ID: Q99856
  ENST ID: ENST00000263620
  CDS Start-End: 291-2072
acgcggacgcggctggcggctcggtttctgcaaatgcgtgaatgagccggatgccagcctctgtcccctggagcccagcgtgaggaagaggcatgccccatcagccttcagcttgagcccggcggcccccgcccccgccccctgccaccctgcactgccccggctcccccgcggcccccacgctgcagtgcggccgggccccctccccgcaggggccgcccccgccgcccacccctagcgcccgtggtggtggtggtggtggtggtggtggtggcccgggccgcagggccatgaaactacaggccgtgatggagacgctgttgcagcggcagcagcgggcgcgccaggagctggaggcccggcagcagctgccccccgatccccctgctgcaccccccggccgggcccgggctgcccccgacgaggacagagagcccgagagtgcccggatgcagcgggctcagatggccgcactggcagccatgcgggctgcagctgcgggcctgggacacccagccagccccggcggctctgaggatgggcccccaggctcggaggaggaggacgcggcccgggaggggacaccgggctcacccgggcgaggcagagaagggccaggagaggagcactttgaggacatggcctccgacgaggacatgaagcccaaatgggaggaggaggagatggaggaagacctcggggaggatgaggaggaggaggaggaggattacgaggatgaggaggaggaggaggacgaggaggggctgggccccccaggccctgccagcttgggcaccacggcactgttcccccgaaaggcccagccaccccaggccttccgcggcgatggcgttcccagggtgctggggggccaggagcggccggggcctggccctgcccaccccggaggggccgcccacgtagccccgcagctgcagccgcctgaccacggcgactggacttacgaggagcagtttaagcagctctacgaactcgacggggaccccaagaggaaggaattcctggatgacttgttcagcttcatgcagaagcgagggacacctgtgaaccgcatccccatcatggccaaacaggtccttgacctgttcatgctgtacgtgctggtgacggagaagggcggcctcgtggaggtcatcaacaagaagctgtggcgtgagatcaccaagggcctcaacctgcccacgtccatcaccagtgcagccttcaccctgcggacccaatacatgaagtacctgtacccctacgagtgtgagaagcggggcctcagtaaccccaatgagctccaggcagccatagacagcaaccgacgggagggccggcgccagagctttggtggctccctctttgcctactcgccaggcggggcacacggcatgctctcctcacccaagctacccgtgtcctccctgggcctggccgcaagcaccaatggcagctccatcacccccgcccctaagatcaagaaagaggaggactcagccatccccatcacagtccctggccgcctgcctgtgtccctggcgggccaccctgtggtggcagcccaggcagcagctgtgcaagcagcagccgcccaagcagctgtggccgcacaggcagctgccctggaacagctgcgggagaagctggagtctgcagagcctccggagaagaagatggccctggtggccgatgagcagcaacggctgatgcaacgtgcactccagcagaacttcctggccatggcggcccagctgcccatgagcattcggatcaacagccaagcctccgaaagccgccaggactctgctgtgaacctgacgggcaccaacggcagcaacagcatcagcatgtcggtggagatcaacggcatcatgtacacaggagttctgtttgctcagccgccggcccccacgccaacctctgctcccaacaaaggaggcggcggcggcggcggcagcagcagcaacgcaggcggccggggaggaaacaccggaaccagcggcggccaggctgggccagcggggctgtccacaccctccacatctacctcaaataactcgttgccttaaccgcatcactccccacccgccacccaccctggagcccgccggcctgggcagggggtccaggtgggccacacaggggccaggatggcggaagatacgggtggggagggaagatatccagaaaggagccacagctgacgccaaaaagaaaagaaaaaagatatatatatatatatatatatatacacgtatatatataaagagaatttaataaaacaggggaaaaccaaggaacacttgaatttctcaggttttggacattcagagagatgaattgtgagaacagcaaagaaatccatcagaaaaacagaaagaggcagacgtttcccagggcgttcaggcagccctgatggaccgaaggctctggtgtctggtttggccccacagcagtgtgggccgatcctgtttacctcatacatccctgcactgtgtgttttcatttttgtctgctttagttctcttttattttctattcaccacacactcaccactcccagcttctcgtgtccagtgaaacccctgaaccaagatcactgaatttttgtttttttcttgttgctttgggaaatttttttttctctgtagggtttttaagaggtttcgggggttttgttgtgtaaatattctattttattcttggggggatcaaaccttaggaaaaggatatctatatatctatatagctatatatttgtgttccttcagggaaactggtcttgaaaaagcaagaaaaaaaagcaaaaaaaaaaaaaaaaaaaaaaaaaaaaaactcacctttttatttttcccatgaccaatttgggtccctttgtccatttctgggggtgcgttgggcagctgtgagcccagcacatcggatccctggggctagagccgcggagccaatgaactcaggtgctatgggccgggctggggcagagggtgcatgctggggtcccaccggccaggggcccctgacagtgaattgctgactgtgatattccacgatgcttttgcttgtgccgtgcttgtctgctgggctctcgagtcaggggcctggaaatttttttttttttttttttttgagacggagttttgctcttgtcgcccaggctggagtgagtgcaatggtgcgatcttggctcactgcaacctgcacctcccaggtgcaagcgattctcctgcctcagcctccggagtagctgggattacaggcgcccgccaccacgcccagttaatttttgtatttttagtagagatgggggttttgccatgttggtcaggctgatctcgaactcctgacctcaggtgatctgcccgccttggcctcccaaagtgctgggattacaggcatgagccgccacgctggcccggtctggaaatcttatctaaaaagtagcaagtgctggaaaaagggcctggggggcgggggtggttcttgtcgaagcccccaggctcctgtctcagggatgaatgtggcgtctcattgggattcttctcttgcccgaaagggctgcttttgaggactatcaatactggggagtgggggtgaagccggacctcactcagggtgaggatttcagggccccggcatcctgaacaccccccacaccccaacattctcctcgctctgtcccttcctcttctcccaaccccttttgtgctggggctgcgagctccccgagttctgcggtgactaaatcgaggccgagaagggaggctgccccccaccaccctgtgggtcagtacccctccccctggcttggagaaagtggggtcaccgcagctgagctggggggttattttggctggagctgctggagcagaaaggctgggtctgaaatgcccagcagggtctggggacttcgttggacccgcgtggtgttgggcggggctgtcgtgtcctacacgggagctctgggctttcatttctcttggggtgcagtggggattaactcagctattcccagggtaagcctgggtctctaattgggccctgggagccctgttaggccaccggcatgggggcttggtgaggaaggggactccccagctccccccactcccaaccacctccccattgccttggagacccctggggagggggctggggggcttctgagcccctgagtctaggttcactttcccgtcgggctgtgggaggggactgtcactttcctgtgtctttggggaggggacccccacttccttctcggatctcagggccgtggacacacaccccctttccaggagggggtggtgggcgtctaggttttccttgtcccttcctggggccagcaccgtagcagcacaatcaccccgggaagggggtgtctgtttgcctccagacacaatcgggccccactcgcagaaccacctggactctgtccgtgtctgtcccccggcctccagggctcctctcccgggacccccgtcccacgcctgggccccgcgccgggggaagcgcctgctgcctatctctgtctacctcaggtctgacttttgatgccaaaatctgagcccctggggtgcctctcccccgcctcccgtgcaccagggtctgcagcagccactggggcctggctgcctgctgcatctggcggccctggacccctggggcccccgtgcacctgcccacctcggagcctggggaggggccgtgcagggtcgagggctgggtcgtctccctcgggctgcgtgtgtgtgtcgggaatcctgcgtgtcgtgtctgtgggcgatccggcctcccggcggtgggtggacctggattctaactcagaggacttgagcctgctgttaactccgatgattgtagggacaggcggggtgggtggggggtgggcgcgaggctgggtcccggcccaggagaaggaagtcgctgaaggcagtggccatgctggccgtggaaatgggaggcggttgcagagggtctatggggcccggtcctggatactcggcaggaagccgtgtctgcagaggctcctccctgcctcaggtggccccgttcaaccccagccgtgcccatctcctgccaccgcctgtcggtgggggtttaaattcggtgtggctttctggggtgcagctcagcacccccccttatgcagactgggagggggtcgggcagtcccctcagccacgaggaccctggatgggttctagttcacttgggaccgtggggcctggctgcgtactgagtgggtgccccacagtcaaggccaacgggggctccccctgctctgagatgttgggagaaaggcggcttctggaaccttccgtgggacccgtaagtggctgtccagaaaggcgggagggtgggcacggggcacggggggcagctggggtcgttgttaagggtcacgcatctgtacagttgaatttcctttctcttatcatgttttacccaccttgtcccttttttccccaattgtgcttttgcatttttttccttggcaaatgtaaactcagcctttcattcatgacgtgtgaaatttcagtttctctggagtttgtcagacggcgtgggaaccacgcctgaaactcaggtaataggaggaaaaaaaaaaaaacttaaaaaaatttttaaaaaacataaaactactctctacctctggctgggcccagcctgtctcgccctggccgcggcagggtggcctgtaacaatttcagttttcgcagaacattcaggtattaaaaggaaaaaaaaaaaaaaagacaaaaagaccaaaaaaaaaaaaaagtgtgattttgaaatttaaaagaacactgaaagtttacattttatagtaacattattatgcagattgtatttaaacttcagaaatatttaagacgattgtaaccctgtaaagctgatgagatattaaaacgagacaaaacacttctgacttttaaca

SEQ ID NO: 109272 - DNA, 549 bp, Homo sapiens
  Payload ID: 1464
  Gene Symbol: ARID3A
  Gene Name: AT rich interactive domain 3A (BRIGHT-like)
  ENST ID: ENST00000457152
  CDS Start-End: 1-289
gttcccccgaaaggcccagccaccccaggccttccgcggcgatggcgttcccagggtgctggggggccaggagcggccggggcctggccctgcccaccccggaggggccgcccacgtagccccgcagctgcagccgcctgaccacggcgactggacttacgaggagcagtttaagcagctctacgaactcgacggggaccccaagaggaaggaattcctggatgacttgttcagcttcatgcagaagcgagtacaaaaattgaccaggcgtggtggcaggcgcctgtaatcccagctacttgggaggctgaggcaggagaattgcttgaatccaggaggcagaggttgcagtgagccgagattgcagcactgcactctagcctgggtgacagagggagcccccgtctcaaacaaacaaaaagcaggcatgggacacctgtgaaccgcatccccatcatggccaaacaggtccttgacctgttcatgctgtacgtgctggtgacggagaagggcggcctcgtggaggtcatcaacaagaagctgtggcgt

SEQ ID NO: 109273 - DNA, 1016 bp, Homo sapiens
  Payload ID: 1464
  Gene Symbol: ARID3A
  Gene Name: AT rich interactive domain 3A (BRIGHT-like)
  ENST ID: ENST00000587532
  CDS Start-End: 1-1016
gaggacgaggaggggctgggccccccaggccctgccagcttgggcaccacggcactgttcccccgaaaggcccagccaccccaggccttccgcggcgatggcgttcccagggtgctggggggccaggagcggccggggcctggccctgcccaccccggaggggccgcccacgtagccccgcagctgcagccgcctgaccacggcgactggacttacgaggagcagtttaagcagctctacgaactcgacggggaccccaagaggaaggaattcctggatgacttgttcagcttcatgcagaagcgagggacacctgtgaaccgcatccccatcatggccaaacaggtccttgacctgttcatgctgtacgtgctggtgacggagaagggcggcctcgtggaggtcatcaacaagaagctgtggcgtgagatcaccaagggcctcaacctgcccacgtccatcaccagtgcagccttcaccctgcggacccaatacatgaagtacctgtacccctacgagtgtgagaagcggggcctcagtaaccccaatgagctccaggcagccatagacagcaaccgacgggagggccggcgccagagctttggtggctccctctttgcctactcgccaggcggggcacacggcatgctctcctcacccaagctacccgtgtcctccctgggcctggccgcaagcaccaatggcagctccatcacccccgcccctaagatcaagaaagcctccgaaagccgccaggactctgctgtgaacctgacgggcaccaacggcagcaacagcatcagcatgtcggtggagatcaacggcatcatgtacacaggagttctgtttgctcagccgccggcccccacgccaacctctgctcccaacaaaggaggcggcggcggcggcggcagcagcagcaacgcaggcggccggggaggaaacaccggaaccagcggcggccaggctgggccagcggggctgtccacaccctccacatctacctcaaataactc

SEQ ID NO: 109274 - DNA, 4271 bp, Homo sapiens
  Payload ID: 1465
  Gene Symbol: ARID3B
  Gene Name: AT rich interactive domain 3B (BRIGHT-like)
  Uniprot ID: Q8IVW6
  ENST ID: ENST00000346246
  CDS Start-End: 232-1914
ctggctggcggtccagccccgcggcgccgcttccggtgcgggccccgccccggctgtggcccccggctgcggaggagtccgagacgcagctgccgcgccggggcctgagctgccgcctcctccgccgcccgaaaacccggagtgccccgcacaggtttagacccagtgtgcctggtgggctgtgcccaggttcagagtcatgccactctgtgggtgaagcttgaggcaaaaatggagccacttcagcagcagcagcagcagcagcagcaacaacagaagcagccacacctggctcctctgcagatggatgccagagagaagcagggccagcagatgagagaagcccagttcttgtatgcccaaaagctggtcacacagccgactctcctttccgccacagctgggagaccttctggcagcactcccttaggtcccttagccagagttccacccaccgcagcagtggcccaagtgtttgaacggggcaacatgaactcagagcctgaggaagaggacggaggtttggaagatgaggatggggatgatgaagttgcagaggtggctgagaaagaaacccaggctgcttcaaaatattttcatgtgcagaaagtagctcgccaagatcccagagtggcacccatgtccaatctacttccagcaccagggctcccaccacatggacaacaagctaaagaagaccataccaaagatgcttccaaggcctcaccttctgtctccacagcaggacagccgaactggaatctggatgagcagctcaagcagaatggtggtttggcctggagtgatgatgcagatggaggccggggaagagagatctctcgagattttgccaagctgtatgaactggacggtgatcctgaaaggaaagagttcctggatgacctcttcgtctttatgcagaagagggggacccccatcaaccgaatccccatcatggccaaacagatcctggacctgtacatgctgtataagctggtgaccgagaagggaggcctggtggagatcatcaacaagaagatctggagggagatcaccaaaggcctaaacctgcccacatccatcaccagcgccgccttcaccctcaggacgcagtacatgaagtatctgtatgcctatgagtgtgagaagaaagccttgagttccccagccgagctccaggcagcaattgatggcaaccgcagggagggccggcggcccagctacagctcctccctctttggctactcacctgctgcggctactgctgctgccgctgccggggcccctgcccttctctccccacccaagatccgctttcccatccttgggcttggctccagcagtggtaccaataccagtagccctcggatatccccagcaaccactctcaggaaaggtgatggagccccagtgacaacagtgcctgtgccaaatcgtctggctgtgcccgtgaccttggcaagccagcaggctggtactcggaccgccgcactggagcagctgcgggagcggctggagtcaggggagcctgctgagaagaaggcatcgaggctgtctgaggaggagcagcgcctggtgcagcaggccttccagcgcaactttttcagcatggcacggcagctccccatgaagatcaggatcaacggcagggaagacagagcagaggcctcggctgcagcactgaacctgaccacgagtagcattgggagcattaacatgtctgtggacatcgatggcaccacctatgcaggtgtgctgtttgcccagaagcctgtggtccacctcatcacggggtctgctccccagagcctcggcagcagcgccagcagcagcagcagctctcactgttcaccaagtcctacctcatcccggggcacccccagcgcagagccctccaccagctggtccctctgatgggcaggacccagcttcccacttgccactctcctgtcgagagtgaaggaagttgatgcacagaatttacctcatctcacagagcccacgtcgacgagcaccatttggccagacattgagagtttggacgtgtccgtctgtccaggctccattcaggtcctgctgtactctgggggcagggagaggctagaggggcaggacagacagcgttgtccaatcagggattgtcctggagaactgggtgggggtctgtgggtgtccagcttcctccagggttccccagccacctcccagctcagggcacagtgtatcgacaatctgtcagccgacgcagggctggaggccctccatttccctccccttttaatttatttccctgaccctgccttctgccatgaccccagggccactagtctcttcccctgtttttaagtcccatgtggggctgccaggagccaagagcatgccttcatgcccttctctgcagagcatgggatggggcccttccagcccactttgcctactgttaggttcctggggtacgggtccctcaaacacaagtcttgaatcagtcctcagggccccagatcccccttctaatagtctgaaggaagaggctgtgagggcagttcagggccagggcccacagggcatctgctgatgggaaggcagagcctcggggctgcccagccctggcacctgcttcacacggaccattctctgaccgcccccgccaaacctcatgctccccacttgcccttattggcctgctttcccaaaaacagcccactcatcctttccccagccctcttcagccctccccagtcctccccagccttcttcagccttcttcagctcagccctcttctatttcttatggggccatcttggcctcaccatccccacacgtgccgatgtcaggttcattgaaatacctcagatttgtaattgttgatgtttgagtcttcaggaagtatttgcatctctgaaatcttttttatatgtgttttgctgacttttgttttttttttattttaaaatttttatcgtagcaccaaagaaatgaaaacagatcacccccaaagccaagcaagtgattgggtaacccggcccctctggcccttccctcaagcccagtgaggaggtgggtggaggcatgcaggggagacgactcagggatcgcgggggcggggaggtggagtggagaggcccgctctcacaccgggtcgggccctgaaactgtaccagttctgaagaccgttttctgccacacccccacccccagctgaccagggaggcagaggacacctccccatcactcagcattcccagctcagggcacaggcaggctggggtcctcgctggccttgccagaggttgagccgccccagggtatgaggagatgaataactccacagctcctcctggaccctgcgcgggagcaggcagctcctgtgctgtaaagaaaattgattcgcttgcggctcacctcagtcgaggaagccctggaatgttcagcagaacaccaccactgtgacatggggctgtggcagtgggagacaccgcgcgtggcgtgggtgtgtgtggcagcgtggctcgcattcagtcctgtgtaggagaggaaagggaatcaaaagcttgagcacaaacagatacctcagcccggtaagctgcagctctgctcaactgcgtcttctctcagccctccacacacactcacccccactcccacacacatacacacacacacacacataccccatctcccgagggctgacctcctctggcctcagcctgcagggtgtgggcagagaagggcatctgggacgtggtgccagtgaggagcccagttggctggcactgggcccatttgaaggtgtctcagacatttggccagtatgtctttctcaggggtttggtcacaaaggatggactcttcccacccagaggatgcagggaaagcacactgtgtctttccggtcattggatcctctccctttccccaggcagctcgcctggccacaccgttggagtgaaccctcactgccctcaaggacaacagcagggtgtcacccagagcccgatgaggggtgccagcaggtgcccccacgagtggggccttggcccaagcagagcttcccctgaaggtgccatcagccagggcagctctgtcccctcctgctctccatcttatatgtattctaaccaggaaaaatgtgatagcacatgggtagcctaggcagtgagtaaatacctcagatgtcctcctgcagcaagtgtctatatgttgtggttattttctatcttacatgttctcgaatgtttatatttcaataaacctctacctcttcacacaa

SEQ ID NO: 109275 - DNA, 581 bp, Homo sapiens
  Payload ID: 1465
  Gene Symbol: ARID3B
  Gene Name: AT rich interactive domain 3B (BRIGHT-like)
  ENST ID: ENST00000566147
  CDS Start-End: 166-581
caatctacttccagcaccagggctcccaccacatggacaacaagctaaagaagaccataccaaagatgcttccaaggcctcaccttctgtctccacagcaggacagccgaactggaatctggatgagcagctcaagcagggacccccatcaaccgaatccccatcatggccaaacagatcctggacctgtacatgctgtataagctggtgaccgagaagggaggcctggtggagatcatcaacaagaagatctggagggagatcaccaaaggcctaaacctgcccacatccatcaccagcgccgccttcaccctcaggacgcagtacatgaagtatctgtatgcctatgagtgtgagaagaaagccttgagttccccagccgagctccaggcagcaattgatggcaaccgcagggagggccggcggcccagctacagctcctccctctttggctactcacctgctgcggctactgctgctgccgctgccggggcccctgcccttctctccccacccaagatccgctttcccatccttgggcttggctccagcagtggtaccaataccagtagccctcggat

SEQ ID NO: 109276 - DNA, 4243 bp, Homo sapiens
  Payload ID: 1465
  Gene Symbol: ARID3B
  Gene Name: AT rich interactive domain 3B (BRIGHT-like)
  Uniprot ID: Q8IVW6
  ENST ID: ENST00000622429
  CDS Start-End: 203-1888
cttccggtgcgggccccgccccggctgtggcccccggctgcggaggagtccgagacgcagctgccgcgccggggcctgagctgccgcctcctccgccgcccgaaaacccggagtgccccgcacaggtttagacccagtgtgcctggtgggctgtgcccaggttcagagtcatgccactctgtgggtgaagcttgaggcaaaaatggagccacttcagcagcagcagcagcagcagcagcaacaacagaagcagccacacctggctcctctgcagatggatgccagagagaagcagggccagcagatgagagaagcccagttcttgtatgcccaaaagctggtcacacagccgactctcctttccgccacagctgggagaccttctggcagcactcccttaggtcccttagccagagttccacccaccgcagcagtggcccaagtgtttgaacggggcaacatgaactcagagcctgaggaagaggacggaggtttggaagatgaggatggggatgatgaagttgcagaggtggctgagaaagaaacccaggctgcttcaaaatattttcatgtgcagaaagtagctcgccaagatcccagagtggcacccatgtccaatctacttccagcaccagggctcccaccacatggacaacaagctaaagaagaccataccaaagatgcttccaaggcctcaccttctgtctccacagcaggacagccgaactggaatctggatgagcagctcaagcagaatggtggtttggcctggagtgatgatgcagatggaggccggggaagagagatctctcgagattttgccaagctgtatgaactggacggtgatcctgaaaggaaagagttcctggatgacctcttcgtctttatgcagaagagggggacccccatcaaccgaatccccatcatggccaaacagatcctggacctgtacatgctgtataagctggtgaccgagaagggaggcctggtggagatcatcaacaagaagatctggagggagatcaccaaaggcctaaacctgcccacatccatcaccagcgccgccttcaccctcaggacgcagtacatgaagtatctgtatgcctatgagtgtgagaagaaagccttgagttccccagccgagctccaggcagcaattgatggcaaccgcagggagggccggcggcccagctacagctcctccctctttggctactcacctgctgcggctactgctgctgccgctgccggggcccctgcccttctctccccacccaagatccgctttcccatccttgggcttggctccagcagtggtaccaataccagtagccctcggatatccccagcaaccactctcaggaaaggtgatggagccccagtgacaacagtgcctgtgccaaatcgtctggctgtgcccgtgaccttggcaagccagcaggctggtactcggaccgccgcactggagcagctgcgggagcggctggagtcaggggagcctgctgagaagaaggcatcgaggctgtctgaggaggagcagcgcctggtgcagcaggccttccagcgcaactttttcagcatggcacggcagctccccatgaagatcaggatcaacggcagggcagaagacagagcagaggcctcggctgcagcactgaacctgaccacgagtagcattgggagcattaacatgtctgtggacatcgatggcaccacctatgcaggtgtgctgtttgcccagaagcctgtggtccacctcatcacggggtctgctccccagagcctcggcagcagcgccagcagcagcagcagctctcactgttcaccaagtcctacctcatcccggggcacccccagcgcagagccctccaccagctggtccctctgatgggcaggacccagcttcccacttgccactctcctgtcgagagtgaaggaagttgatgcacagaatttacctcatctcacagagcccacgtcgacgagcaccatttggccagacattgagagtttggacgtgtccgtctgtccaggctccattcaggtcctgctgtactctgggggcagggagaggctagaggggcaggacagacagcgttgtccaatcagggattgtcctggagaactgggtgggggtctgtgggtgtccagcttcctccagggttccccagccacctcccagctcagggcacagtgtatcgacaatctgtcagccgacgcagggctggaggccctccatttccctccccttttaatttatttccctgaccctgccttctgccatgaccccagggccactagtctcttcccctgtttttaagtcccatgtggggctgccaggagccaagagcatgccttcatgcccttctctgcagagcatgggatggggcccttccagcccactttgcctactgttaggttcctggggtacgggtccctcaaacacaagtcttgaatcagtcctcagggccccagatcccccttctaatagtctgaaggaagaggctgtgagggcagttcagggccagggcccacagggcatctgctgatgggaaggcagagcctcggggctgcccagccctggcacctgcttcacacggaccattctctgaccgcccccgccaaacctcatgctccccacttgcccttattggcctgctttcccaaaaacagcccactcatcctttccccagccctcttcagccctccccagtcctccccagccttcttcagccttcttcagctcagccctcttctatttcttatggggccatcttggcctcaccatccccacacgtgccgatgtcaggttcattgaaatacctcagatttgtaattgttgatgtttgagtcttcaggaagtatttgcatctctgaaatcttttttatatgtgttttgctgacttttgttttttttttattttaaaatttttatcgtagcaccaaagaaatgaaaacagatcacccccaaagccaagcaagtgattgggtaacccggcccctctggcccttccctcaagcccagtgaggaggtgggtggaggcatgcaggggagacgactcagggatcgcgggggcggggaggtggagtggagaggcccgctctcacaccgggtcgggccctgaaactgtaccagttctgaagaccgttttctgccacacccccacccccagctgaccagggaggcagaggacacctccccatcactcagcattcccagctcagggcacaggcaggctggggtcctcgctggccttgccagaggttgagccgccccagggtatgaggagatgaataactccacagctcctcctggaccctgcgcgggagcaggcagctcctgtgctgtaaagaaaattgattcgcttgcggctcacctcagtcgaggaagccctggaatgttcagcagaacaccaccactgtgacatggggctgtggcagtgggagacaccgcgcgtggcgtgggtgtgtgtggcagcgtggctcgcattcagtcctgtgtaggagaggaaagggaatcaaaagcttgagcacaaacagatacctcagcccggtaagctgcagctctgctcaactgcgtcttctctcagccctccacacacactcacccccactcccacacacatacacacacacacacacataccccatctcccgagggctgacctcctctggcctcagcctgcagggtgtgggcagagaagggcatctgggacgtggtgccagtgaggagcccagttggctggcactgggcccatttgaaggtgtctcagacatttggccagtatgtctttctcaggggtttggtcacaaaggatggactcttcccacccagaggatgcagggaaagcacactgtgtctttccggtcattggatcctctccctttccccaggcagctcgcctggccacaccgttggagtgaaccctcactgccctcaaggacaacagcagggtgtcacccagagcccgatgaggggtgccagcaggtgcccccacgagtggggccttggcccaagcagagcttcccctgaaggtgccatcagccagggcagctctgtcccctcctgctctccatcttatatgtattctaaccaggaaaaatgtgatagcacatgggtagcctaggcagtgagtaaatacctcagatgtcctcctgcagcaagtgtctatatgttgtggttattttctatcttacatgttctcgaatgtttatatttcaataaacctctacctcttcacac

SEQ ID NO: 109277 - DNA, 1411 bp, Homo sapiens
  Payload ID: 1466
  Gene Symbol: ARID3C
  Gene Name: AT rich interactive domain 3C (BRIGHT-like)
  Uniprot ID: A6NKF2
  ENST ID: ENST00000378909
  CDS Start-End: 94-1332
ccataattccctcccccacaggcggccctttcctcggggtcccgcctggtaccagggaccccctcagctgggggactgcgcctggaagctgtcatggaggccctgcagaagcagcaggcagctcggctggcccagggggtggggccattggcccctgcatgcccgctgctgccaccgcagcctcccctgcctgaccaccggaccctacaggcccctgagggggccttggggaatgttggggctgaggaagaggaagatgctgaagaagatgaggagaagcgggaggaagccggggcagaggaggaggcagctgaggagagccgtccaggggcccagggccccagctcgccttctagccagccccctggactccatccccacgagtggacctacgaggaacaattcaagcagctgtatgagctcgatgcagaccccaagaggaaggaatttctggatgacctgtttagcttcatgcaaaagagggggacgccagtgaaccgcgtgcccatcatggcgaagcaggtgctcgacctgtacgctctgtttcgcctggtgaccgccaagggcggcctggtggaagtcatcaaccgcaaagtgtggcgggaagtcacgcgcggcctcagcctacccaccaccatcacctcggccgccttcactctacgcacccagtacatgaagtacctgtacccgtacgagtgcgagactcgagcgctcagctccccaggggagctccaggccgccatagacagcaatcggcgcgagggccgtcgccaggcttacaccgctactccgctcttcggcttggcagggccgccccctcggggcgctcaggacccagccttgggtcccggccccgcccctccggcgacccagtccagccctggcccagcccagggttccacctccggcctgccagcgcatgcatgcgctcagctgagtccaagccctattaagaaagaggagagtggaattccaaacccttgtctggcactgcctgtgggcctggcactgggacctacacgggagaaattggcaccagaggagcccccagagaagagagctgtgctgatggggcctatggacccacctcgaccttgcatgccccccagtttcctgccccgtggcaaggttcccctgagggaagagcggctggatgggcctcttaatctggcaggcagtggcatcagcagtatcaacatggccctagagatcaacggggtggtctacactggtgtcctctttgcccgccgccagcctgtgccagcttcccagggtccaaccaaccctgcacccccaccctccacagggcccccttccagcatcttgccctgagaggtcctacttgaaactaagagtcccagccccattgctgaggggggaggagaccccctgctttgattctttctggctg

SEQ ID NO: 109278 - DNA, 5562 bp, Homo sapiens
  Payload ID: 1467
  Gene Symbol: ARID4A
  Gene Name: AT rich interactive domain 4A (RBP1-like)
  Uniprot ID: P29374
  ENST ID: ENST00000348476
  CDS Start-End: 255-3821
caataggagttcgtgtagaagcgagtctgctcaacagcttgttatttggtggattgtggcagtaaatcggggcgagtggggaacccggcgcaggaactgcagccgcggctgggagtggtgctgcccggacgggggcccacggaggtcagaggggaggaggactctggagctgacagcgcgcacttcacccgcagttgttctagcgactgcgaagatagctcgctgagctggaaccccacagatcaccaacaaaaatgaaggcggcagatgagcctgcctacctgacagtgggaaccgatgtcagtgccaagtaccgaggtgccttctgtgaggcaaagattaagactgtgaaaaggctggtgaaagttaaggtactcctgaaacaggataataccacacaattggtacaagatgaccaagtaaagggtcctttaagagttggagctattgttgaaacaaggacatctgatggatcttttcaggaagctattatcagcaagttgacagatgctagttggtataccgtggtgtttgatgatggtgatgagcgaacattgagacgtacctcactttgtctgaaaggagagagacattttgcagagagtgagacacttgaccagcttccattaacaaatccagagcattttggaactccagtaattgcaaagaagacgaacagaggaaggagatcttctcttcctgttactgaagatgaaaaggaagaagaaagcagtgaagaggaagatgaagacaagcgccgtctcaatgatgaattactaggaaaagttgtaagtgtggtgtctgcaacggagaggactgaatggtatcctgctttggtaatatctcccagctgtaatgatgacatcacagtgaaaaaggatcagtgtttagttcgatcatttattgattctaaattttactctatagcaagaaaggacattaaggaagtagacattctcaatctaccggaatctgagctctccactaaaccagggcttcagaaagcaagcatcttcttaaaaactagagttgttcctgataattggaaaatggatataagtgaaatccttgagtcatccagtagtgatgatgaagatggcccagctgaagaaaatgatgaagagaaggaaaaggaggccaaaaagacagaagaagaggtgcctgaggaagaacttgatcctgaagagagggacaacttcctccagcagctttataagtttatggaagacagaggtactccaatcaacaaaccacctgttttgggctataaagatctcaatctcttcaaactcttcagactggtttatcatcagggtggatgtgacaatattgatagtggtgctgtatggaagcaaatttatatggaccttggcattcctattttgaattcagctgcttcctacaatgtaaaaactgcttatagaaagtatctctatggttttgaggagtactgccgttcggcaaatattcagttcagaactgttcatcaccatgaaccaaaagtaaaagaggaaaaaaaagacttagaagaatcaatggaagaggctctcaaattagatcaagaaatgcctttaacagaagtgaagagtgaacctgaggaaaatatcgattcaaacagtgaaagtgaaagagaagagatagaattaaaatctccgaggggacgaaggagaattgctcgagatgtaaattctattaaaaaggaaattgaagaagagaaaacagaagacaaattaaaagataatgatacagaaaataaggatgtagatgatgactatgaaactgcagagaaaaaagaaaatgagctactactggggagaaaaaatacaccaaagcaaaaagagaagaaaattaaaaaacaggaggattctgacaaagactcagatgaagaggaagagaaaagccaagagagggaagaaactgaaagcaaatgtgactctgaaggagaggaagatgaggaagacatggaaccctgcctaacaggaaccaaagtgaaagtaaaatatggacgagggaagactcagaaaatttatgaagccagtattaaaagcactgaaattgatgacggagaagttttatatttggtacattactatggatggaatgtcaggtatgatgagtgggtgaaggctgacaggataatctggcctttggacaaaggtggaccaaagaaaaaacagaagaaaaaagctaaaaataaagaagatagtgaaaaggacgaaaagagagatgaggagaggcagaagtcaaaacggggacgacctcctttaaaatcaaccctctcatcaaacatgccgtatggcttatctaagacagcaaacagtgaaggaaaatcagactcttgttcatctgatagtgaaacagaagatgctttagaaaagaatttaataaatgaagaactttctcttaaagatgaactagaaaaaaatgaaaatttgaatgatgataagctagatgaagaaaatccaaagatttctgcacatatattaaaagaaaatgataggactcaaatgcagcctttagaaaccctgaagttagaagttggagagaatgaacaaatagtacagatttttgggaacaaaatggaaaaaacagaagaagttaagaaagaagccgaaaaatctccaaaaggaaagggaagacgaagcaagacaaaagatctttctttagaaattataaagatttcatcatttggccagaatgaagcaggaagtgaacctcatatagaagctcatagtcttgaattgtcttcattagacaataaaaacttttcttctgctacagaagatgaaattgaccaatgtgtgaaagaaaagaagttgaaacggaaaatactaggacaatcatcgccagagaaaaaaataagaattgagaatggaatggaaatgacaaatactgtatctcaagaaaggaccagtgattgtattggatctgagggaatgaaaaacttaaattttgaacagcactttgaaagagaaaatgaaggaatgccatcattgatagcagagtcaaaccaatgcatccaacaactgactagtgaaagatttgatagtccagctgaagaaactgtaaatattccactaaaagaagatgaggatgcaatgcctctgatcgggcctgaaaccttggtttgccatgaagtagatttggatgatttggatgaaaaggataagaccagcattgaggatgtagcagttgaaagctctgagtctaactctcttgtttctattccacctgccctacctcctgtagtccaacataacttttcagtagcttcaccacttactcttagtcaagatgagtctcgaagcgtaaaaagtgagagtgatataacgattgaagttgatagtattgctgaagaatctcaagaaggtctctgtgagagggaatcggcaaatggatttgaaactaatgttgcctctggtacctgtagtataattgtacaagagagagagagcagagagaagggtcagaagaggccaagtgatggaaatagtggattaatggcaaaaaagcaaaagcgtaccccaaagcgaacaagtgctgcagccaaaaatgaaaagaatggaacagatgaattagataatatgaacagtacagagagaatctcatttctccaagaaaaactacaggaaatcagaaaatattatatgtctttgaagtctgaagttgcaaccatagacaggaggagaaaaagattaaaaaagaaagacagggaagtgtctcatgcgggagcctccatgtcatctgcttcatcagacactggaatgagtccctcatcatcatctcccccacaaaatgtacttgctgtagaatgcaggtgataaacattttctctaccttcccagcagtttgctgccatggacataaatccccaaaccctgaattacaaccacagaaagcactcaactggtttgacattgctaagtatatcctgtatacttttccaggctggattgtatctattcccctctctcttcttttttcttgttgcaaaaaataagctgattaataagtgaaggttaagcagcctgccatatttgtcataatttttcctctttacttttgtttttcgtttgttgtgatatagaacaaagggcacttagcaaatttgaatttgtataataaagctttcaggtgttacagaaatcgtagacaagcaagtgcacatgataaacatcaaaatattacccagctgaatagttactgctgcactttcactaagatgtatttgaacacttggtgagtagggggtttatgttgtgttttttttcattatcgttttttttatttttgtggaagcacttgctatttagaactgccaaagtatatgttcagcagtgtgcccaggattgaaggtgtaaatgggacaaaataaattgtgaaaggaagtgtagttgactgaaaactacagttgtaataagtcttccactttttataggatttttgagcacaaaattatgcaaatattttaatgtttattaatgtttacagtggaattgtgaataagttttcagtggactatcttatcccttgacaaaaatattttgtcttttttctatgtaatttcagagtttttattttgttacaaaaagacaaaaatgaaatatataacaacaatgaagttatttaacaagatttctaaagctgaaatttttgtgtaaaataaggtattatcttgcaacttgttaaatatatttattcagacattggatgttgtatttttatgtattttttaaaatattaataaaatttaaaaaaagaaaattctaggttaattcactctttggatgacaatagctctcagctgtcctttttacaggaggttgcatcctgcagccttgcctgtgttaaagggagtctgtctcagtccatcaaacagtatagaactataaatgggcatctggatcattaaagtatgtccttgtttagaaactttggcagtcctagtatttaaactgttttgaggatcaaatttttggttgcccttaagatactttgtcacagtttttatgtttgctatactgccgaatgaatttatatctcccaaagttgagatgcaacaactaagtaaagcaactatgtatgctttgtctgtgaattgttccacagactgatagattttgtaaataattcttccaaaatcatgtatttaaagcagttttgcatatacattatgtaaaaaggtgattttataaaagcagtttttaaattcatgtttgtacattgaaaggggttttttttttaaacctccttttctgtgtttaatatgctgtagaataataacctagatgctctagactgtatatcaggatctgatttacaagaaaaagtcagagctaaacactagtgatggcatagcattactgaaatcattgtttcttaatttcattttactacattgtgaacttgtgattcagattccattttctcagagaattaaaaacaaaaaaagtactcttgtaaaatgcacttttctgtcttttctttgcaaagcagaagtatctcaatgtaaaataaaaatggagctcagtgggcagtattaataaaggccatgttttaaac

SEQ ID NO: 109279 - DNA, 5891 bp, Homo sapiens
  Payload ID: 1467
  Gene Symbol: ARID4A
  Gene Name: AT rich interactive domain 4A (RBP1-like)
  Uniprot ID: P29374
  ENST ID: ENST00000355431
  CDS Start-End: 374-4147
taagtggaagatgtcctacctgctgtttttctcaccaatccatgaagtttcacagctacatccaatgaggacggcaggtagcgaggtcctatccgaagctcttcggcgtcatgagcagccaataggagttcgtgtagaagcgagtctgctcaacagcttgttatttggtggattgtggcagtaaatcggggcgagtggggaacccggcgcaggaactgcagccgcggctgggagtggtgctgcccggacgggggcccacggaggtcagaggggaggaggactctggagctgacagcgcgcacttcacccgcagttgttctagcgactgcgaagatagctcgctgagctggaaccccacagatcaccaacaaaaatgaaggcggcagatgagcctgcctacctgacagtgggaaccgatgtcagtgccaagtaccgaggtgccttctgtgaggcaaagattaagactgtgaaaaggctggtgaaagttaaggtactcctgaaacaggataataccacacaattggtacaagatgaccaagtaaagggtcctttaagagttggagctattgttgaaacaaggacatctgatggatcttttcaggaagctattatcagcaagttgacagatgctagttggtataccgtggtgtttgatgatggtgatgagcgaacattgagacgtacctcactttgtctgaaaggagagagacattttgcagagagtgagacacttgaccagcttccattaacaaatccagagcattttggaactccagtaattgcaaagaagacgaacagaggaaggagatcttctcttcctgttactgaagatgaaaaggaagaagaaagcagtgaagaggaagatgaagacaagcgccgtctcaatgatgaattactaggaaaagttgtaagtgtggtgtctgcaacggagaggactgaatggtatcctgctttggtaatatctcccagctgtaatgatgacatcacagtgaaaaaggatcagtgtttagttcgatcatttattgattctaaattttactctatagcaagaaaggacattaaggaagtagacattctcaatctaccggaatctgagctctccactaaaccagggcttcagaaagcaagcatcttcttaaaaactagagttgttcctgataattggaaaatggatataagtgaaatccttgagtcatccagtagtgatgatgaagatggcccagctgaagaaaatgatgaagagaaggaaaaggaggccaaaaagacagaagaagaggtgcctgaggaagaacttgatcctgaagagagggacaacttcctccagcagctttataagtttatggaagacagaggtactccaatcaacaaaccacctgttttgggctataaagatctcaatctcttcaaactcttcagactggtttatcatcagggtggatgtgacaatattgatagtggtgctgtatggaagcaaatttatatggaccttggcattcctattttgaattcagctgcttcctacaatgtaaaaactgcttatagaaagtatctctatggttttgaggagtactgccgttcggcaaatattcagttcagaactgttcatcaccatgaaccaaaagtaaaagaggaaaaaaaagacttagaagaatcaatggaagaggctctcaaattagatcaagaaatgcctttaacagaagtgaagagtgaacctgaggaaaatatcgattcaaacagtgaaagtgaaagagaagagatagaattaaaatctccgaggggacgaaggagaattgctcgagatgtaaattctattaaaaaggaaattgaagaagagaaaacagaagacaaattaaaagataatgatacagaaaataaggatgtagatgatgactatgaaactgcagagaaaaaagaaaatgagctactactggggagaaaaaatacaccaaagcaaaaagagaagaaaattaaaaaacaggaggattctgacaaagactcagatgaagaggaagagaaaagccaagagagggaagaaactgaaagcaaatgtgactctgaaggagaggaagatgaggaagacatggaaccctgcctaacaggaaccaaagtgaaagtaaaatatggacgagggaagactcagaaaatttatgaagccagtattaaaagcactgaaattgatgacggagaagttttatatttggtacattactatggatggaatgtcaggtatgatgagtgggtgaaggctgacaggataatctggcctttggacaaaggtggaccaaagaaaaaacagaagaaaaaagctaaaaataaagaagatagtgaaaaggacgaaaagagagatgaggagaggcagaagtcaaaacggggacgacctcctttaaaatcaaccctctcatcaaacatgccgtatggcttatctaagacagcaaacagtgaaggaaaatcagactcttgttcatctgatagtgaaacagaagatgctttagaaaagaatttaataaatgaagaactttctcttaaagatgaactagaaaaaaatgaaaatttgaatgatgataagctagatgaagaaaatccaaagatttctgcacatatattaaaagaaaatgataggactcaaatgcagcctttagaaaccctgaagttagaagttggagagaatgaacaaatagtacagatttttgggaacaaaatggaaaaaacagaagaagttaagaaagaagccgaaaaatctccaaaaggaaagggaagacgaagcaagacaaaagatctttctttagaaattataaagatttcatcatttggccagaatgaagcaggaagtgaacctcatatagaagctcatagtcttgaattgtcttcattagacaataaaaacttttcttctgctacagaagatgaaattgaccaatgtgtgaaagaaaagaagttgaaacggaaaatactaggacaatcatcgccagagaaaaaaataagaattgagaatggaatggaaatgacaaatactgtatctcaagaaaggaccagtgattgtattggatctgagggaatgaaaaacttaaattttgaacagcactttgaaagagaaaatgaaggaatgccatcattgatagcagagtcaaaccaatgcatccaacaactgactagtgaaagatttgatagtccagctgaagaaactgtaaatattccactaaaagaagatgaggatgcaatgcctctgatcgggcctgaaaccttggtttgccatgaagtagatttggatgatttggatgaaaaggataagaccagcattgaggatgtagcagttgaaagctctgagtctaactctcttgtttctattccacctgccctacctcctgtagtccaacataacttttcagtagcttcaccacttactcttagtcaagatgagtctcgaagcgtaaaaagtgagagtgatataacgattgaagttgatagtattgctgaagaatctcaagaaggtctctgtgagagggaatcggcaaatggatttgaaactaatgttgcctctggtacctgtagtataattgtacaagagagagagagcagagagaagggtcagaagaggccaagtgatggaaatagtggattaatggcaaaaaagcaaaagcgtaccccaaagcgaacaagtgctgcagccaaaaatgaaaagaatggaacaggacaaagcagtgatagtgaagatcttcctgtcctagacaattcaagtaaatgtaccccagtaaagcatcttaatgtatctaagccacagaaacttgcacgatctcctgcaagaatatccccgcacatcaaagatggagagaaagataaacacagagaaaaacatccgaattcatcccctaggacatataaatggagctttcagctcaatgaattagataatatgaacagtacagagagaatctcatttctccaagaaaaactacaggaaatcagaaaatattatatgtctttgaagtctgaagttgcaaccatagacaggaggagaaaaagattaaaaaagaaagacagggaagtgtctcatgcgggagcctccatgtcatctgcttcatcagacactggaatgagtccctcatcatcatctcccccacaaaatgtacttgctgtagaatgcaggtgataaacattttctctaccttcccagcagtttgctgccatggacataaatccccaaaccctgaattacaaccacagaaagcactcaactggtttgacattgctaagtatatcctgtatacttttccaggctggattgtatctattcccctctctcttcttttttcttgttgcaaaaaataagctgattaataagtgaaggttaagcagcctgccatatttgtcataatttttcctctttacttttgtttttcgtttgttgtgatatagaacaaagggcacttagcaaatttgaatttgtataataaagctttcaggtgttacagaaatcgtagacaagcaagtgcacatgataaacatcaaaatattacccagctgaatagttactgctgcactttcactaagatgtatttgaacacttggtgagtagggggtttatgttgtgttttttttcattatcgttttttttatttttgtggaagcacttgctatttagaactgccaaagtatatgttcagcagtgtgcccaggattgaaggtgtaaatgggacaaaataaattgtgaaaggaagtgtagttgactgaaaactacagttgtaataagtcttccactttttataggatttttgagcacaaaattatgcaaatattttaatgtttattaatgtttacagtggaattgtgaataagttttcagtggactatcttatcccttgacaaaaatattttgtcttttttctatgtaatttcagagtttttattttgttacaaaaagacaaaaatgaaatatataacaacaatgaagttatttaacaagatttctaaagctgaaatttttgtgtaaaataaggtattatcttgcaacttgttaaatatatttattcagacattggatgttgtatttttatgtattttttaaaatattaataaaatttaaaaaaagaaaattctaggttaattcactctttggatgacaatagctctcagctgtcctttttacaggaggttgcatcctgcagccttgcctgtgttaaagggagtctgtctcagtccatcaaacagtatagaactataaatgggcatctggatcattaaagtatgtccttgtttagaaactttggcagtcctagtatttaaactgttttgaggatcaaatttttggttgcccttaagatactttgtcacagtttttatgtttgctatactgccgaatgaatttatatctcccaaagttgagatgcaacaactaagtaaagcaactatgtatgctttgtctgtgaattgttccacagactgatagattttgtaaataattcttccaaaatcatgtatttaaagcagttttgcatatacattatgtaaaaaggtgattttataaaagcagtttttaaattcatgtttgtacattgaaaggggttttttttttaaacctccttttctgtgtttaatatgctgtagaataataacctagatgctctagactgtatatcaggatctgatttacaagaaaaagtcagagctaaacactagtgatggcatagcattactgaaatcattgtttcttaatttcattttactacattgtgaacttgtgattcagattccattttctcagagaattaaaaacaaaaaaagtactcttgtaaaatgcacttttctgtcttttctttgcaaagcagaagtatctcaatgtaaaataaaaatggagctcagtgggcagtattaataaaggccatgttttaaacata

SEQ ID NO: 109280 - DNA, 4051 bp, Homo sapiens
  Payload ID: 1467
  Gene Symbol: ARID4A
  Gene Name: AT rich interactive domain 4A (RBP1-like)
  Uniprot ID: P29374
  ENST ID: ENST00000395168
  CDS Start-End: 203-3814
attgtggcagtaaatcggggcgagtggggaacccggcgcaggaactgcagccgcggctgggagtggtgctgcccggacgggggcccacggaggtcagaggggaggaggactctggagctgacagcgcgcacttcacccgcagttgttctagcgactgcgaagatagctcgctgagctggaaccccacagatcaccaacaaaaatgaaggcggcagatgagcctgcctacctgacagtgggaaccgatgtcagtgccaagtaccgaggtgccttctgtgaggcaaagattaagactgtgaaaaggctggtgaaagttaaggtactcctgaaacaggataataccacacaattggtacaagatgaccaagtaaagggtcctttaagagttggagctattgttgaaacaaggacatctgatggatcttttcaggaagctattatcagcaagttgacagatgctagttggtataccgtggtgtttgatgatggtgatgagcgaacattgagacgtacctcactttgtctgaaaggagagagacattttgcagagagtgagacacttgaccagcttccattaacaaatccagagcattttggaactccagtaattgcaaagaagacgaacagaggaaggagatcttctcttcctgttactgaagatgaaaaggaagaagaaagcagtgaagaggaagatgaagacaagcgccgtctcaatgatgaattactaggaaaagttgtaagtgtggtgtctgcaacggagaggactgaatggtatcctgctttggtaatatctcccagctgtaatgatgacatcacagtgaaaaaggatcagtgtttagttcgatcatttattgattctaaattttactctatagcaagaaaggacattaaggaagtagacattctcaatctaccggaatctgagctctccactaaaccagggcttcagaaagcaagcatcttcttaaaaactagagttgttcctgataattggaaaatggatataagtgaaatccttgagtcatccagtagtgatgatgaagatggcccagctgaagaaaatgatgaagagaaggaaaaggaggccaaaaagacagaagaagaggtgcctgaggaagaacttgatcctgaagagagggacaacttcctccagcagctttataagtttatggaagacagaggtactccaatcaacaaaccacctgttttgggctataaagatctcaatctcttcaaactcttcagactggtttatcatcagggtggatgtgacaatattgatagtggtgctgtatggaagcaaatttatatggaccttggcattcctattttgaattcagctgcttcctacaatgtaaaaactgcttatagaaagtatctctatggttttgaggagtactgccgttcggcaaatattcagttcagaactgttcatcaccatgaaccaaaagtaaaagaggaaaaaaaagacttagaagaatcaatggaagaggctctcaaattagatcaagaaatgcctttaacagaagtgaagagtgaacctgaggaaaatatcgattcaaacagtgaaagtgaaagagaagagatagaattaaaatctccgaggggacgaaggagaattgctcgagatgtaaattctattaaaaaggaaattgaagaagagaaaacagaagacaaattaaaagataatgatacagaaaataaggatgtagatgatgactatgaaactgcagagaaaaaagaaaatgagctactactggggagaaaaaatacaccaaagcaaaaagagaagaaaattaaaaaacaggaggattctgacaaagactcagatgaagaggaagagaaaagccaagagagggaagaaactgaaagcaaatgtgactctgaaggagaggaagatgaggaagacatggaaccctgcctaacaggaaccaaagtgaaagtaaaatatggacgagggaagactcagaaaatttatgaagccagtattaaaagcactgaaattgatgacggagaagttttatatttggtacattactatggatggaatgtcaggtatgatgagtgggtgaaggctgacaggataatctggcctttggacaaaggtggaccaaagaaaaaacagaagaaaaaagctaaaaataaagaagatagtgaaaaggacgaaaagagagatgaggagaggcagaagtcaaaacggggacgacctcctttaaaatcaaccctctcatcaaacatgccgtatggcttatctaagacagcaaacagtgaaggaaaatcagactcttgttcatctgatagtgaaacagaagatgctttagaaaagaatttaataaatgaagaactttctcttaaagatgaactagaaaaaaatgaaaatttgaatgatgataagctagatgaagaaaatccaaagatttctgcacatatattaaaagaaaatgataggactcaaatgcagcctttagaaaccctgaagttagaagttggagagaatgaacaaatagtacagatttttgggaacaaaatggaaaaaacagaagaagttaagaaagaagccgaaaaatctccaaaaggaaagggaagacgaagcaagacaaaagatctttctttagaaattataaagatttcatcatttggccagaatgaagcaggaagtgaacctcatatagaagctcatagtcttgaattgtcttcattagacaataaaaacttttcttctgctacagaagatgaaattgaccaatgtgtgaaagaaaagaagttgaaacggaaaatactaggacaatcatcgccagagaaaaaaataagaattgagaatggaatggaaatgacaaatactgtatctcaagaaaggaccagtgattgtattggatctgagggaatgaaaaacttaaattttgaacagcactttgaaagagaaaatgaaggaatgccatcattgatagcagagtcaaaccaatgcatccaacaactgactagtgaaagatttgatagtccagctgaagaaactgtaaatattccactaaaagaagatgaggatgcaatgcctctgatcgggcctgaaaccttggtttgccatgaagtagatttggatgatttggatgaaaaggataagaccagcattgaggatgtagcagttgaaagctctgagtctaactctcttgtttctattccacctgccctacctcctgtagtccaacataacttttcagtagcttcaccacttactcttagtcaagatgagtctcgaagcgtaaaaagtgagagtgatataacgattgaagttgatagtattgctgaagaatctcaagaaggtctctgtgagagggaatcggcaaatggatttgaaactaatgttgcctctggtacctgtagtataattgtacaagagagagagagcagagagaagggtcagaagaggccaagtgatggaaatagtggattaatggcaaaaaagcaaaagcgtaccccaaagcgaacaagtgctgcagccaaaaatgaaaagaatggaacaggacaaagcagtgatagtgaagatcttcctgtcctagacaattcaaatgaattagataatatgaacagtacagagagaatctcatttctccaagaaaaactacaggaaatcagaaaatattatatgtctttgaagtctgaagttgcaaccatagacaggaggagaaaaagattaaaaaagaaagacagggaagtgtctcatgcgggagcctccatgtcatctgcttcatcagacactggaatgagtccctcatcatcatctcccccacaaaatgtacttgctgtagaatgcaggtgataaacattttctctaccttcccagcagtttgctgccatggacataaatccccaaaccctgaattacaaccacagaaagcactcaactggtttgacattgctaagtatatcctgtatacttttccaggctggattgtatctattcccctctctcttcttttttcttgttgcaaaaaataagctgattaataagtgaaggttaagcagcctgccatatttgtcataatttttcctcttt

SEQ ID NO: 109281 - DNA, 965 bp, Homo sapiens
  Payload ID: 1467
  Gene Symbol: ARID4A
  Gene Name: AT rich interactive domain 4A (RBP1-like)
  ENST ID: ENST00000445108
  CDS Start-End: 171-965
ccggcgcaggaactgcagccgcggctgggagtggtgctgcccggacgggggcccacggaggtcagaggggaggaggactctggagctgacagcgcgcacttcacccgcagttgttctagcgactgcgaagatagctcgctgagctggaaccccacagatcaccaacaaaaatgaaggtactcctgaaacaggataataccacacaattggtacaagatgaccaagtaaagggtcctttaagagttggagctattgttgaaacaaggacatctgatggatcttttcaggaagctattatcagcaagttgacagatgctagttggtataccgtggtgtttgatgatggtgatgagcgaacattgagacgtacctcactttgtctgaaaggagagagacattttgcagagagtgagacacttgaccagcttccattaacaaatccagagcattttggaactccagtaattgcaaagaagacgaacagaggaaggagatcttctcttcctgttactgaagatgaaaaggaagaagaaagcagtgaagaggaagatgaagacaagcgccgtctcaatgatgaattactaggaaaagttgtaagtgtggtgtctgcaacggagaggactgaatggtatcctgctttggtaatatctcccagctgtaatgatgacatcacagtgaaaaaggatcagtgtttagttcgatcatttattgattctaaattttactctatagcaagaaaggacattaaggaagtagacattctcaatctaccggaatctgagctctccactaaaccagggcttcagaaagcaagcatcttcttaaaaactagagttgttcctgataattggaaaatggatataagtgaaatccttgagtcatccagtagtgatgatgaagatggcccagctgaagaaaatgatgaagagaaggaaaaggaggccaaaaagacagaagaagaggtg

SEQ ID NO: 109282 - DNA, 5783 bp, Homo sapiens
  Payload ID: 1467
  Gene Symbol: ARID4A
  Gene Name: AT rich interactive domain 4A (RBP1-like)
  Uniprot ID: P29374
  ENST ID: ENST00000431317
  CDS Start-End: 319-3885
attccgggtcaaagtggccagcgaggcgggggcgcggtgggccgctggcgagctccggggcggaacgggctgccctttggcgctcgtggggttctcgctgccccctcagctcctgcgtcctggctgccctcgtaaggggtcttgtcccttggctggtgaggattctgcccctccccgctggcgtttgtttactttctttcccttggtcgctccccgcagttgactgattatgtctgtgcctgtctttccccctccccatagttctagcgactgcgaagatagctcgctgagctggaaccccacagatcaccaacaaaaatgaaggcggcagatgagcctgcctacctgacagtgggaaccgatgtcagtgccaagtaccgaggtgccttctgtgaggcaaagattaagactgtgaaaaggctggtgaaagttaaggtactcctgaaacaggataataccacacaattggtacaagatgaccaagtaaagggtcctttaagagttggagctattgttgaaacaaggacatctgatggatcttttcaggaagctattatcagcaagttgacagatgctagttggtataccgtggtgtttgatgatggtgatgagcgaacattgagacgtacctcactttgtctgaaaggagagagacattttgcagagagtgagacacttgaccagcttccattaacaaatccagagcattttggaactccagtaattgcaaagaagacgaacagaggaaggagatcttctcttcctgttactgaagatgaaaaggaagaagaaagcagtgaagaggaagatgaagacaagcgccgtctcaatgatgaattactaggaaaagttgtaagtgtggtgtctgcaacggagaggactgaatggtatcctgctttggtaatatctcccagctgtaatgatgacatcacagtgaaaaaggatcagtgtttagttcgatcatttattgattctaaattttactctatagcaagaaaggacattaaggaagtagacattctcaatctaccggaatctgagctctccactaaaccagggcttcagaaagcaagcatcttcttaaaaactagagttgttcctgataattggaaaatggatataagtgaaatccttgagtcatccagtagtgatgatgaagatggcccagctgaagaaaatgatgaagagaaggaaaaggaggccaaaaagacagaagaagaggtgcctgaggaagaacttgatcctgaagagagggacaacttcctccagcagctttataagtttatggaagacagaggtactccaatcaacaaaccacctgttttgggctataaagatctcaatctcttcaaactcttcagactggtttatcatcagggtggatgtgacaatattgatagtggtgctgtatggaagcaaatttatatggaccttggcattcctattttgaattcagctgcttcctacaatgtaaaaactgcttatagaaagtatctctatggttttgaggagtactgccgttcggcaaatattcagttcagaactgttcatcaccatgaaccaaaagtaaaagaggaaaaaaaagacttagaagaatcaatggaagaggctctcaaattagatcaagaaatgcctttaacagaagtgaagagtgaacctgaggaaaatatcgattcaaacagtgaaagtgaaagagaagagatagaattaaaatctccgaggggacgaaggagaattgctcgagatgtaaattctattaaaaaggaaattgaagaagagaaaacagaagacaaattaaaagataatgatacagaaaataaggatgtagatgatgactatgaaactgcagagaaaaaagaaaatgagctactactggggagaaaaaatacaccaaagcaaaaagagaagaaaattaaaaaacaggaggattctgacaaagactcagatgaagaggaagagaaaagccaagagagggaagaaactgaaagcaaatgtgactctgaaggagaggaagatgaggaagacatggaaccctgcctaacaggaaccaaagtgaaagtaaaatatggacgagggaagactcagaaaatttatgaagccagtattaaaagcactgaaattgatgacggagaagttttatatttggtacattactatggatggaatgtcaggtatgatgagtgggtgaaggctgacaggataatctggcctttggacaaaggtggaccaaagaaaaaacagaagaaaaaagctaaaaataaagaagatagtgaaaaggacgaaaagagagatgaggagaggcagaagtcaaaacggggacgacctcctttaaaatcaaccctctcatcaaacatgccgtatggcttatctaagacagcaaacagtgaaggaaaatcagactcttgttcatctgatagtgaaacagaagatgctttagaaaagaatttaataaatgaagaactttctcttaaagatgaactagaaaaaaatgaaaatttgaatgatgataagctagatgaagaaaatccaaagatttctgcacatatattaaaagaaaatgataggactcaaatgcagcctttagaaaccctgaagttagaagttggagagaatgaacaaatagtacagatttttgggaacaaaatggaaaaaacagaagaagttaagaaagaagccgaaaaatctccaaaaggaaagggaagacgaagcaagacaaaagatctttctttagaaattataaagatttcatcatttggccagaatgaagcaggaagtgaacctcatatagaagctcatagtcttgaattgtcttcattagacaataaaaacttttcttctgctacagaagatgaaattgaccaatgtgtgaaagaaaagaagttgaaacggaaaatactaggacaatcatcgccagagaaaaaaataagaattgagaatggaatggaaatgacaaatactgtatctcaagaaaggaccagtgattgtattggatctgagggaatgaaaaacttaaattttgaacagcactttgaaagagaaaatgaaggaatgccatcattgatagcagagtcaaaccaatgcatccaacaactgactagtgaaagatttgatagtccagctgaagaaactgtaaatattccactaaaagaagatgaggatgcaatgcctctgatcgggcctgaaaccttggtttgccatgaagtagatttggatgatttggatgaaaaggataagaccagcattgaggatgtagcagttgaaagctctgagtctaactctcttgtttctattccacctgccctacctcctgtagtccaacataacttttcagtagcttcaccacttactcttagtcaagatgagtctcgaagcgtaaaaagtgagagtgatataacgattgaagttgatagtattgctgaagaatctcaagaaggtctctgtgagagggaatcggcaaatggatttgaaactaatgttgcctctggtacctgtagtataattgtacaagagagagagagcagagagaagggtcagaagaggccaagtgatggaaatagtggattaatggcaaaaaagcaaaagcgtaccccaaagcgaacaagtgctgcagccaaaaatgaaaagaatggaacagatgaattagataatatgaacagtacagagagaatctcatttctccaagaaaaactacaggaaatcagaaaatattatatgtctttgaagtctgaagttgcaaccatagacaggaggagaaaaagattaaaaaagaaagacagggaagtgtctcatgcgggagcctccatgtcatctgcttcatcagacactggaatgagtccctcatcatcatctcccccacaaaatgtacttgctgtagaatgcaggtgataaacattttctctaccttcccagcagtttgctgccatggacataaatccccaaaccctgaattacaaccacagaaagcactcaactggtttgacattgctaagtatatcctgtatacttttccaggctggattgtatctattcccctctctcttcttttttcttgttgcaaaaaataagctgattaataagtgaaggttaagcagcctgccatatttgtcataatttttcctctttacttttgtttttcgtttgttgtgatatagaacaaagggcacttagcaaatttgaatttgtataataaagctttcaggtgttacagaaatcgtagacaagcaagtgcacatgataaacatcaaaatattacccagctgaatagttactgctgcactttcactaagatgtatttgaacacttggtgagtagggggtttatgttgtgttttttttcattatcgttttttttatttttgtggaagcacttgctatttagaactgccaaagtatatgttcagcagtgtgcccaggattgaaggtgtaaatgggacaaaataaattgtgaaaggaagtgtagttgactgaaaactacagttgtaataagtcttccactttttataggatttttgagcacaaaattatgcaaatattttaatgtttattaatgtttacagtggaattgtgaataagttttcagtggactatcttatcccttgacaaaaatattttgtcttttttctatgtaatttcagagtttttattttgttacaaaaagacaaaaatgaaatatataacaacaatgaagttatttaacaagatttctaaagctgaaatttttgtgtaaaataaggtattatcttgcaacttgttaaatatatttattcagacattggatgttgtatttttatgtattttttaaaatattaataaaatttaaaaaaagaaaattctaggttaattcactctttggatgacaatagctctcagctgtcctttttacaggaggttgcatcctgcagccttgcctgtgttaaagggagtctgtctcagtccatcaaacagtatagaactataaatgggcatctggatcattaaagtatgtccttgtttagaaactttggcagtcctagtatttaaactgttttgaggatcaaatttttggttgcccttaagatactttgtcacagtttttatgtttgctatactgccgaatgaatttatatctcccaaagttgagatgcaacaactaagtaaagcaactatgtatgctttgtctgtgaattgttccacagactgatagattttgtaaataattcttccaaaatcatgtatttaaagcagttttgcatatacattatgtaaaaaggtgattttataaaagcagtttttaaattcatgtttgtacattgaaaggggttttttttttaaacctccttttctgtgtttaatatgctgtagaataataacctagatgctctagactgtatatcaggatctgatttacaagaaaaagtcagagctaaacactagtgatggcatagcattactgaaatcattgtttcttaatttcattttactacattgtgaacttgtgattcagattccattttctcagagaattaaaaacaaaaaaagtactcttgtaaaatgcacttttctgtcttttctttgcaaagcagaagtatctcaatgtaaaataaaaatggagctcagtgggcagtattaataaaggccatgttttaaacataggctttatacttttagttttcatttaagtgattgcttttttcctaagtgcttgtaacttacagttggaaaatcagatttcacaaaaccaagcattttagtatattcagcctttacaataaaatatttctactaattataaaaatgaaaaaaaaa

SEQ ID NO: 109283 - DNA, 697 bp, Homo sapiens
  Payload ID: 1467
  Gene Symbol: ARID4A
  Gene Name: AT rich interactive domain 4A (RBP1-like)
  ENST ID: ENST00000431612
  CDS Start-End: 200-322
gtggcagtaaatcggggcgagtggggaacccggcgcaggaactgcagccgcggctgggagtggtgctgcccggacgggggcccacggaggtcagaggggaggaggactctggagctgacagcgcgcacttcacccgcagttgttctagcgactgcgaagatagctcgctgagctggaaccccacagatcaccaacaaaaatgaaggcggcagatgagcctgcctacctgacagtgggaaccgatgtcagtgccaagtaccgaggtgccttctgtgaggcaaagattaagactgtgaaaaggctggtgaaagttaagaattaagcaccataaaaggaggaaacgtctgacttgttctatgcccaacacatagagtagtgcctgatacatagtggaccctcaaaatttgttgaatgaatcagtgaactagagcagtgattcctaaagggtccctccagaccagcagcatcagccttacttgggaacttgttccaaatgcaaattttccccaccccagatctacttcatcagaaactctgggggtactcctgaaacaggataataccacacaattggtacaagatgaccaagtaaagggtcctttaagagttggagctattgttgaaacaaggacatctgatggatcttttcaggaagctattatcagcaagttgacagatgctagttggtataccgtgg

SEQ ID NO: 109284 - DNA, 582 bp, Homo sapiens
  Payload ID: 1467
  Gene Symbol: ARID4A
  Gene Name: AT rich interactive domain 4A (RBP1-like)
  ENST ID: ENST00000424658
  CDS Start-End: 419-582
ggcgccgtgacactccgctgccgccaccgcgggcccggggcgggccgagggggccgagcggcggaggcggggcgcgggccgaagtcggggtatccgggggaccgcggagcggaggctcggcggtcgtctccgcgggggacctggggaagcccgaagggagctctggccttttccggagctatctgtcctggagctccgagttgagcattccgggtcaaagtggccagcgaggcgggggcgcggtgggccgctggcgagctccggggcggaacgggctgccctttggcgctcgtggggttctcgctgccccctcagctcctgcgtcctggctgccctcgtaaggggtcttgtcccttggctgttctagcgactgcgaagatagctcgctgagctggaaccccacagatcaccaacaaaaatgaaggcggcagatgagcctgcctacctgacagtgggaaccgatgtcagtgccaagtaccgaggtgccttctgtgaggcaaagattaagactgtgaaaaggctggtgaaagttaaggtactcctgaaacaggataataccacacaattggtacaagatgacca

SEQ ID NO: 109285 - DNA, 2537 bp, Homo sapiens
  Payload ID: 1467
  Gene Symbol: ARID4A
  Gene Name: AT rich interactive domain 4A (RBP1-like)
  ENST ID: ENST00000417477
  CDS Start-End: 293-2537
aatggaggtttgccagatgctttgaaatgggctgtctttcttttcctttcatgtaatgtctgatttttatgtggaagagaatgtaagtagtgctgtataaccctgcggatgctatgccctaagagggaaagcaaatatttgcaagtcagactgaaaaatgtccagaccctgtactgattaagtagaaggggaatctaaccactttgcatttgaaagaaaatgcagcatatagcctgaggaagaacttgatcctgaagagagggacaacttcctccagcagctttataagtttatggaagacagaggtactccaatcaacaaaccacctgttttgggctataaagatctcaatctcttcaaactcttcagactggtttatcatcagggtggatgtgacaatattgatagtggtgctgtatggaagcaaatttatatggaccttggcattcctattttgaattcagctgcttcctacaatgtaaaaactgcttatagaaagtatctctatggttttgaggagtactgccgttcggcaaatattcagttcagaactgttcatcaccatgaaccaaaagtaaaagaggaaaaaaaagacttagaagaatcaatggaagaggctctcaaattagatcaagaaatgcctttaacagaagtgaagagtgaacctgaggaaaatatcgattcaaacagtgaaagtgaaagagaagagatagaattaaaatctccgaggggacgaaggagaattgctcgagatgtaaattctattaaaaaggaaattgaagaagagaaaacagaagacaaattaaaagataatgatacagaaaataaggatgtagatgatgactatgaaactgcagagaaaaaagaaaatgagctactactggggagaaaaaatacaccaaagcaaaaagagaagaaaattaaaaaacaggaggattctgacaaagactcagatgaagaggaagagaaaagccaagagagggaagaaactgaaagcaaatgtgactctgaaggagaggaagatgaggaagacatggaaccctgcctaacaggaaccaaagtgaaagtaaaatatggacgagggaagactcagaaaatttatgaagccagtattaaaagcactgaaattgatgacggagaagttttatatttggtacattactatggatggaatgtcaggtatgatgagtgggtgaaggctgacaggataatctggcctttggacaaaggtggaccaaagaaaaaacagaagaaaaaagctaaaaataaagaagatagtgaaaaggacgaaaagagagatgaggagaggcagaagtcaaaacggggacgacctcctttaaaatcaaccctctcatcaaacatgccgtatggcttatctaagacagcaaacagtgaaggaaaatcagactcttgttcatctgatagtgaaacagaagatgctttagaaaagaatttaataaatgaagaactttctcttaaagatgaactagaaaaaaatgaaaatttgaatgatgataagctagatgaagaaaatccaaagatttctgcacatatattaaaagaaaatgataggactcaaatgcagcctttagaaaccctgaagttagaagttggagagaatgaacaaatagtacagatttttgggaacaaaatggaaaaaacagaagaagttaagaaagaagccgaaaaatctccaaaaggaaagggaagacgaagcaagacaaaagatctttctttagaaattataaagatttcatcatttggccagaatgaagcaggaagtgaacctcatatagaagctcatagtcttgaattgtcttcattagacaataaaaacttttcttctgctacagaagatgaaattgaccaatgtgtgaaagaaaagaagttgaaacggaaaatactaggacaatcatcgccagagaaaaaaataagaattgagaatggaatggaaatgacaaatactgtatctcaagaaaggaccagtgattgtattggatctgagggaatgaaaaacttaaattttgaacagcactttgaaagagaaaatgaaggaatgccatcattgatagcagagtcaaaccaatgcatccaacaactgactagtgaaagatttgatagtccagctgaagaaactgtaaatattccactaaaagaagatgaggatgcaatgcctctgatcgggcctgaaaccttggtttgccatgaagtagatttggatgatttggatgaaaaggataagaccagcattgaggatgtagcagttgaaagctctgagtctaactctcttgtttctattccacctgccctacctcctgtagtccaacataacttttcagtagcttcaccacttactcttagtcaagatgagtctcgaagcgtaaaaagtgagagtgatataacgattgaagttgatagtattgctgaagaatctcaagaaggtctctgtgagagggaatcggcaaatggatttgaaactaatgttgcctctggtacctgtagtataattgtacaagagagagagagcagagagaagg

SEQ ID NO: 109286 - DNA, 6067 bp, Homo sapiens
  Payload ID: 1468
  Gene Symbol: ARID4B
  Gene Name: AT rich interactive domain 4B (RBP1-like)
  Uniprot ID: Q4LE39
  ENST ID: ENST00000264183
  CDS Start-End: 499-4437
aaagggggggaacctagagtcggtgggggggaagcgatgtttgcccgtcagtcgagtccggagtgaggagctcggtcgccgaagcggagggagactcttgagcttcatcttgccgccgccacggccaccgcctggacctttgcccggagggagctgcagagggtccatcgccgccgtcctctggagggcagcgcgattgggggcccggacctccagtccgggggggatttttcgtcgtccccctccccccaaccagggagcccgagcggccgccaaacaaaggtaccagtcgccgccgcgggaggaggaggagccggagcctctgcctcagcagccgctggacccgccgcccttcttccccatctctcccccgggcctgctggttttgggggggagaaggagagaggggactctggacgtgccagggtcagatctcgcctccgaggaaggtgcagctgaacctggtgttttagaggataccttggtcccagagtcatcatgaaggcccttgatgagcctccctatttgacagtgggcactgatgtgagtgctaaatacagaggagccttttgtgaagccaagatcaagacagcaaaaagacttgtcaaagtcaaggtgacatttagacatgattcttcaacagtggaagttcaggatgaccacataaagggcccactaaaggtaggagctattgtggaagtgaagaatcttgatggtgcatatcaggaagctgttatcaataaactaacagatgcgagttggtacactgtagtttttgatgacggagatgagaagacactgagacgatcttcactgtgcctgaaaggagagaggcattttgctgaaagtgaaacattagaccagctcccactcaccaaccctgagcattttggcactccagtcataggaaagaaaacaaatagaggaagaagatctaatcatataccagaggaagagtcttcatcatcctccagtgatgaagatgaggatgataggaaacagattgatgagctactaggcaaagttgtatgtgtagattacattagtttggataaaaagaaagcactgtggtttcctgcattggtggtttgtcctgattgtagtgatgagattgctgtaaaaaaggacaatattcttgttcgatctttcaaagatggaaaatttacttcagttccaagaaaagatgtccatgaaattactagtgacactgcaccaaagcctgatgctgttttaaagcaagcctttgaacaggcacttgaatttcacaaaagtagaactattcctgctaactggaagactgaattgaaagaagatagctctagcagtgaagcagaggaagaagaggaggaggaagatgatgaaaaagaaaaggaggataatagcagtgaagaagaagaagaaatagaaccatttccagaagaaagggagaactttcttcagcaattgtacaaatttatggaagatagaggtacacctattaacaaacgacctgtacttggatatcgaaatttgaatctctttaagttattcagacttgtacacaaacttggaggatttgataatattgaaagtggagctgtttggaaacaagtctaccaagatcttggaatccctgtcttaaattcagctgcaggatacaatgttaaatgtgcttataaaaaatacttatatggttttgaggagtactgtagatcagccaacattgaatttcagatggcattgccagagaaagttgttaacaagcaatgtaaggagtgtgaaaatgtaaaagaaataaaagttaaggaggaaaatgaaacagagatcaaagaaataaagatggaggaggagaggaatataataccaagagaagaaaagcctattgaggatgaaattgaaagaaaagaaaatattaagccctctctgggaagtaaaaagaatttattagaatctatacctacacattctgatcaggaaaaagaagttaacattaaaaaaccagaagacaatgaaaatctggatgacaaagatgatgacacaactagggtagatgaatccctcaacataaaggtagaagctgaggaagaaaaagcaaaatctggagatgaaacgaataaagaagaagatgaagatgatgaagaagcagaagaggaggaggaggaggaagaagaagaagaggatgaagatgatgatgacaacaatgaggaagaggagtttgagtgctatccaccaggcatgaaagtccaagtgcggtatggacgagggaaaaatcaaaaaatgtatgaagctagtattaaagattctgatgtcgaaggtggagaggtcctttacttggtgcattactgcggatggaatgtgagatacgatgaatggattaaagcagataaaatagtaagacctgctgataaaaatgtgccaaagataaaacatcggaagaaaataaagaataaattagacaaagaaaaagacaaagatgaaaaatactctccaaaaaactgtaaacttcggcgcttgtccaaaccaccatttcagacaaatccatctcctgaaatggtatccaaactggatctcactgatgccaaaaactctgatactgctcatattaagtccatagaaattacttcgatccttaatggacttcaagcttctgaaagttctgctgaagacagtgagcaggaagatgagagaggtgctcaagacatggataataatggcaaagaggaatctaagattgatcatttgaccaacaacagaaatgatcttatttcaaaggaggaacagaacagttcatctttgctagaagaaaacaaagttcatgcagatttggtaatatccaaaccagtgtcaaaatctccagaaagattaaggaaagatatagaagtattatccgaagatactgattatgaagaagatgaagtcacaaaaaagagaaaggatgtcaagaaggacacaacagataaatcttcaaaaccacaaataaaacgtggtaaaagaaggtattgcaatacagaagagtgtctaaaaactggatcacctggcaaaaaggaagagaaggccaagaacaaagaatcactttgcatggaaaacagtagcaacagctcttcagatgaagatgaagaagaaacaaaagcaaagatgacaccaactaagaaatacaatggtttggaggaaaaaagaaaatctctacggacaactggtttctattcaggattttcagaagtggcagaaaaaaggattaaacttttaaataactctgatgaaagacttcaaaacagcagggccaaagatcgaaaagatgtctggtcaagtattcagggacagtggcctaaaaaaacgctgaaagagcttttttcagactctgatactgaggctgcagcttccccaccgcatcctgccccagaggagggggtggcagaggagtcactgcagactgtggctgaagaggagagttgttcacccagtgtagaactagaaaaaccacctccagtcaatgtcgatagtaaacccattgaagaaaaaacagtagaggtcaatgacagaaaagcagaatttccaagtagtggcagtaattcagtgctaaatacccctcctactacacctgaatcgccttcatcagtcactgtaacagaaggcagccggcagcagtcttctgtaacagtatcagaaccactggctccaaaccaagaagaggttcgaagtatcaagagtgaaactgatagcacaattgaggtggatagtgttgctggggagctccaagacctccagtctgaagggaatagctcgccagcaggttttgatgccagtgtgagctcaagcagtagtaatcagccagaaccagaacatcctgaaaaagcctgtacaggtcagaaaagagtgaaagatgctcagggaggaggaagttcatcaaaaaagcagaaaagaagccataaagcaacagtggtaaacaacaaaaagaagggaaaaggcacaaatagtagtgatagtgaagaactttcagctggtgaaagtataactaagagtcagccagtcaaatcagtttccactggaatgaagtctcatagtaccaaatctcccgcaaggacgcagtctccaggaaaatgtggaaagaatggtgataaggatcctgatctcaaggaacccagtaatcgattacccaaagtttacaaatggagttttcagatgtcggacctggaaaatatgacaagtgccgaacgcatcacaattcttcaagaaaaacttcaagaaatcagaaaacattatctgtcattaaaatctgaagtagcttccattgatcggaggagaaagcgtttaaagaagaaagagagagaaagtgctgctacatcctcatcctcctcttcaccttcatccagttccataacagctgctgttatgttaactttagctgaaccgtcaatgtccagcgcatcacaaaatggaatgtcagttgagtgcaggtgacagcaggacttgctaaagcactttgcacttaatggctgttgagggccactttttttttatactgcacagtggcacaaaaaaatatcagacaagcactattttatatttaaaaattgtttcttgacaagctgacttggcacttaagtgcacttttttatgaagaaaaagtacaatgaactgcttttcctcaagcaataattgtttccaacttgtctgggaattgtgtgtctggtaactggaaggccttccactgtggcaaatggaggcttttcactgcctgtagagacaatacagtaagcatagttaaggggtgggtcagaacatgttaagataacttactgtatatgtattcccttgtattttgttaaagctggaacatttgatatttttccatttatttatgaaaaaatatgaacctattttcatttgtacaaggtaattgttttttaaagcaagtcaccttagggtggctttaattgtataagtcaagcacatgtaataaattcaaaacctgcagttaacaggatattagacatcaatcctggtaaccaaatattaaagattctctttaaaaaagactgaacatgtttacaggtttgaattaggctaaaaggtcttgcagtggcttttcatggcccttcaaattggaatggaactactgtactttgccatttttctataaatcagtatttttttttaattttgatatacattgtgtgaaaaaagaaaatggctaataaactgtattaaatcttaaacaatgtataaagattgtacttagccagttcaaagtgtatatttattcataatgaattataacagttatatttttgtgttttcttgtaaatgtttcttttcccttaaatacagataattcatttgtattgcttattttattatgagctacaacaaaaggacttcaggaacaagtaatgtattagtatggttcaagattgttgataggaactgtctcaaaaggatggtggttattttaaatataaatagctaatgggggtggtaggcctataaaattaaatgccttgtataaaatccaaaatgaatgcaaaattgttttcacttgtattgactttatgttgtatgattccaatctctgttctgtttggcacttgtatttaattcttcacctttgtaagacatttgtatattgtggatgtgttcattcaagctatttaatatctggcactgttaatacacagtactttattgtacagactgttttactgttttaattgtagttctgtgtactttttttggatggggctggcatgttttctttgtttcctggcaatacgacgtgggaatttcaatgcgttttgttgtagatgctaacgtgtcagaatcctttacattcaacttttctaagaaaagcattttcagtcttgtagtgtgtgcttacagtaactaattttgttgaaaatggtttcaagttattcaaatttgtacaggactgtaaagatttgttgacagcaaaatgttgaagaaaaaagcttatagaataaaagctataaagtatatattaggatctgcaaacaatgaagaattatgtaatatattgtacaaatgtaagcaaaggctctgaaataaaatgccatagtttgtgaatccttga

SEQ ID NO: 109287 - DNA, 5811 bp, Homo sapiens
  Payload ID: 1468
  Gene Symbol: ARID4B
  Gene Name: AT rich interactive domain 4B (RBP1-like)
  Uniprot ID: Q4LE39
  ENST ID: ENST00000349213
  CDS Start-End: 501-4181
agaaagggggggaacctagagtcggtgggggggaagcgatgtttgcccgtcagtcgagtccggagtgaggagctcggtcgccgaagcggagggagactcttgagcttcatcttgccgccgccacggccaccgcctggacctttgcccggagggagctgcagagggtccatcgccgccgtcctctggagggcagcgcgattgggggcccggacctccagtccgggggggatttttcgtcgtccccctccccccaaccagggagcccgagcggccgccaaacaaaggtaccagtcgccgccgcgggaggaggaggagccggagcctctgcctcagcagccgctggacccgccgcccttcttccccatctctcccccgggcctgctggttttgggggggagaaggagagaggggactctggacgtgccagggtcagatctcgcctccgaggaaggtgcagctgaacctggtgttttagaggataccttggtcccagagtcatcatgaaggcccttgatgagcctccctatttgacagtgggcactgatgtgagtgctaaatacagaggagccttttgtgaagccaagatcaagacagcaaaaagacttgtcaaagtcaaggtgacatttagacatgattcttcaacagtggaagttcaggatgaccacataaagggcccactaaaggtaggagctattgtggaagtgaagaatcttgatggtgcatatcaggaagctgttatcaataaactaacagatgcgagttggtacactgtagtttttgatgacggagatgagaagacactgagacgatcttcactgtgcctgaaaggagagaggcattttgctgaaagtgaaacattagaccagctcccactcaccaaccctgagcattttggcactccagtcataggaaagaaaacaaatagaggaagaagatctaatcatataccagaggaagagtcttcatcatcctccagtgatgaagatgaggatgataggaaacagattgatgagctactaggcaaagttgtatgtgtagattacattagtttggataaaaagaaagcactgtggtttcctgcattggtggtttgtcctgattgtagtgatgagattgctgtaaaaaaggacaatattcttgttcgatctttcaaagatggaaaatttacttcagttccaagaaaagatgtccatgaaattactagtgacactgcaccaaagcctgatgctgttttaaagcaagcctttgaacaggcacttgaatttcacaaaagtagaactattcctgctaactggaagactgaattgaaagaagatagctctagcagtgaagcagaggaagaagaggaggaggaagatgatgaaaaagaaaaggaggataatagcagtgaagaagaagaagaaatagaaccatttccagaagaaagggagaactttcttcagcaattgtacaaatttatggaagatagaggtacacctattaacaaacgacctgtacttggatatcgaaatttgaatctctttaagttattcagacttgtacacaaacttggaggatttgataatattgaaagtggagctgtttggaaacaagtctaccaagatcttggaatccctgtcttaaattcagctgcaggatacaatgttaaatgtgcttataaaaaatacttatatggttttgaggagtactgtagatcagccaacattgaatttcagatggcattgccagagaaagttgttaacaagcaatgtaaggagtgtgaaaatgtaaaagaaataaaagttaaggaggaaaatgaaacagagatcaaagaaataaagatggaggaggagaggaatataataccaagagaagaaaagcctattgaggatgaaattgaaagaaaagaaaatattaagccctctctgggaagtaaaaagaatttattagaatctatacctacacattctgatcaggaaaaagaagttaacattaaaaaaccagaagacaatgaaaatctggatgacaaagatgatgacacaactagggtagatgaatccctcaacataaaggtagaagctgaggaagaaaaagcaaaatctggatacgatgaatggattaaagcagataaaatagtaagacctgctgataaaaatgtgccaaagataaaacatcggaagaaaataaagaataaattagacaaagaaaaagacaaagatgaaaaatactctccaaaaaactgtaaacttcggcgcttgtccaaaccaccatttcagacaaatccatctcctgaaatggtatccaaactggatctcactgatgccaaaaactctgatactgctcatattaagtccatagaaattacttcgatccttaatggacttcaagcttctgaaagttctgctgaagacagtgagcaggaagatgagagaggtgctcaagacatggataataatggcaaagaggaatctaagattgatcatttgaccaacaacagaaatgatcttatttcaaaggaggaacagaacagttcatctttgctagaagaaaacaaagttcatgcagatttggtaatatccaaaccagtgtcaaaatctccagaaagattaaggaaagatatagaagtattatccgaagatactgattatgaagaagatgaagtcacaaaaaagagaaaggatgtcaagaaggacacaacagataaatcttcaaaaccacaaataaaacgtggtaaaagaaggtattgcaatacagaagagtgtctaaaaactggatcacctggcaaaaaggaagagaaggccaagaacaaagaatcactttgcatggaaaacagtagcaacagctcttcagatgaagatgaagaagaaacaaaagcaaagatgacaccaactaagaaatacaatggtttggaggaaaaaagaaaatctctacggacaactggtttctattcaggattttcagaagtggcagaaaaaaggattaaacttttaaataactctgatgaaagacttcaaaacagcagggccaaagatcgaaaagatgtctggtcaagtattcagggacagtggcctaaaaaaacgctgaaagagcttttttcagactctgatactgaggctgcagcttccccaccgcatcctgccccagaggagggggtggcagaggagtcactgcagactgtggctgaagaggagagttgttcacccagtgtagaactagaaaaaccacctccagtcaatgtcgatagtaaacccattgaagaaaaaacagtagaggtcaatgacagaaaagcagaatttccaagtagtggcagtaattcagtgctaaatacccctcctactacacctgaatcgccttcatcagtcactgtaacagaaggcagccggcagcagtcttctgtaacagtatcagaaccactggctccaaaccaagaagaggttcgaagtatcaagagtgaaactgatagcacaattgaggtggatagtgttgctggggagctccaagacctccagtctgaagggaatagctcgccagcaggttttgatgccagtgtgagctcaagcagtagtaatcagccagaaccagaacatcctgaaaaagcctgtacaggtcagaaaagagtgaaagatgctcagggaggaggaagttcatcaaaaaagcagaaaagaagccataaagcaacagtggtaaacaacaaaaagaagggaaaaggcacaaatagtagtgatagtgaagaactttcagctggtgaaagtataactaagagtcagccagtcaaatcagtttccactggaatgaagtctcatagtaccaaatctcccgcaaggacgcagtctccaggaaaatgtggaaagaatggtgataaggatcctgatctcaaggaacccagtaatcgattacccaaagtttacaaatggagttttcagatgtcggacctggaaaatatgacaagtgccgaacgcatcacaattcttcaagaaaaacttcaagaaatcagaaaacattatctgtcattaaaatctgaagtagcttccattgatcggaggagaaagcgtttaaagaagaaagagagagaaagtgctgctacatcctcatcctcctcttcaccttcatccagttccataacagctgctgttatgttaactttagctgaaccgtcaatgtccagcgcatcacaaaatggaatgtcagttgagtgcaggtgacagcaggacttgctaaagcactttgcacttaatggctgttgagggccactttttttttatactgcacagtggcacaaaaaaatatcagacaagcactattttatatttaaaaattgtttcttgacaagctgacttggcacttaagtgcacttttttatgaagaaaaagtacaatgaactgcttttcctcaagcaataattgtttccaacttgtctgggaattgtgtgtctggtaactggaaggccttccactgtggcaaatggaggcttttcactgcctgtagagacaatacagtaagcatagttaaggggtgggtcagaacatgttaagataacttactgtatatgtattcccttgtattttgttaaagctggaacatttgatatttttccatttatttatgaaaaaatatgaacctattttcatttgtacaaggtaattgttttttaaagcaagtcaccttagggtggctttaattgtataagtcaagcacatgtaataaattcaaaacctgcagttaacaggatattagacatcaatcctggtaaccaaatattaaagattctctttaaaaaagactgaacatgtttacaggtttgaattaggctaaaaggtcttgcagtggcttttcatggcccttcaaattggaatggaactactgtactttgccatttttctataaatcagtatttttttttaattttgatatacattgtgtgaaaaaagaaaatggctaataaactgtattaaatcttaaacaatgtataaagattgtacttagccagttcaaagtgtatatttattcataatgaattataacagttatatttttgtgttttcttgtaaatgtttcttttcccttaaatacagataattcatttgtattgcttattttattatgagctacaacaaaaggacttcaggaacaagtaatgtattagtatggttcaagattgttgataggaactgtctcaaaaggatggtggttattttaaatataaatagctaatgggggtggtaggcctataaaattaaatgccttgtataaaatccaaaatgaatgcaaaattgttttcacttgtattgactttatgttgtatgattccaatctctgttctgtttggcacttgtatttaattcttcacctttgtaagacatttgtatattgtggatgtgttcattcaagctatttaatatctggcactgttaatacacagtactttattgtacagactgttttactgttttaattgtagttctgtgtactttttttggatggggctggcatgttttctttgtttcctggcaatacgacgtgggaatttcaatgcgttttgttgtagatgctaacgtgtcagaatcctttacattcaacttttctaagaaaagcattttcagtcttgtagtgtgtgcttacagtaactaattttgttgaaaatggtttcaagttattcaaatttgtacaggactgtaaagatttgttgacagcaaaatgttgaagaaaaaagcttatagaataaaagctataaagtatatattaggatctgcaaacaatgaagaattatgtaatatattgtacaaatgtaagcaaaggctctgaaataaaatgccatagtttgtgaatccttga

SEQ ID NO: 109288 - DNA, 5946 bp, Homo sapiens
  Payload ID: 1468
  Gene Symbol: ARID4B
  Gene Name: AT rich interactive domain 4B (RBP1-like)
  Uniprot ID: Q4LE39
  ENST ID: ENST00000366603
  CDS Start-End: 378-4316
ggcggggccagatgttgatctcgctcccacttgtcgggtctgagcccggaacgggacgtgggcaggggctctgtggcgggccggtcctgcccgcggcccacaggccctcctggcccctcggtggcccccggccggcctctcgctcggacgcggcgcgtgggggcgcggattcgctcggccgggcgccgaggccctaggggagagcggccggccctgcgccggacgccgggcttgttgtgagtttcttctctgacagaaatggcgtcattgtcgtagacgggaaactccgtcgggtctcgacaatggggacgggaagctgccgagctgtgtgcagctgaacctggtgttttagaggataccttggtcccagagtcatcatgaaggcccttgatgagcctccctatttgacagtgggcactgatgtgagtgctaaatacagaggagccttttgtgaagccaagatcaagacagcaaaaagacttgtcaaagtcaaggtgacatttagacatgattcttcaacagtggaagttcaggatgaccacataaagggcccactaaaggtaggagctattgtggaagtgaagaatcttgatggtgcatatcaggaagctgttatcaataaactaacagatgcgagttggtacactgtagtttttgatgacggagatgagaagacactgagacgatcttcactgtgcctgaaaggagagaggcattttgctgaaagtgaaacattagaccagctcccactcaccaaccctgagcattttggcactccagtcataggaaagaaaacaaatagaggaagaagatctaatcatataccagaggaagagtcttcatcatcctccagtgatgaagatgaggatgataggaaacagattgatgagctactaggcaaagttgtatgtgtagattacattagtttggataaaaagaaagcactgtggtttcctgcattggtggtttgtcctgattgtagtgatgagattgctgtaaaaaaggacaatattcttgttcgatctttcaaagatggaaaatttacttcagttccaagaaaagatgtccatgaaattactagtgacactgcaccaaagcctgatgctgttttaaagcaagcctttgaacaggcacttgaatttcacaaaagtagaactattcctgctaactggaagactgaattgaaagaagatagctctagcagtgaagcagaggaagaagaggaggaggaagatgatgaaaaagaaaaggaggataatagcagtgaagaagaagaagaaatagaaccatttccagaagaaagggagaactttcttcagcaattgtacaaatttatggaagatagaggtacacctattaacaaacgacctgtacttggatatcgaaatttgaatctctttaagttattcagacttgtacacaaacttggaggatttgataatattgaaagtggagctgtttggaaacaagtctaccaagatcttggaatccctgtcttaaattcagctgcaggatacaatgttaaatgtgcttataaaaaatacttatatggttttgaggagtactgtagatcagccaacattgaatttcagatggcattgccagagaaagttgttaacaagcaatgtaaggagtgtgaaaatgtaaaagaaataaaagttaaggaggaaaatgaaacagagatcaaagaaataaagatggaggaggagaggaatataataccaagagaagaaaagcctattgaggatgaaattgaaagaaaagaaaatattaagccctctctgggaagtaaaaagaatttattagaatctatacctacacattctgatcaggaaaaagaagttaacattaaaaaaccagaagacaatgaaaatctggatgacaaagatgatgacacaactagggtagatgaatccctcaacataaaggtagaagctgaggaagaaaaagcaaaatctggagatgaaacgaataaagaagaagatgaagatgatgaagaagcagaagaggaggaggaggaggaagaagaagaagaggatgaagatgatgatgacaacaatgaggaagaggagtttgagtgctatccaccaggcatgaaagtccaagtgcggtatggacgagggaaaaatcaaaaaatgtatgaagctagtattaaagattctgatgtcgaaggtggagaggtcctttacttggtgcattactgcggatggaatgtgagatacgatgaatggattaaagcagataaaatagtaagacctgctgataaaaatgtgccaaagataaaacatcggaagaaaataaagaataaattagacaaagaaaaagacaaagatgaaaaatactctccaaaaaactgtaaacttcggcgcttgtccaaaccaccatttcagacaaatccatctcctgaaatggtatccaaactggatctcactgatgccaaaaactctgatactgctcatattaagtccatagaaattacttcgatccttaatggacttcaagcttctgaaagttctgctgaagacagtgagcaggaagatgagagaggtgctcaagacatggataataatggcaaagaggaatctaagattgatcatttgaccaacaacagaaatgatcttatttcaaaggaggaacagaacagttcatctttgctagaagaaaacaaagttcatgcagatttggtaatatccaaaccagtgtcaaaatctccagaaagattaaggaaagatatagaagtattatccgaagatactgattatgaagaagatgaagtcacaaaaaagagaaaggatgtcaagaaggacacaacagataaatcttcaaaaccacaaataaaacgtggtaaaagaaggtattgcaatacagaagagtgtctaaaaactggatcacctggcaaaaaggaagagaaggccaagaacaaagaatcactttgcatggaaaacagtagcaacagctcttcagatgaagatgaagaagaaacaaaagcaaagatgacaccaactaagaaatacaatggtttggaggaaaaaagaaaatctctacggacaactggtttctattcaggattttcagaagtggcagaaaaaaggattaaacttttaaataactctgatgaaagacttcaaaacagcagggccaaagatcgaaaagatgtctggtcaagtattcagggacagtggcctaaaaaaacgctgaaagagcttttttcagactctgatactgaggctgcagcttccccaccgcatcctgccccagaggagggggtggcagaggagtcactgcagactgtggctgaagaggagagttgttcacccagtgtagaactagaaaaaccacctccagtcaatgtcgatagtaaacccattgaagaaaaaacagtagaggtcaatgacagaaaagcagaatttccaagtagtggcagtaattcagtgctaaatacccctcctactacacctgaatcgccttcatcagtcactgtaacagaaggcagccggcagcagtcttctgtaacagtatcagaaccactggctccaaaccaagaagaggttcgaagtatcaagagtgaaactgatagcacaattgaggtggatagtgttgctggggagctccaagacctccagtctgaagggaatagctcgccagcaggttttgatgccagtgtgagctcaagcagtagtaatcagccagaaccagaacatcctgaaaaagcctgtacaggtcagaaaagagtgaaagatgctcagggaggaggaagttcatcaaaaaagcagaaaagaagccataaagcaacagtggtaaacaacaaaaagaagggaaaaggcacaaatagtagtgatagtgaagaactttcagctggtgaaagtataactaagagtcagccagtcaaatcagtttccactggaatgaagtctcatagtaccaaatctcccgcaaggacgcagtctccaggaaaatgtggaaagaatggtgataaggatcctgatctcaaggaacccagtaatcgattacccaaagtttacaaatggagttttcagatgtcggacctggaaaatatgacaagtgccgaacgcatcacaattcttcaagaaaaacttcaagaaatcagaaaacattatctgtcattaaaatctgaagtagcttccattgatcggaggagaaagcgtttaaagaagaaagagagagaaagtgctgctacatcctcatcctcctcttcaccttcatccagttccataacagctgctgttatgttaactttagctgaaccgtcaatgtccagcgcatcacaaaatggaatgtcagttgagtgcaggtgacagcaggacttgctaaagcactttgcacttaatggctgttgagggccactttttttttatactgcacagtggcacaaaaaaatatcagacaagcactattttatatttaaaaattgtttcttgacaagctgacttggcacttaagtgcacttttttatgaagaaaaagtacaatgaactgcttttcctcaagcaataattgtttccaacttgtctgggaattgtgtgtctggtaactggaaggccttccactgtggcaaatggaggcttttcactgcctgtagagacaatacagtaagcatagttaaggggtgggtcagaacatgttaagataacttactgtatatgtattcccttgtattttgttaaagctggaacatttgatatttttccatttatttatgaaaaaatatgaacctattttcatttgtacaaggtaattgttttttaaagcaagtcaccttagggtggctttaattgtataagtcaagcacatgtaataaattcaaaacctgcagttaacaggatattagacatcaatcctggtaaccaaatattaaagattctctttaaaaaagactgaacatgtttacaggtttgaattaggctaaaaggtcttgcagtggcttttcatggcccttcaaattggaatggaactactgtactttgccatttttctataaatcagtatttttttttaattttgatatacattgtgtgaaaaaagaaaatggctaataaactgtattaaatcttaaacaatgtataaagattgtacttagccagttcaaagtgtatatttattcataatgaattataacagttatatttttgtgttttcttgtaaatgtttcttttcccttaaatacagataattcatttgtattgcttattttattatgagctacaacaaaaggacttcaggaacaagtaatgtattagtatggttcaagattgttgataggaactgtctcaaaaggatggtggttattttaaatataaatagctaatgggggtggtaggcctataaaattaaatgccttgtataaaatccaaaatgaatgcaaaattgttttcacttgtattgactttatgttgtatgattccaatctctgttctgtttggcacttgtatttaattcttcacctttgtaagacatttgtatattgtggatgtgttcattcaagctatttaatatctggcactgttaatacacagtactttattgtacagactgttttactgttttaattgtagttctgtgtactttttttggatggggctggcatgttttctttgtttcctggcaatacgacgtgggaatttcaatgcgttttgttgtagatgctaacgtgtcagaatcctttacattcaacttttctaagaaaagcattttcagtcttgtagtgtgtgcttacagtaactaattttgttgaaaatggtttcaagttattcaaatttgtacaggactgtaaagatttgttgacagcaaaatgttgaagaaaaaagcttatagaataaaagctataaagtatatattaggatctgcaaacaatgaagaattatgtaatatattgtacaaatgtaagcaaaggctctgaaataaaatgccatagtttgtgaatccttga

SEQ ID NO: 109289 - DNA, 1759 bp, Homo sapiens
  Payload ID: 1468
  Gene Symbol: ARID4B
  Gene Name: AT rich interactive domain 4B (RBP1-like)
  ENST ID: ENST00000418304
  CDS Start-End: 311-1759
ggtgggggggaagcgatgtttgcccgtcagtcgagtccggagtgaggagctcggtcgccgaagcggagggagactcttgagcttcatcttgccgccgccacggccaccgcctggacctttgcccggagggagctgcagagggtccatcgccgccgtcctctggagggcagcgcgattgggggcccggacctccagtccgggggggatttttcgtcgtccccctccccccaaccagggagcccgagcggccgccaaacaaaggtgcagctgaacctggtgttttagaggataccttggtcccagagtcatcatgaaggcccttgatgagcctccctatttgacagtgggcactgatgtgagtgctaaatacagaggagccttttgtgaagccaagatcaagacagcaaaaagacttgtcaaagtcaaggtgacatttagacatgattcttcaacagtggaagttcaggatgaccacataaagggcccactaaaggtaggagctattgtggaagtgaagaatcttgatggtgcatatcaggaagctgttatcaataaactaacagatgcgagttggtacactgtagtttttgatgacggagatgagaagacactgagacgatcttcactgtgcctgaaaggagagaggcattttgctgaaagtgaaacattagaccagctcccactcaccaaccctgagcattttggcactccagtcataggaaagaaaacaaatagaggaagaagatctaatcatataccagaggaagagtcttcatcatcctccagtgatgaagatgaggatgataggaaacagattgatgagctactaggcaaagttgtatgtgtagattacattagtttggataaaaagaaagcactgtggtttcctgcattggtggtttgtcctgattgtagtgatgagattgctgtaaaaaaggacaatattcttgttcgatctttcaaagatggaaaatttacttcagttccaagaaaagatgtccatgaaattactagtgacactgcaccaaagcctgatgctgttttaaagcaagcctttgaacaggcacttgaatttcacaaaagtagaactattcctgctaactggaagactgaattgaaagaagatagctctagcagtgaagcagaggaagaagaggaggaggaagatgatgaaaaagaaaaggaggataatagcagtgaagaagaagaagaaatagaaccatttccagaagaaagggagaactttcttcagcaattgtacaaatttatggaagatagaggtacacctattaacaaacgacctgtacttggatatcgaaatttgaatctctttaagttattcagacttgtacacaaacttggaggatttgataatattgaaagtggagctgtttggaaacaagtctaccaagatcttggaatccctgtcttaaattcagctgcaggatacaatgttaaatgtgcttataaaaaatacttatatggttttgaggagtactgtagatcagccaacattgaatttcagatggcattgccagagaaagttgttaacaagcaatgtaaggagtgtgaaaatgtaaaagaaataaaagttaaggaggaaaatgaaacagagatcaaagaaataaagatggaggaggagaggaatataataccaagagaagaaaagcctattgaggatgaaattgaaagaaaagaaaatattaagccctctctgggaagtaaaaagaatttattagaatctatacctacacattct

SEQ ID NO: 109290 - DNA, 5151 bp, Homo sapiens
  Payload ID: 1468
  Gene Symbol: ARID4B
  Gene Name: AT rich interactive domain 4B (RBP1-like)
  Uniprot ID: Q4LE39
  ENST ID: ENST00000421364
  CDS Start-End: 416-3877
gcggagggagactcttgagcttcatcttgccgccgccacggccaccgcctggacctttgcccggagggagctgcagagggtccatcgccgccgtcctctggagggcagcgcgattgggggcccggacctccagtccgggggggatttttcgtcgtccccctccccccaaccagggagcccgagcggccgccaaacaaaggtaccagtcgccgccgcgggaggaggaggagccggagcctctgcctcagcagccgctggacccgccgcccttcttccccatctctcccccgggcctgctggttttgggggggagaaggagagaggggactctggacgtgccagggtcagatctcgcctccgaggaaggtgcagctgaacctggtgttttagaggataccttggtcccagagtcatcatgaaggcccttgatgagcctccctatttgacagtgggcactgatgtgagtgctaaatacagaggagccttttgtgaagccaagatcaagacagcaaaaagacttgtcaaagtcaaggtgacatttagacatgattcttcaacagtggaagttcaggatgaccacataaagggcccactaaaggtaggagctattgtggaagtgaagaatcttgatggtgcatatcaggaagctgttatcaataaactaacagatgcgagttggtacactgtagtttttgatgacggagatgagaagacactgagacgatcttcactgtgcctgaaaggagagaggcattttgctgaaagtgaaacattagaccagctcccactcaccaaccctgagcattttggcactccagtcataggaaagaaaacaaatagaggaagaagatctaatcatataccagaggaagagtcttcatcatcctccagtgatgaagatgaggatgataggaaacagattgatgagctactaggcaaagttgtatgtgtagattacattagtttggataaaaagaaagcactgtggtttcctgcattggtggtttgtcctgattgtagtgatgagattgctgtaaaaaaggacaatattcttgttcgatctttcaaagatggaaaatttacttcagttccaagaaaagatgtccatgaaattactagtgacactgcaccaaagcctgatgctgttttaaagcaagcctttgaacaggcacttgaatttcacaaaagtagaactattcctgctaactggaagactgaattgaaagaagatagctctagcagtgaagcagaggaagaagaggaggaggaagatgatgaaaaagaaaaggaggataatagcagtgaagaagaagaagaaatagaaccatttccagaagaaagggagaactttcttcagcaattgtacaaatttatggaagatagaggtacacctattaacaaacgacctgtacttggatatcgaaatttgaatctctttaagttattcagacttgtacacaaacttggaggatttgataatattgaaagtggagctgtttggaaacaagtctaccaagatcttggaatccctgtcttaaattcagctgcaggatacaatgttaaatgtgcttataaaaaatacttatatggttttgaggagtactgtagatcagccaacattgaatttcagatggcattgccagagaaagttgttaacaagcaatgtaaggagtgtgaaaatgtaaaagaaataaaagttaaggaggaaaatgaaacagagatcaaagaaataaagatggaggaggagaggaatataataccaagagaagaaaagcctattgaggatgaaattgaaagaaaagaaaatattaagccctctctgggaagtaaaaagaatttattagaatctatacctacacattctgatcaggaaaaagaagttaacattaaaaaaccagaagacaatgaaaatctggatgacaaagatgatgacacaactagggtagatgaatccctcaacataaaggtagaagctgaggaagaaaaagcaaaatctggagatgaaacgaataaagaagaagatgaagatgatgaagaagcagaagaggaggaggaggaggaagaagaagaagaggatgaagatgatgatgacaacaatgaggaagaggagtttgagtgctatccaccaggcatgaaagtccaagtgcggtatggacgagggaaaaatcaaaaaatgtatgaagctagtattaaagattctgatgtcgaaggtggagaggtcctttacttggtgcattactgcggatggaatgtgagatacgatgaatggattaaagcagataaaatagtaagacctgctgataaaaatgtgccaaagataaaacatcggaagaaaataaagaataaattagacaaagaaaaagacaaagatgaaaaatactctccaaaaaactgtaaacttcggcgcttgtccaaaccaccatttcagacaaatccatctcctgaaatggtatccaaactggatctcactgatgccaaaaactctgatactgctcatattaagtccatagaaattacttcgatccttaatggacttcaagcttctgaaagttctgctgaagacagtgagcaggaagatgagagaggtgctcaagacatggataataatggcaaagaggaatctaagattgatcatttgaccaacaacagaaatgatcttatttcaaaggaggaacagaacagttcatctttgctagaagaaaacaaagttcatgcagatttggtaatatccaaaccagtgtcaaaatctccagaaagattaaggaaagatatagaagtattatccgaagatactgattatgaagaagatgaagtcacaaaaaagagaaaggatgtcaagaaggacacaacagataaatcttcaaaaccacaaataaaacgtggtaaaagaaggtattgcaatacagaagagtgtctaaaaactggatcacctggcaaaaaggaagagaaggccaagaacaaagaatcactttgcatggaaaacagtagcaacagctcttcagatgaagatgaagaagaaacaaaagcaaagatgacaccaactaagaaatacaatggtttggaggaaaaaagaaaatctctacggacaactggtttctattcaggattttcagaagtggcagaaaaaaggattaaacttttaaataactctgatgaaagacttcaaaacagcagggccaaagatcgaaaagatgtctggtcaagtattcagggacagtggcctaaaaaaacgctgaaagagcttttttcagactctgatactgaggctgcagcttccccaccgcatcctgccccagaggagggggtggcagaggagtcactgcagactgtggctgaagaggagagttgttcacccagtgtagaactagaaaaaccacctccagtcaatgtcgatagtaaacccattgaagaaaaaacagtagaggtcaatgacagaaaagcagaatttccaagtagtggcagtaattcagtgctaaatacccctcctactacacctgaatcgccttcatcagtcactgtaacagaaggcagccggcagcagtcttctgtaacagtatcagaaccactggctccaaaccaagaagaggttcgaagtatcaagagtgaaactgatagcacaattgaggtggatagtgttgctggggagctccaagacctccagtctgaagggaatagctcgccagcaggttttgatgccagtgtgagctcaagcagtagtaatcagccagaaccagaacatcctgaaaaagcctgtacaggtcagaaaagagtgaaagatgctcagggaggaggaagttcatcaaaaaagcagaaaagaagccataaagcaacagtggtaaacaacaaaaagaagggaaaaggcagtgccccacactgacctcctgctgctcttccaggagactcctgccacctccactgcctgacctttgctagcagccggcttggctgcacttcagtgcagaaaagggttattcggccagctccccgaggttctgctgagcccatatgacttccaggcgcaaatagtagtgatagtgaagaactttcagctggtgaaagtataactaagagtcagccagtcaaatcagtttccactggaatgaagtctcatagtaccaaatctcccgcaaggacgcagtctccaggaaaatgtggaaagaatggtgataaggatcctgatctcaaggaacccagtaatcgattacccaaagtttacaaatggagttttcagatgtcggacctggaaaatatgacaagtgccgaacgcatcacaattcttcaagaaaaacttcaagaaatcagaaaacattatctgtcattaaaatctgaagtagcttccattgatcggaggagaaagcgtttaaagaagaaagagagagaaagtgctgctacatcctcatcctcctcttcaccttcatccagttccataacagctgctgttatgttaactttagctgaaccgtcaatgtccagcgcatcacaaaatggaatgtcagttgagtgcaggtgacagcaggacttgctaaagcactttgcacttaatggctgttgagggccactttttttttatactgcacagtggcacaaaaaaatatcagacaagcactattttatatttaaaaattgtttcttgacaagctgacttggcacttaagtgcacttttttatgaagaaaaagtacaatgaactgcttttcctcaagcaataattgtttccaacttgtctgggaattgtgtgtctggtaactggaaggccttccactgtggcaaatggaggcttttcactgcctgtagagacaatacagtaagcatagttaaggggtgggtcagaacatgttaagataacttactgtatatgtattcccttgtattttgttaaagctggaacatttgatatttttccatttatttatgaaaaaatatgaacctattttcatttgtacaaggtaattgttttttaaagcaagtcaccttagggtggctttaattgtataagtcaagcacatgtaataaattcaaaacctgcagttaacaggatattagacatcaatcctggtaaccaaatattaaagattctctttaaaaaagactgaacatgtttacaggtttgaattaggctaaaaggtcttgcagtggcttttcatggcccttc

SEQ ID NO: 109291 - DNA, 1660 bp, Homo sapiens
  Payload ID: 1468
  Gene Symbol: ARID4B
  Gene Name: AT rich interactive domain 4B (RBP1-like)
  ENST ID: ENST00000444620
  CDS Start-End: 1-1660
agtttgagtgctatccaccaggcatgaaagtccaagtgcgatacgatgaatggattaaagcagataaaatagtaagacctgctgataaaaatgtgccaaagataaaacatcggaagaaaataaagaataaattagacaaagaaaaagacaaagatgaaaaatactctccaaaaaactgtaaacttcggcgcttgtccaaaccaccatttcagacaaatccatctcctgaaatggtatccaaactggatctcactgatgccaaaaactctgatactgctcatattaagtccatagaaattacttcgatccttaatggacttcaagcttctgaaagttctgctgaagacagtgagcaggaagatgagagaggtgctcaagacatggataataatggcaaagaggaatctaagattgatcatttgaccaacaacagaaatgatcttatttcaaaggaggaacagaacagttcatctttgctagaagaaaacaaagttcatgcagatttggtaatatccaaaccagtgtcaaaatctccagaaagattaaggaaagatatagaagtattatccgaagatactgattatgaagaagatgaagtcacaaaaaagagaaaggatgtcaagaaggacacaacagataaatcttcaaaaccacaaataaaacgtggtaaaagaaggtattgcaatacagaagagtgtctaaaaactggatcacctggcaaaaaggaagagaaggccaagaacaaagaatcactttgcatggaaaacagtagcaacagctcttcagatgaagatgaagaagaaacaaaagcaaagatgacaccaactaagaaatacaatggtttggaggaaaaaagaaaatctctacggacaactggtttctattcaggattttcagaagtggcagaaaaaaggattaaacttttaaataactctgatgaaagacttcaaaacagcagggccaaagatcgaaaagatgtctggtcaagtattcagggacagtggcctaaaaaaacgctgaaagagcttttttcagactctgatactgaggctgcagcttccccaccgcatcctgccccagaggagggggtggcagaggagtcactgcagactgtggctgaagaggagagttgttcacccagtgtagaactagaaaaaccacctccagtcaatgtcgatagtaaacccattgaagaaaaaacagtagaggtcaatgacagaaaagcagaatttccaagtagtggcagtaattcagtgctaaatacccctcctactacacctgaatcgccttcatcagtcactgtaacagaaggcagccggcagcagtcttctgtaacagtatcagaaccactggctccaaaccaagaagaggttcgaagtatcaagagtgaaactgatagcacaattgaggtggatagtgttgctggggagctccaagacctccagtctgaagggaatagctcgccagcaggttttgatgccagtgtgagctcaagcagtagtaatcagccagaaccagaacatcctgaaaaagcctgtacaggtcagaaaagagtgaaagatgctcagggaggaggaagttcatcaaaaaagcagaaaagaagccataaagcaacagtggtaaacaacaaaaagaagggaaaaggcagtaagtgtgaaat

SEQ ID NO: 109292 - DNA, 3463 bp, Homo sapiens
  Payload ID: 1468
  Gene Symbol: ARID4B
  Gene Name: AT rich interactive domain 4B (RBP1-like)
  ENST ID: ENST00000474953
  CDS Start-End: 1-2089
caaaaactctgatactgctcatattaagtccatagaaattacttcgatccttaatggacttcaagcttctgaaagttctgctgaagacagtgagcaggaagatgagagaggtgctcaagacatggataataatggcaaagaggaatctaagattgatcatttgaccaacaacagaaatgatcttatttcaaaggaggaacagaacagttcatctttgctagaagaaaacaaagttcatgcagatttggtaatatccaaaccagtgtcaaaatctccagaaagattaaggaaagatatagaagtattatccgaagatactgattatgaagaagatgaagtcacaaaaaagagaaaggatgtcaagaaggacacaacagataaatcttcaaaaccacaaataaaacgtggtaaaagaaggtattgcaatacagaagagtgtctaaaaactggatcacctggcaaaaaggaagagaaggccaagaacaaagaatcactttgcatggaaaacagtagcaacagctcttcagatgaagatgaagaagaaacaaaagcaaagatgacaccaactaagaaatacaatggtttggaggaaaaaagaaaatctctacggacaactggtttctattcaggattttcagaagtggcagaaaaaaggattaaacttttaaataactctgatgaaagacttcaaaacagcagggccaaagatcgaaaagatgtctggtcaagtattcagggacagtggcctaaaaaaacgctgaaagagcttttttcagactctgatactgaggctgcagcttccccaccgcatcctgccccagaggagggggtggcagaggagtcactgcagactgtggctgaagaggagagttgttcacccagtgtagaactagaaaaaccacctccagtcaatgtcgatagtaaacccattgaagaaaaaacagtagaggtcaatgacagaaaagcagaatttccaagtagtggcagtaattcagtgctaaatacccctcctactacacctgaatcgccttcatcagtcactgtaacagaaggcagccggcagcagtcttctgtaacagtatcagaaccactggctccaaaccaagaagaggttcgaagtatcaagagtgaaactgatagcacaattgaggtggatagtgttgctggggagctccaagacctccagtctgaagggaatagctcgccagcaggttttgatgccagtgtgagctcaagcagtagtaatcagccagaaccagaacatcctgaaaaagcctgtacaggtcagaaaagagtgaaagatgctcagggaggaggaagttcatcaaaaaagcagaaaagaagccataaagcaacagtggtaaacaacaaaaagaagggaaaaggcacaaatagtagtgatagtgaagaactttcagctggtgaaagtataactaagagtcagccagtcaaatcagtttccactggaatgaagtctcatagtaccaaatctcccgcaaggacgcagtctccaggaaaatgtggaaagaatggtgataaggatcctgatctcaaggaacccagtaatcgattacccaaagtttacaaatggagttttcagatgtcggacctggaaaatatgacaagtgccgaacgcatcacaattcttcaagaaaaacttcaagaaatcagaaaacattatctgtcattaaaatctgaagtagcttccattgatcggaggagaaagcgtttaaagaagaaagagagagaaagtgctgctacatcctcatcctcctcttcaccttcatccagttccataacagctgctgttatgttaactttagctgaaccgtcaatgtccagcgcatcacaaaatggaatgcttcaaccactcccagaagacgtccttcactcccaaaatgaggcttttctgaaacggcgaggaccaccaaccgacggcgacaaacctgctccctcacccagcgcctcccttcgccgccgcccggcggccgactgccggaggggagggggcgtggccagagagcggaagtgcccggaacccggaagtgcgagctggcgcgcagctgcagtctgggagtctttggagtaagaatggccttggaagggatgagcaaacggaagagaaagagaagtgtccaggagggagagaatcctgacgacggcgttcgcgggagtccgccggaagactacaggcttggacaggtcgccagtagcttatttcgcggcgaacaccattccagaggtggcaccggtcggctggcgtccctcttcagttctctggagccccagattcaacccgtgtacgtgcctgtgcctaaacaaaccatcaaaaaaacgaaacggaatgaggaggaagaaagtacatcccagattgaaagaccactttcgcaagaacctgccaaaaaagtgaaagcgaagaagaaacacactaacgcagaaaaaaagttggcagacagggaaagcgctctagcgagtgctgatttagaagaagaaattcaccagaaacaagggcagaaaaggaaaaattctcaacctggtgttaaagtagcagatagaaaaatacttgatgacacagaagacacagttgtcagtcaaagaaagaaaattcaaatcaaccaagaagaagagagattaaagaatgagagaactgtgtttgttgggaatttgcctgttacatgtaataagaagaagctgaagtcgttttttaaagagtatggacaaatagaatctgtacgatttcgttctctgattccagcagagggaacgctatccaaaaagttggcagcaataaaacgtaaaattcatcctgatcagaaaaatattaatgcctatgttgtgtttaaggaggagagtgctgccacgcaagcattgaaaagaaatggggcccagattgcagatggatttcgtattagagttgatctcgcatctgagacctcatctagagacaagagatcggtttttgtggggaatctcccttataaagttgaagaatctgccattgagaagcactttctggactgtggaagtatcatggccgtgaggattgtgagagacaaaatgacaggcatcggcaaagggtttggctatgtgctctttgagaatacagattctgttcatcttgctctgaaattaaataattctgaactcatggggagaaaactcagagtcatgcgttctgttaataaagaaaaatttaaacaacaaaattcaaatccacgattgaagaatgtcagtaaacctaagcagggacttaattttacttccaaaactgcagaaggacatcctaaaagcttatttattggagaaaaagctgttctccttaaaacgaagaagaaaggacagaagaaaagtggacgccctaagaaacagagaaaacagaaataacaaccaggaactgctttttcttttcctgctgagtactgctaataaaagtgctattatctgctgatagcatcgtctgcta

SEQ ID NO: 109293 - DNA, 2188 bp, Homo sapiens
  Payload ID: 1469
  Gene Symbol: ARID5A
  Gene Name: AT rich interactive domain 5A (MRF1-like)
  Uniprot ID: Q03989
  ENST ID: ENST00000357485
  CDS Start-End: 79-1863
agtatctcagagagcgcggggtccggacagccgcgcgctgagggtctcggggcgggcgccgcgggacctctccgggccatggcagcccctgtcaaagggaacaggaagcagtccacggagggtgacgccctagacccacctgcatcccccaaacctgctggcaagcagaacggaatccagaaccccatctcgctggaggactcccccgaggcaggcggggagcgggaggaggagcaggagcgggaggaggagcaggccttcctggtcagcctctacaagttcatgaaggagcgacacacgcccatcgagagggtgccccatctcggcttcaagcagattaacctgtggaagatctacaaagcagtggagaagctgggggcctatgagctggtgaccgggcgccgcctctggaagaacgtgtacgacgagctggggggcagcccaggcagcaccagcgcggccacgtgcacgcgccgccactacgagaggctggtcctgccatacgtgcggcacctgaagggggaggatgacaagccgctgcccacctccaagcccaggaaacagtacaagatggctaaggagaacaggggggatgatggggccaccgagaggccgaagaaggccaaggaggagcggcgcatggaccagatgatgccaggaaagaccaaagcagatgctgctgacccagcaccacttcccagccaggagccccccaggaacagcacagaacagcagggcctggcctctgggtcttctgtgtcctttgtgggtgccagcggctgtcctgaggcctacaagcggctcctatccagcttctactgcaaggggacacacggcatcatgtcaccactggccaaaaagaagctcctggcccaggtgagcaaggtggaggccttgcagtgccaggaggagggctgccgccatggggcagagccccaggcgtccccagctgttcacctcccagagagtccccagagccccaaagggctgactgagaactccaggcaccggctgacccctcaggagggattgcaggccccaggtggcagcctcagagaggaggcgcaggcaggcccctgcccggcagcccccatcttcaagggctgcttctacacccaccccaccgaggtgctgaagcctgtcagccagcaccccagggacttcttctctagacttaaagatggggtgctattggggcctcctggcaaagaggggctgtcagtgaaagagccccagctggtgtggggcggagacgctaaccgcccttctgcgttccataaaggtggctccagaaagggcatcctctaccccaagcccaaagcctgctgggtgtcccccatggccaaggtcccagccgagagccccacgctcccgcccaccttccccagtagcccaggcctgggcagcaagcgcagcctggaggaagagggtgctgcccacagtgggaagagactgcgggccgtgtctccctttcttaaggaggcggatgccaagaagtgtggggccaaacctgcagggtccggcctggtctcctgccttctgggcccagccctggggcctgtgcccccagaggcctacaggggcaccatgctgcactgcccgctgaacttcactggcaccccgggccccttgaagggccaggctgcactccccttcagccccctggtcatcccggccttcccggcccacttcctggccaccgcaggcccctcgcccatggccgctggcctgatgcacttccccccaacgtccttcgacagtgccctccgccacagactttgcccggcctcatctgcctggcacgcaccaccagtcacaacctatgcagcgccccacttcttccacctcaacaccaagctgtaggccagcccatggtgttgtgtacactgtggagtcgacaggggcctacaacaggcaggtactgctgccagggggctctgaactagtgcctgctacccaggacacccgggccatgcccctggctgggcagcctggcacaagtgaagaagaaggcagtgggaaaactgggtttatctcaaggcagcagcctgagcccaggagcagaggacccagttgttataaggcgctgggagaggatgggcagctcccactgccccagagcggagctcgaagcacccaggttgcccacggaaaatccaataaaaagacaccagtgtgaatccacgta

SEQ ID NO: 109294 - DNA, 2038 bp, Homo sapiens
  Payload ID: 1469
  Gene Symbol: ARID5A
  Gene Name: AT rich interactive domain 5A (MRF1-like)
  ENST ID: ENST00000412735
  CDS Start-End: 76-252
atctcagagagcgcggggtccggacagccgcgcgctgagggtctcggggcgggcgccgcgggacctctccgggccatggcagcccctgtcaaagggaacaggaagcagtccacggagggtgacgccctagacccacctgcatcccccaaacctgctggcaagcagaacggaatccagaaccccatctcgctggagttaacctgtggaagatctacaaagcagtggagaagctgggggcctatgagctggtgaccgggcgccgcctctggaagaacgtgtacgacgagctggggggcagcccaggcagcaccagcgcggccacgtgcacgcgccgccactacgagaggctggtcctgccatacgtgcggcacctgaagggggaggatgacaagccgctgcccacctccaagcccaggaaacagtacaagatggctaaggagaacaggggggatgatggggccaccgagaggccgaagaaggccaaggaggagcggcgcatggaccagatgatgccaggaaagaccaaagcagatgctgctgacccagcaccacttcccagccaggagccccccaggaacagcacagaacagcagggcctggcctctgggtcttctgtgtcctttgtgggtgccagcggctgtcctgaggcctacaagcggctcctatccagcttctactgcaaggggacacacggcatcatgtcaccactggccaaaaagaagctcctggcccaggtgagcaaggtggaggccttgcagtgccaggaggagggctgccgccatggggcagagccccaggcgtccccagctgttcacctcccagagagtccccagagccccaaagggctgactgagaactccaggcaccggctgacccctcaggagggattgcaggccccaggtggcagcctcagagaggaggcgcaggcaggcccctgcccggcagcccccatcttcaagggctgcttctacacccaccccaccgaggtgctgaagcctgtcagccagcaccccagggacttcttctctagacttaaagatggggtgctattggggcctcctggcaaagaggggctgtcagtgaaagagccccagctggtgtggggcggagacgctaaccgcccttctgcgttccataaaggtggctccagaaagggcatcctctaccccaagcccaaagcctgctgggtgtcccccatggccaaggtcccagccgagagccccacgctcccgcccaccttccccagtagcccaggcctgggcagcaagcgcagcctggaggaagagggtgctgcccacagtgggaagagactgcgggccgtgtctccctttcttaaggaggcggatgccaagaagtgtggggccaaacctgcagggtccggcctggtctcctgccttctgggcccagccctggggcctgtgcccccagaggcctacaggggcaccatgctgcactgcccgctgaacttcactggcaccccgggccccttgaagggccaggctgcactccccttcagccccctggtcatcccggccttcccggcccacttcctggccaccgcaggcccctcgcccatggccgctggcctgatgcacttccccccaacgtccttcgacagtgccctccgccacagactttgcccggcctcatctgcctggcacgcaccaccagtcacaacctatgcagcgccccacttcttccacctcaacaccaagctgtaggccagcccatggtgttgtgtacactgtggagtcgacaggggcctacaacaggcaggtactgctgccagggggctctgaactagtgcctgctacccaggacacccgggccatgcccctggctgggcagcctggcacaagtgaagaagaaggcagtgggaaaactgggtttatctcaaggcagcagcctgagcccaggagcagaggacccagttgttataaggcgctgggagaggatgggcagctcccactgccccagagcggagctcgaagcacccaggttgcccacggaaaatccaataaaaagacaccagtgtgaa

SEQ ID NO: 109295 - DNA, 3079 bp, Homo sapiens
  Payload ID: 1469
  Gene Symbol: ARID5A
  Gene Name: AT rich interactive domain 5A (MRF1-like)
  ENST ID: ENST00000454558
  CDS Start-End: 1178-2758
gtttcctgaaaggggctgcgcgggtgtgaagaacttgctcaatgcgctttgtaggatccactgttcctctttcggccgcgggctgcgccgatggtccggggagcccggcttctcgccccctgccccttccttctcttcccttttctcttttcctctcctgtctctccgcccacccgccgcagccccacaggagaggggtcgcttccctggttgctctcctctcctgtcccttgtgtgtccccttgtcttccctcggtctgcagaagggacggggtggcggctggggagcgtcaggggaagagggcaagagcgtgggctacgagcttgcaggcgatgcccggcttcgcgctcggcgggagctgcgggccaacccgggcccgcgctccgtccctccgcggtgtctaggggtcgcccgggctggggtcgcgtcaccctccgcccagcgccggcgtggtggggcttgcgcggtgcaggacccccgagggcccagggggtcccaaggcgctgcgggtccagtgtccctttgtttgcagagtcttgggccagtaaggagtgctccgcgggccccaggggaggacaacaggtgcctcttgccccacccgggctcctctggtgggagcccacacgcacggtggcgtcactgcgcctacaggcaacgctagagcacaggaggggtgggaggtcggggctcgagggcttcaccccgcagcagagctcagagcccaatccaggccttagggacccgcctggggcctagaacttggtgtggcagaggtagaaagggcctccgataatctgcttctacagttgagagacgtcaactggcacctctgagcctctgccccgtaggtgaaatgggaacacacgaaaccatctgaggagctctcactgtccgtcaccaccaaatgtggcccagactccgtggggagggacagtcccatcctggaactggggcttttaggacatcccagagcccgcagcccctgtcaaagggaacaggaagcagtccacggagggtgacgccctagacccacctgcatcccccaaacctgctggcaagcagaacggaatccagaaccccatctcgctggaggactcccccgaggcaggcggggagcgggaggaggagcaggagcgggaggaggagcaggccttcctggtcagcctctacaagttcatgaaggagcgacacacgcccatcgagagggtgccccatctcggcttcaagcagattaacctgtggaagatctacaaagcagtggagaagctgggggcctatgagctggtgaccgggcgccgcctctggaagaacgtgtacgacgagctggggggcagcccaggcagcaccagcgcggccacgtgcacgcgccgccactacgagaggctggtcctgccatacgtgcggcacctgaagggggaggatgacaagccgctgcccacctccaagcccaggaaacagtacaagatggctaaggagaacaggggggatgatggggccaccgagaggccgaagaaggccaaggaggagcggcgcatggaccagatgatgccaggaaagaccaaagcagatgctgctgacccagcaccacttcccagccaggagccccccaggaacagcacagaacagcagggcctggcctctgggtcttctgtgtcctttgtgggtgccagcggctgtcctgaggcctacaagcggctcctatccagcttctactgcaaggggacacacggcatcatgtcaccactggccaaaaagaagctcctggcccaggtgagcaaggtggaggccttgcagtgccaggaggagggctgccgccatggggcagagccccaggcgtccccagctgttcacctcccagagagtccccagagccccaaagggctgactgagaactccaggcaccggctgacccctcaggagggattgcaggccccaggtggcagcctcagagaggaggcgcaggcaggcccctgcccggcagcccccatcttcaagggctgcttctacacccaccccaccgaggtgctgaagcctgtcagccagcaccccagggacttcttctctagacttaaagatggggtgctattggggcctcctggcaaagaggggctgtcagtgaaagagccccagctggtgtggggcggagacgctaaccgcccttctgcgttccataaaggtggctccagaaagggcatcctctaccccaagcccaaagcctgctgggtgtcccccatggccaaggtcccagccgagagccccacgctcccgcccaccttccccagtagcccaggcctgggcagcaagcgcagcctggaggaagagggtgctgcccacagtgggaagagactgcgggccgtgtctccctttcttaaggaggcggatgccaagaagtgtggggccaaacctgcagggtccggcctggtctcctgccttctgggcccagccctggggcctgtgcccccagaggcctacaggggcaccatgctgcactgcccgctgaacttcactggcaccccgggccccttgaagggccaggctgcactccccttcagccccctggtcatcccggccttcccggcccacttcctggccaccgcaggcccctcgcccatggccgctggcctgatgcacttccccccaacgtccttcgacagtgccctccgccacagactttgcccggcctcatctgcctggcacgcaccaccagtcacaacctatgcagcgccccacttcttccacctcaacaccaagctgtaggccagcccatggtgttgtgtacactgtggagtcgacaggggcctacaacaggcaggtactgctgccagggggctctgaactagtgcctgctacccaggacacccgggccatgcccctggctgggcagcctggcacaagtgaagaagaaggcagtgggaaaactgggtttatctcaaggcagcagcctgagcccaggagcagaggacccagttgttataaggcgctgggagaggatgggcagctcccactgccccagagcggagctcgaagcacccaggttgcccacggaaaatccaataaaaagacaccagtgtgaatcca

SEQ ID NO: 109296 - DNA, 7891 bp, Homo sapiens
  Payload ID: 1470
  Gene Symbol: ARID5B
  Gene Name: AT rich interactive domain 5B (MRF1-like)
  Uniprot ID: Q14865
  ENST ID: ENST00000279873
  CDS Start-End: 411-3977
atcagacgatatcccagacaggagcggttagagagagaggaatcacatctccacacagttttagggtgctttttatttttacaaatcttcttgtgtgttttttgccttgatccatcctcttcccgccgagatcgtatggcgcctttctctcgattatgaatttgatcaatccatctttggaagaaaacccacatagttttttcaggagctgaaaattgagtcgttatagaaatattaggacatattttcaatcatttcggtgcccgaagggaggcaagagctcagttttatattgagacattacgccggctgaaggcagagaatgcgtttccctgccaggacctgatgcaatccattcaagccaacaagtttggagagaatgttgagttcaatcaattcagaacgtcgagatggagcccaactcactccagtgggtcggctcaccgtgtggcttgcacggaccttacattttctacaaggcttttcaattccaccttgaaggcaaaccaagaattttgtcccttggcgactttttctttgtaagatgtacgccaaaggatccgatttgcatagcggagctccagctgttgtgggaagagaggaccagccggcaacttttatccagctctaaactttatttcctcccagaagacactccccagggcagaaatagcgaccatggcgaggatgaagtcattgctgtttccgaaaaggtgattgtgaagcttgaagacctggtcaagtgggtacattctgatttctccaagtggagatgtggcttccacgctggaccagtgaaaactgaggccttgggaaggaatggacagaaggaagctctgctgaagtacaggcagtcaaccctaaacagtggactcaacttcaaagacgttctcaaggagaaggcagacctgggggaggacgaggaagaaacgaacgtgatagttctcagctacccccagtactgccggtaccgctcgatgctgaaacgcatccaggataagccatcttccattctaacggaccagtttgcattggccctggggggcattgcagtggtcagcaggaaccctcagatcctgtactgtcgggacacctttgaccacccgactctcatagaaaacgagagtatatgcgatgagtttgcgccaaatcttaaaggcagaccacgcaaaaagaaaccatgcccacaaagaagagattcattcagtggtgttaaggattccaacaacaattccgatggcaaagccgttgccaaggtgaaatgtgaggccaggtcagccttgaccaagccgaagaataaccataactgtaaaaaagtctcaaatgaagaaaaaccaaaggttgccattggtgaagagtgcagggcagatgaacaagccttcttggtggcactttataaatacatgaaagaaaggaaaacgccgatagaacgaataccctatttaggttttaaacagattaacctttggactatgtttcaagctgctcaaaaactgggaggatatgaaacaataacagcccgccgtcagtggaaacatatttatgatgaattaggcggtaatcctgggagcaccagcgctgccacttgtacccgcagacattatgaaagattaatcctaccatatgaaagatttattaaaggagaagaagataagcccctgcctccaatcaaacctcggaaacaggagaacagttcacaggaaaatgagaacaaaacaaaagtatctggaaccaaacgcatcaaacatgaaatacctaaaagcaagaaagaaaaagaaaatgccccaaagccccaggatgcagcagaggtttcatcagagcaagaaaaagaacaagagactttaataagccagaaaagcatccctgagcctctcccagcagcagacatgaagaaaaaaatagaagggtatcaggaattttcagcgaagcccctggcatccagagtagacccagagaaggacaacgaaacagaccaaggttccaacagtgagaaggtggcagaggaggcgggagagaaggggcccacacctccactcccaagtgctcctctggccccagaaaaagattcagccttggtccctggggccagcaaacagccactcacctctcctagtgccctggtggactcaaaacaagaatccaaactgtgctgttttacagagagccctgaaagtgaaccccaagaagcatccttccccagcttccccaccacacagccaccgctggcaaaccagaatgagacggaggatgacaaactgcccgccatggcagattacattgccaactgcaccgtgaaggtggaccagctgggcagtgacgacatccacaatgcgctcaagcagaccccaaaggtccttgtggtccagtcgtttgacatgttcaaagacaaagacctgactgggcccatgaacgagaaccatggacttaattacacgcccctgctctactctaggggcaacccaggcatcatgtccccactggccaagaaaaagcttttgtcccaagtgagtggggccagcctctccagcagctacccttatggctccccaccccctttgatcagcaaaaagaaactgattgctagggatgacttgtgttccagtttgtcccagacccaccatggccaaagcactgaccatatggcggtcagccggccatcagtgattcagcacgtccagagtttcagaagcaagccctcggaagagagaaagaccatcaatgacatctttaagcatgagaaactgagtcgatcagatccccaccgctgcagcttctccaagcatcaccttaacccccttgctgactcctacgtcctgaagcaagaaattcaggagggcaaggataaactcttagagaaaagggccctcccccattcccacatgcctagcttcctggctgacttctactcgtcccctcatctccatagcctctacagacacaccgagcaccatcttcataatgaacagacatccaaatacccttccagggacatgtacagggaatcggaaaacagttcttttccttcccacagacaccaagaaaagctccatgtaaattatctcacgtccctgcacctgcaagacaaaaagtcggcggcagcagaagcccctacggatgatcagcctacagatctgagccttcccaagaacccgcacaaacctaccggcaaggtcctgggcctggctcattccaccacagggccccaggagagcaaaggcatctcccagttccaggtcttaggcagccagagtcgagactgtcaccccaaagcctgtcgggtatcacccatgaccatgtcaggccctaaaaaataccctgaatcgctttcaagatcaggaaaacctcaccatgtgagactggagaatttcaggaagatggaaggcatggtccacccaatcctgcaccggaaaatgagcccgcagaacattggggcggcgcggccgatcaagcgcagcctggaggatttggaccttgtgattgcagggaaaaaggcccgggcagtgtctcccttagacccatccaaggaggtctctgggaaggagaaggcctctgagcaggagagtgaaggcagcaaagcagcgcacggtgggcattccgggggcggatcagaaggccacaagcttcccctctcctcccctatcttcccaggtctgtattccgggagcctgtgtaactcgggcctcaactccaggctcccggctgggtattctcattctctgcagtacttgaaaaaccagactgtgctttctccactcatgcagcccctggctttccactcgcttgtgatgcaaagaggaatttttacatcaccgacaaattctcagcagctgtacagacacttggctgcggctacacctgtaggaagttcatatggggaccttttgcataacagcatttaccctttagctgctataaatcctcaagctgcctttccatcttcccagctgtcatccgtgcaccccagtacaaaactgtaggctcagctctgcccagcagtccaaagcggcatggccaacagagcttcactccttacccaggagtgctggcttatagagttagaagtcagtatttcttctaatctgaggctatgatcagtcccagctgtaggggcccagaggggaggtgaacatgcctgatttttgtgggacaactctagcccacaaactgactggctggtgagtcttgactcccttccaacacagatgcccaggcacctccagatcattcacttcgcacgtgggccttgtgaagggatttgtgaatatccaggaagaacttagaggaccccatctgagttcggatggtcaggaaacaatctgggcaaaaaagaggcaggcatttcaaaggaaggggcaaggaagactggcaaacagatggcaagggatgcccctctttttcataaaactctccaaggttcaatcaatgcaatgtatagtgaaacttcaatagatctttcattttgacactattaaacaatccagagaagtaaacactgttaaattgactgtatatatttgcttcttaaaactacctgtatcactgtttgctcacctaatttatatacaggtagttccattttctcccagttccttctcgtctttttttttttttttttttttttttttattaaatggtattgcttttgtttgcaggtctttttgtttttgttttgtttttgaggctgactgactgtcctagttgttgtgtgtttgtaatttttccacatcttattttgagcagctttgggtggtaaagttattgtttacaaattgaagcaactgattctagtggaacaaatgaaaaagaaacagtcaagcacacaatagtgcaaagaacgttcctttgtagatccgcaacttaaggattttgttcctcataaatggcatagttgaaagagcttatacactgcttacccagccaaatgctttgctttgaagtattgggttctgtgaaaatattgagcattgtacttaccttatctaggctgtgaaactgtcctacataccagagaatcataaaaacaaaaacctcactggcagcaagctgccgaataacaacagagtctagaggacatatttgtgggctgcacagatattttaggaatttcagaaattagaacaggagccaaaatgatttacattggcgttggcactgattcctttaaatggtctgggaaagggggttgggaagaggatggagctcaactggccagaagaggagcagctgcagtcctgatagcttctctagcctcggtcttttgagtgataagtagtcatgttgttttcatccagttggtttcttgtcattcccaagaagaatctcccaggccacatctttggggataactgacatactggattagccttttcaaaagaaaagtcatcctatttggttttatggggtgtgagttttgtgtgtacacacacagaaacatgtaaggtggtttgggtcatgtttttaaccacctggcaatacagtccactttctggtttcttttattgtgggaagtaaatggtcaagctgctcaggcagtgaaaagatgtggagaatgtccgttgtcattcttgccactgtattccatttgctaccgagatataacattaaggtggacacattttctaactgtattaattaaaagtcaatggatacagagagtggattttctccccaagtcccatccctgctgaagaccgcttggatgaactccccaacccactgtgcccctcccgcaacactaccagtagactttagaaccatagttaactaagtcttttacctctgagatacttaattctgggaaaattggtgacaattttcaacttctaaataggtaactcgactgcaaaataatcaaaactgataacaatgaaactgcggctcttaaacaaagccatgcatgccgtgcatttgtattgaaatgtctccatgatatgaagccaaatattcaatgtaacatacttaatatccaaaggtggaaacaaaagaatgtagagatccagtgttaagagttccatttgcttcaattaattatttaccttcctgtggaataatatatatatatatatttaatagaaccatagatagactagtagaatttagattataaatgtgtgagtgcagattatcctgctattgcacaagctagaggggggaaaaatctcaattccagctggcaagatgctagccaggacacatataagaaagttgcactagattgaatggtcacagaatcggaggacatggaagaaaaaggaaacttcggtggttctgcagcagacatgggctaggtcatatgtggtttctatgagttcgtgtctcaaaaaaaaaaggagggggggcatctgtccccggtggagctcacctatttggaatatggggcatttgttttttccactgcaatgatttcagtctggtttcatcatgttggaattcgatcacaccattttcaaacaatgttaacatagtccagcttttgtttttctcatctcttctgagaggagactcactgtttctgtctgaggaagctcataccctcggcaaaacatcaggacaaataaagagaaatgggggtacgcattcccaacagaagcagtgtgttatttgttttaaaactctgaacagagatcttggaaatctttcaaaaagaccattgaattcttcattggctgagaacgacgttttaaaatgtcttaaataaggctttgtttgcattgtttgagttcaaggggccttattattgaatggaattgcacaagcctttctttgtgcaatcaaaccattgttattggtagttctgtaaaggaaactgtggaatcgaattggcagtggagtcataaatctatttactgagtgtggcttccaagaaatgttgcaattcaaaatgcactaagtctgtgatttattggagatttggagattctaaataatatttttaaaaaacttccatgcaacttctggtttaatgtttggcaactccacatgataaaaaaataaaaacagcccaaccgagtttcggaattaagtattcttctagtaagtgattcaaacttgtaatatttgccacaggactgacttatttatttactagctagaagctcttaagttcacttgtttatcagggcatatacagaagggtttgttaaaactcgatgttaactttacaactttctgacctggtgcatgaattctcaagtactgtatttcactgtgttggtgtgtctgatggaaatttcgaggtggtcccacaaaaatattttatgtagtgtgccttcaaagagaaccatttatttctcttcacttatcgtcccacaaagtcacatttggtggtggtcagccaagtcgcatctggtctagttttactcttgtcccaattttaaagagaaatgggaatgagtttgccctggtgagacccataccattgcaatgattatcttgagcacttaaagtccagtgttggctgttagtgtatttgatattctgcctgtctcctcatggttgaaatatgtctgaagaatagcagcataatctcttggctgtttatacttttttaaactttcctgtgttgtaaatattgtatacttttggtgattccagctatgtaacctctatgctctgtaaggtgattatttgtatatagcaacatggcccagtgatattatatagtttcccaatggagaggttattgagtaacctttgcattagtttaaacactaccagaagaatgctgagccaactataaacactcaattttgtatgttttccaaattgtacttattactgcttttgatactgtattacgtgccaatagtttcccaatcacatagcaggcaagagatattttgtactttttgatccactgtaatatttaataaaaaatgttactatctgtttc

SEQ ID NO: 109297 - DNA, 3141 bp, Homo sapiens
  Payload ID: 1470
  Gene Symbol: ARID5B
  Gene Name: AT rich interactive domain 5B (MRF1-like)
  Uniprot ID: Q14865
  ENST ID: ENST00000309334
  CDS Start-End: 270-3107
agagccctccctgccagtctggcaactccagcaaagtcctcaggctcatcccacacactcggtgctagtcactgctgtgtgtttacatgagtaatggagctgccgggggaggggagttgtaagcagagcgctgagcctcgcagctcgcattcggagggaagctgacatccacaccaagtcgagacttccagggatgtggccggggagcagtcacatgctgtagctttcatgagcacaggcatcagtcaggcagatgtttgtcgactggaatggcgccaaatcttaaaggcagaccacgcaaaaagaaaccatgcccacaaagaagagattcattcagtggtgttaaggattccaacaacaattccgatggcaaagccgttgccaaggtgaaatgtgaggccaggtcagccttgaccaagccgaagaataaccataactgtaaaaaagtctcaaatgaagaaaaaccaaaggttgccattggtgaagagtgcagggcagatgaacaagccttcttggtggcactttataaatacatgaaagaaaggaaaacgccgatagaacgaataccctatttaggttttaaacagattaacctttggactatgtttcaagctgctcaaaaactgggaggatatgaaacaataacagcccgccgtcagtggaaacatatttatgatgaattaggcggtaatcctgggagcaccagcgctgccacttgtacccgcagacattatgaaagattaatcctaccatatgaaagatttattaaaggagaagaagataagcccctgcctccaatcaaacctcggaaacaggagaacagttcacaggaaaatgagaacaaaacaaaagtatctggaaccaaacgcatcaaacatgaaatacctaaaagcaagaaagaaaaagaaaatgccccaaagccccaggatgcagcagaggtttcatcagagcaagaaaaagaacaagagactttaataagccagaaaagcatccctgagcctctcccagcagcagacatgaagaaaaaaatagaagggtatcaggaattttcagcgaagcccctggcatccagagtagacccagagaaggacaacgaaacagaccaaggttccaacagtgagaaggtggcagaggaggcgggagagaaggggcccacacctccactcccaagtgctcctctggccccagaaaaagattcagccttggtccctggggccagcaaacagccactcacctctcctagtgccctggtggactcaaaacaagaatccaaactgtgctgttttacagagagccctgaaagtgaaccccaagaagcatccttccccagcttccccaccacacagccaccgctggcaaaccagaatgagacggaggatgacaaactgcccgccatggcagattacattgccaactgcaccgtgaaggtggaccagctgggcagtgacgacatccacaatgcgctcaagcagaccccaaaggtccttgtggtccagtcgtttgacatgttcaaagacaaagacctgactgggcccatgaacgagaaccatggacttaattacacgcccctgctctactctaggggcaacccaggcatcatgtccccactggccaagaaaaagcttttgtcccaagtgagtggggccagcctctccagcagctacccttatggctccccaccccctttgatcagcaaaaagaaactgattgctagggatgacttgtgttccagtttgtcccagacccaccatggccaaagcactgaccatatggcggtcagccggccatcagtgattcagcacgtccagagtttcagaagcaagccctcggaagagagaaagaccatcaatgacatctttaagcatgagaaactgagtcgatcagatccccaccgctgcagcttctccaagcatcaccttaacccccttgctgactcctacgtcctgaagcaagaaattcaggagggcaaggataaactcttagagaaaagggccctcccccattcccacatgcctagcttcctggctgacttctactcgtcccctcatctccatagcctctacagacacaccgagcaccatcttcataatgaacagacatccaaatacccttccagggacatgtacagggaatcggaaaacagttcttttccttcccacagacaccaagaaaagctccatgtaaattatctcacgtccctgcacctgcaagacaaaaagtcggcggcagcagaagcccctacggatgatcagcctacagatctgagccttcccaagaacccgcacaaacctaccggcaaggtcctgggcctggctcattccaccacagggccccaggagagcaaaggcatctcccagttccaggtcttaggcagccagagtcgagactgtcaccccaaagcctgtcgggtatcacccatgaccatgtcaggccctaaaaaataccctgaatcgctttcaagatcaggaaaacctcaccatgtgagactggagaatttcaggaagatggaaggcatggtccacccaatcctgcaccggaaaatgagcccgcagaacattggggcggcgcggccgatcaagcgcagcctggaggatttggaccttgtgattgcagggaaaaaggcccgggcagtgtctcccttagacccatccaaggaggtctctgggaaggagaaggcctctgagcaggagagtgaaggcagcaaagcagcgcacggtgggcattccgggggcggatcagaaggccacaagcttcccctctcctcccctatcttcccaggtctgtattccgggagcctgtgtaactcgggcctcaactccaggctcccggctgggtattctcattctctgcagtacttgaaaaaccagactgtgctttctccactcatgcagcccctggctttccactcgcttgtgatgcaaagaggaatttttacatcaccgacaaattctcagcagctgtacagacacttggctgcggctacacctgtaggaagttcatatggggaccttttgcataacagcatttaccctttagctgctataaatcctcaagctgcctttccatcttcccagctgtcatccgtgcaccccagtacaaaactgtaggctcagctctgcccagcagtccaaagcggcatgg

SEQ ID NO: 109298 - DNA, 5070 bp, Homo sapiens
  Payload ID: 1471
  Gene Symbol: ATCAY
  Gene Name: ataxia, cerebellar, Cayman type
  Uniprot ID: Q86WG3
  ENST ID: ENST00000450849
  CDS Start-End: 468-1583
attctggcagggggctgtgcttttccgtcaggccgccaccccccaccccctcctccctgcacacaaaagcagcataaattaaccgtcttcgggaagccgagcctctgccagccctgagctgggaagaagcagctacctcggaggcagggcgcgcaggcgggcggcgatgagagggggcgcagccgcagccccgcgctggggagcccaccgctaaccctgcaccccacccacccctgcacaaaagagctggcgggcgctggccacgtcgccctgggtgaccttcctcggatgcagaatccgcccctgcgagcatcctcttcctcctaggctctgaaggcccggggagcgtgagcgatgcccagctgcacccgggcagggctcgcctttgtttgccagtaaggaggagaggctgtctcagctgcagaggggtcatccctgcttcaagccagtgcctcttcccagctcccatggggaccaccgaagccacgctccggatggaaaacgtggacgtgaaggaggaatggcaggacgaagatcttcccaggccactcccagaagagacgggggtggaactgcttggcagcccggtggaagacacatcctctcctcccaacacgctaaatttcaacggagcgcatcgtaagaggaagacgctggtggccccagagatcaacatttctctggatcagagtgaggggtccctgctgtccgatgacttcttggatacccctgatgacctggatattaacgtggatgacatcgagacccccgatgagaccgactcgctggagttcctggggaatggcaacgaactggagtgggaagacgacacccccgtggccaccgccaagaacatgcccggggacagcgcggatctatttggggacggcacgacggaggacggcagcgccgccaacgggcgcctgtggcggacagtgatcatcggggagcaagagcaccgtatagacctgcacatgatccggccttacatgaaagtggtcacccacggagggtactacggcgaaggcctcaacgccatcatcgtcttcgcagcctgcttccttccagacagcagcctccccgactaccactacatcatggagaacctcttcctgtacgtcatcagcagcttagagctcctggtggctgaggactacatgatcgtgtacctgaacggtgccacgccccggcggaggatgcctggaatcggctggctgaagaagtgctaccagatgatcgaccggaggttgcggaaaaacctgaagtccttgatcatcgtccacccctcgtggttcattcggactgtgctggccatctctcgccctttcatcagcgtcaagttcatcaacaagatccagtacgtgcacagcttggaagacctggagcaactcatccctatggaacacgtccagatcccagactgcgtcctgcaatacgaagaggaaagactgaaggccaggagggagagcgcgaggccccagccggagtttgtgctgcccaggtctgaagagaagccagaggtggcaccagtggaaaacaggtctgctctggtctcagaagatcaggaaacaagcatgtcctgaggcgacgtgagcataacaaaggacatggaagaagattccagatgccagaaaacctctgtcagacgcccactggccccagatctcatcctgcctcatcctgagtcccaatcttccaagggtgccagcccctccgttcatctctgaaacccagcatccttttcagctgcttgaaaacattgtattttttttttttaacgatgcagtatttgtgcgttccagaaaagggcccagctctgagcccctcacccttccacactcacgaactctcagccgaggaaggcaagaagcgcagggggtggcccgcgtggcgtcggtggcctccgctcctgctcgcagcctctgtggtcagagctggatacaagattcaagacccttctcttgcttgtcacccgctccaggttggagccacagacacccaccgccaccccggctgggtctgcgtcctttcctgtgcctttccctccagaatgcggcctcagacctagaagctcaacccccctatgagggccacgtcctggggtagctcctgacctccgaccttatgtccaaatttcacacccatggtttttcatttgacccgcccccttctcgctcataatgacacccagctcctttgagaggatcagagcccattgcacaagaagagccgctgccaaccatccttgtcctccgattgcaaaatgacaccccagtaatctagaacattctcaagcccctttaactcagatgtcaagccaccgggcaaaccccgtcaatacctcccaccaaggaatgagatatgtggacctcactgctcccccaacccagcgtcaggctgggacacgccaacgctgttccgggttggaacagcagaggctcagaaactggctctgaaataggcagacctagcaagaggaagatacagggtatcgggcgtttgagtgtttcagaagtcattcgggaagataaatccagtgcgctggccgcagccacctgcattcaaagcttggaccagcgggttcttgttcgggaggcaaatttccctaggaaaaagaagacagacttttctaatgtggtccaaatgcggatcactggtcagatggactctagaagcactgagctccctgtctctggaagtatttaagaaaaggctgggccaggcacgatggctcacgcctgtaatcccagactttgggaggccgaggcaggcggatcacctgaggtgaggagtttgagaacagcctggccaacatggtgaaacctcatctctactaaaaatacaaaaattagccaggcgtggtggcaggtgcctgtaatcccagctacttgggaggctgaggcatgagaatcacttaaacctgagaggcagaggttacagtgagccaagatcgtgccactgcattccagcctgggcgacagagcaagactctgtctcaaaaaaaataaaaaataatcagggcacagtggctcatgcctgtaatcccagcactctgggaggctgaggtgggtggatcacctgaggtcaggagttcaagaccagcctggtgaacatggcgaaaccccgtctctaataaaaatacaaaaattagccgggcatggtggtgcatgcctgtaatcccagctactcgggaggctgaggcaggagaactgcttgaacccaggaggcagaggttgcagtgatccaagatcatgccactgcactccagcctgggcaacaagagcaaaactccgtctcaaaataaaaagaaaagaaaagaatggacagtgtttgcagagagttgctcacgagtttccctctaatcctaaatgtcttcatgtctatcagtctgagcagacggtgagtagggcgggcacattctccaggcccttcttcctagctctgtggttgacctctcagcaagtgctatccaggctgggccaaccagacccacaattaactgagcctcagtgaaagcgtccagtgcatcttgacctgagacagcaaggaattgcatttggggttattccaacgatgatggcagggaactggtggtatttagtgctgaggggcagtgatacagaaagatttgccctgtgggacagggtcctgcgcgagtcccatccccaaaagccagcagctcctgccatgaggaagacggggtttctgagcaggcttatgcctgcaggttcctgtggagccaccggctgtgacgggacacctctgggtctcagcattgccctggggaggctgggacatttagggacatggtagggttttaacatttgtttcccaaatgtcaaatcccgggcacaggggcaagaccctgtcccgaattcccaccccagtgaatggtgtcgctgccaaagccaacacaagatgacaaaagtggctgggtacggtggctcacgcctataatcccagcactttgggagaccgagacaggtggatcacctgaggtcaggagttcgagaccaggctggccaacatggtgaaaccccatctctactaaaaatacaaaaattagctgggtgtggtggcgcgcacctgtagtcccagctactcaggaggctgaggtagaagaatagctggaacccaggaggcagagattgcagtcagccgagattgcaccactgcactccagcctgggagacagagcaagactgactcaaaagaaaaaaaatgacagaagcctgattatcagactgcccggaggagacaggctccagcagatagatgccagccaggcccagctgccacgatttgtcccaggtgaccaaaggcacgcagctccagcatgaatcgttctaacccaacagtgacaagaactgctgggccttaaccgtcatggaagactggggccgcttccaagtcacagacaggagacggggacaggaaagaactcattccacccaatcggacacctaataattgagtgtctacagcagcaatcaagtgacaagtgaggccctacctgacccagaaggtgcctgccggctaaacattctgcccccaccagaaactccagggggtccgcccgttatgccgtggcccacccacgcccctttggatcaccagcagtcacagacaacaggcaggcgaaactgaagaccccaactcagccccagcggaccctccagagcaaaagaggcccccggcgaggccacctgtcggcaggcatgccgaggtcaaacagccggggccaccgttcccagctgggccacgacctgcaccgtccacagatgggctttgagatggatttgtatcagggtggggggtgtggtttggccaaaatgcaatggaccccgacccctcctcgtaaaaggatgttgggtttccctctggtgacacatgggatgcgtcataaaccctcccccaaagtcctggtcagcagcccatccttccaacgatgagttttgcggtttttcagaacagaaatgatcactacgattgacgacggtcgtgatgttaagacgtcgtctccatgagctttggggggacttttatgtggaataaagaaactatcactga

SEQ ID NO: 109299 - DNA, 2904 bp, Homo sapiens
  Payload ID: 1471
  Gene Symbol: ATCAY
  Gene Name: ataxia, cerebellar, Cayman type
  Uniprot ID: Q86WG3
  ENST ID: ENST00000600960
  CDS Start-End: 1-1134
atggggaccaccgaagccacgctccggatggaaaacgtggacgtgaaggaggaatggcaggacgaagatcttcccaggccactcccagaagagacgggggtggaactgcttggcagcccggtggaagacacatcctctcctcccaacacgctaaatttcaacggagcgcatcgtaagaggaagacgctggtggccccagagatcaacatttctctggatcagagtgaggggtccctgctgtccgatgacttcttggatacccctgatgacctggatattaacgtggatgacatcgagacccccgatgagaccgactcgctggagttcctggggaatggcaacgaactggagtgggaagacgacacccccgtggccaccgccaagaacatgcccggggacagcgcggatctatttggggacggcacgacggaggacggcagcgccgccaacgggcgcctgtggcggacagtgatcatcggggagcaagagcaccgtatagacctgcacatgatccggccttacatgaaagtggtcacccacggagggtactacggcgaaggcctcaacgccatcatcgtcttcgcagcctgcttccttccagacagcagcctccccgactaccactacatcatggagaacctcttcctgtacgtcatcagcagcttagagctcctggtggctgaggactacatgatcgtgtacctgaacggtgccacgccccggcggaggatgcctggaatcggctggctgaagaagtgctaccagatgatcgaccggaggttgcggaaaaacctgaagtccttgatcatcgtccacccctcgtggttcattcggactgtgctggccatctctcgccctttcatcagcgtcaagttcatcaacaagatccagtacgtgcacagcttggaagacctggagcaactcatccctatggaacacgtccagatcccagactgcgtcctgcaatacgaagaggaaagactgaaggccaggagggagagcgcgaggccccagccggagtttgtgctgcccaggtctgaagagaagccagaggtggcaccagtggaaaacaggtctgctctggtctcagaagatcaggaaacaagcctccagcccctgcacagatcaagctgatgccacgtggcccaagttccaaccctaagtcacgttcatgtcctgaggcgacgtgagcataacaaaggacatggaagaagattccagatgccagaaaacctctgtcagacgcccactggccccagatctcatcctgcctcatcctgagtcccaatcttccaagggtgccagcccctccgttcatctctgaaacccagcatccttttcagctgcttgaaaacattgtattttttttttttaacgatgcagtatttgtgcgttccagaaaagggcccagctctgagcccctcacccttccacactcacgaactctcagccgaggaaggcaagaagcgcagggggtggcccgcgtggcgtcggtggcctccgctcctgctcgcagcctctgtggtcagagctggatacaagattcaagacccttctcttgcttgtcacccgctccaggttggagccacagacacccaccgccaccccggctgggtctgcgtcctttcctgtgcctttccctccagaatgcggcctcagacctagaagctcaacccccctatgagggccacgtcctggggtagctcctgacctccgaccttatgtccaaatttcacacccatggtttttcatttgacccgcccccttctcgctcataatgacacccagctcctttgagaggatcagagcccattgcacaagaagagccgctgccaaccatccttgtcctccgattgcaaaatgacaccccagtaatctagaacattctcaagcccctttaactcagatgtcaagccaccgggcaaaccccgtcaatacctcccaccaaggaatgagatatgtggacctcactgctcccccaacccagcgtcaggctgggacacgccaacgctgttccgggttggaacagcagaggctcagaaactggctctgaaataggcagacctagcaagaggaagatacagggtatcgggcgtttgagtgtttcagaagtcattcgggaagataaatccagtgcgctggccgcagccacctgcattcaaagcttggaccagcgggttcttgttcgggaggcaaatttccctaggaaaaagaagacagacttttctaatgtggtccaaatgcggatcactggtcagatggactctagaagcactgagctccctgtctctggaagtatttaagaaaaggctgggccaggcacgatggctcacgcctgtaatcccagactttgggaggccgaggcaggcggatcacctgaggtgaggagtttgagaacagcctggccaacatggtgaaacctcatctctactaaaaatacaaaaattagccaggcgtggtggcaggtgcctgtaatcccagctacttgggaggctgaggcatgagaatcacttaaacctgagaggcagaggttacagtgagccaagatcgtgccactgcattccagcctgggcgacagagcaagactctgtctcaaaaaaaataaaaaataatcagggcacagtggctcatgcctgtaatcccagcactctgggaggctgaggtgggtggatcacctgaggtcaggagttcaagaccagcctggtgaacatggcgaaaccccgtctctaataaaaatacaaaaattagccgggcatggtggtgcatgcctgtaatcccagctactcgggaggctgaggcaggagaactgcttgaacccaggaggcagaggttgcagtgatccaagatcatgccactgcactccagcctgggcaacaagagcaaaactccgtctcaaaataaaaa

SEQ ID NO: 109300 - DNA, 530 bp, Homo sapiens
  Payload ID: 1471
  Gene Symbol: ATCAY
  Gene Name: ataxia, cerebellar, Cayman type
  ENST ID: ENST00000598136
  CDS Start-End: 233-530
gttcccacagcagccctgcaaagtgagtgtgcctgagaaacttccgcctcccctgcacccagccctgtttagggcacgaggctgaatcaatggctctgaaggcccggggagcgtgagcgatgcccagctgcacccgggcagggctcgcctttgtttgccagtaaggaggagaggctgtctcagctgcagaggggtcatccctgcttcaagccagtgcctcttcccagctcccatggggaccaccgaagccacgctccggatggaaaacgtggacgtgaaggaggaatggcaggacgaagatcttcccaggccactcccagaagagacgggggtggaactgcttggcagcccggtggaagacacatcctctcctcccaacacgctaaatttcaacggagcgcatcgtaagaggaagacgctggtggccccagagatcaacatttctctggatcagagtgaggggtccctgctgtccgatgacttcttggatacccctgatgacctggatattaacgtggatgacatcgaga

SEQ ID NO: 109301 - DNA, 1957 bp, Homo sapiens
  Payload ID: 1471
  Gene Symbol: ATCAY
  Gene Name: ataxia, cerebellar, Cayman type
  ENST ID: ENST00000597739
  CDS Start-End: 366-590
ctctgccagccctgagctgggaagaagcagctacctcggaggcagggcgcgcaggcgggcggcgatgagagggggcgcagccgcagccccgcgctggggagcccaccgctaaccctgcaccccacccacccctgcacaaaagagctggcgggcgctggccacgtcgccctgggtgaccttcctcggatgcagaatccgcccctgcgagcatcctcttcctcctaggctctgaaggcccggggagcgtgagcgatgcccagctgcacccgggcagggctcgcctttgtttgccagtaaggaggagaggctgtctcagctgcagaggggtcatccctgcttcaagccagtgcctcttcccagctcccatggggaccaccgaagccacgctccggatggaaaacgtggacgtgaaggaggaatggcaggacgaagatcttcccagccaggaattgctttgcacaatcctgggaaccaccaagtccaaaatccacagggcaggctggaaactgtcaggccactcccagaagagacgggggtggaactgcttggcagcccggtggaagacacatcctctcctcccaacacgctaaatttcaacggagcgcatcgtaagaggaagacgctggtggccccagagatcaacatttctctggatcagagtgaggggtccctgctgtccgatgacttcttggatacccctgatgacctggatattaacgtggatgacatcgagacccccgatgagaccgactcgctggagttcctggggaatggcaacgaactggagtgggaagacgacacccccgtggccaccgccaagaacatgcccggggacagcgcggatctatttggggacggcacgacggaggacggcagcgccgccaacgggcgcctgtggcggacagtgatcatcggggagcaagagcaccgtatagacctgcacatgatccggccttacatgaaagtggtcacccacggagggtactacggcgaaggcctcaacgccatcatcgtcttcgcagcctgcttccttccagacagcagcctccccgactaccactacatcatggagaacctcttcctgtacgtcatcagcagcttagagctcctggtggctgaggactacatgatcgtgtacctgaacggtgccacgccccggcggaggatgcctggaatcggctggctgaagaagtgctaccagatgatcgaccggaggttgcggaaaaacctgaagtccttgatcatcgtccacccctcgtggttcattcggactgtgctggccatctctcgccctttcatcagcgtcaagttcatcaacaagatccagtacgtgcacagcttggaagacctggagcaactcatccctatggaacacgtccagatcccagactgcgtcctgcaatacgaagaggaaagactgaaggccaggagggagagcgcgaggccccagccggagtttgtgctgcccaggtctgaagagaagccagaggtggcaccagtggaaaacaggtctgctctggtctcagaagatcaggaaacaagcatgtcctgaggcgacgtgagcataacaaaggacatggaagaagattccagatgccagaaaacctctgtcagacgcccactggccccagatctcatcctgcctcatcctgagtcccaatcttccaagggtgccagcccctccgttcatctctgaaacccagcatccttttcagctgcttgaaaacattgtattttttttttttaacgatgcagtatttgtgcgttccagaaaagggcccagctctgagcccctcacccttccacactcacgaactctcagccgaggaaggcaagaagcgcagggggtggcccgcgtggcgtcggtggcctccgctcctgctcgcagcctctgtggtcagagctggatacaagattcaagacccttctcttgcttgtcacccgctccaggttggag

SEQ ID NO: 109302 - DNA, 10602 bp, Homo sapiens
  Payload ID: 1472
  Gene Symbol: ATXN1
  Gene Name: ataxin 1
  Uniprot ID: P54253
  ENST ID: ENST00000244769
  CDS Start-End: 938-3385
ctactacagtggcggagccgtacaggacctgtttcactgcagggggatccaaaacaagccccgtggagcagcagccagagcaacagcagccgcaagacattgtttctctccctctgcccccccttccccacgcaaccccagatccatttacactttacagttttacctcacaaaaactactacaagcaccaagctccctgatggaaaggagcatcgtgcatcaagtcaccagggtggtccattcaagctgcagatttgtttgtcatccttgtacagcaatctcctcctccactgccactacagggaagtgcatcacatgtcagcatactggagcatagtgaaagagtctattttgaagcttcaaacttagtgctgctgcagaccaggaacaagagagaaagagtggatttcagcctgcacggatggtcttgaaacacaaatggtttttggtctaggcgttttacactgagattctccactgccaccctttctactcaagcaaaatcttcgtgaaaagatctgctgcaaggaactgatagcttatggttctccattgtgatgaaagcacatggtacagttttccaaagaaattagaccattttcttcgtgagaaagaaatcgacgtgctgttttcatagggtatttctcacttctctgtgaaaggaagaaagaacacgcctgagcccaagagccctcaggagccctccagagcctgtgggaagtctccatggtgaagtataggctgaggctacctgtgaacagtacgcagtgaatgttcatccagagctgctgttggcggattgtacccacggggagatgattcctcatgaagagcctggatcccctacagaaatcaaatgtgactttccgtttatcagactaaaatcagagccatccagacagtgaaacagtcaccgtggaggggggacggcgaaaaatgaaatccaaccaagagcggagcaacgaatgcctgcctcccaagaagcgcgagatccccgccaccagccggtcctccgaggagaaggcccctaccctgcccagcgacaaccaccgggtggagggcacagcatggctcccgggcaaccctggtggccggggccacgggggcgggaggcatgggccggcagggacctcggtggagcttggtttacaacagggaataggtttacacaaagcattgtccacagggctggactactccccgcccagcgctcccaggtctgtccccgtggccaccacgctgcctgccgcgtacgccaccccgcagccagggaccccggtgtcccccgtgcagtacgctcacctgccgcacaccttccagttcattgggtcctcccaatacagtggaacctatgccagcttcatcccatcacagctgatccccccaaccgccaaccccgtcaccagtgcagtggcctcggccgcaggggccaccactccatcccagcgctcccagctggaggcctattccactctgctggccaacatgggcagtctgagccagacgccgggacacaaggctgagcagcagcagcagcagcagcagcagcagcagcagcagcatcagcatcagcagcagcagcagcagcagcagcagcagcagcagcagcagcacctcagcagggctccggggctcatcaccccggggtcccccccaccagcccagcagaaccagtacgtccacatttccagttctccgcagaacaccggccgcaccgcctctcctccggccatccccgtccacctccacccccaccagacgatgatcccacacacgctcaccctggggcccccctcccaggtcgtcatgcaatacgccgactccggcagccactttgtccctcgggaggccaccaagaaagctgagagcagccggctgcagcaggccatccaggccaaggaggtcctgaacggtgagatggagaagagccggcggtacggggccccgtcctcagccgacctgggcctgggcaaggcaggcggcaagtcggttcctcacccgtacgagtccaggcacgtggtggtccacccgagcccctcagactacagcagtcgtgatccttcgggggtccgggcctctgtgatggtcctgcccaacagcaacacgcccgcagctgacctggaggtgcaacaggccactcatcgtgaagcctccccttctaccctcaacgacaaaagtggcctgcatttagggaagcctggccaccggtcctacgcgctctcaccccacacggtcattcagaccacacacagtgcttcagagccactcccggtgggactgccagccacggccttctacgcagggactcaaccccctgtcatcggctacctgagcggccagcagcaagcaatcacctacgccggcagcctgccccagcacctggtgatccccggcacacagcccctgctcatcccggtcggcagcactgacatggaagcgtcgggggcagccccggccatagtcacgtcatccccccagtttgctgcagtgcctcacacgttcgtcaccaccgcccttcccaagagcgagaacttcaaccctgaggccctggtcacccaggccgcctacccagccatggtgcaggcccagatccacctgcctgtggtgcagtccgtggcctccccggcggcggctccccctacgctgcctccctacttcatgaaaggctccatcatccagttggccaacggggagctaaagaaggtggaagacttaaaaacagaagatttcatccagagtgcagagataagcaacgacctgaagatcgactccagcaccgtagagaggattgaagacagccatagcccgggcgtggccgtgatacagttcgccgtcggggagcaccgagcccaggtcagcgttgaagttttggtagagtatcctttttttgtgtttggacagggctggtcatcctgctgtccggagagaaccagccagctctttgatttgccgtgttccaaactctcagttggggatgtctgcatctcgcttaccctcaagaacctgaagaacggctctgttaaaaagggccagcccgtggatcccgccagcgtcctgctgaagcactcaaaggccgacggcctggcgggcagcagacacaggtatgccgagcaggaaaacggaatcaaccaggggagtgcccagatgctctctgagaatggcgaactgaagtttccagagaaaatgggattgcctgcagcgcccttcctcaccaaaatagaacccagcaagcccgcggcaacgaggaagaggaggtggtcggcgccagagagccgcaaactggagaagtcagaagacgaaccacctttgactcttcctaagccttctctaattcctcaggaggttaagatttgcattgaaggccggtctaatgtaggcaagtagaggcagcgtgggggaaaggaaacgtggctctcccttatcatttgtatccagattactgtactgtaggctaaaataacacagtatttacatgttatcttcttaattttaggtttctgttctaaccttgtcattagagttacagcaggtgtgtcgcaggagactggtgcatatgctttttccacgagtgtctgtcagtgagcgggcgggaggaagggcacagcaggagcggtcagggctccaggcatccccggggaagaaaggaacggggcttcacagtgcctgccttctctagcggcacagaagcagccgggggcgctgactcccgctagtgtcaggagaaaagtcccgtgggaagggtcctgcaggggtgcagggttgcacgcatgtgggggtgcacaggcgctgtggcggcgagtgagggtctctttttctctgcctccctctgcctcactctcttgctatcggcatgggccgggggggttcagagcagtgtcctcctggggttcccacgtgcaaaatcaacatcaggaacccagcttcagggcatcgcggagacgcgtcagatggcagatttggaaagttaaccatttaaaagaacatttttctctccaacatattttacaataaaagcaacttttaattgtatagatatatatttccccctatggggcctgactgcactgatatatattttttttaaagagcaactgccacatgcgggatttcatttctgctttttactagtgcagcgatgtcaccagggtgttgtggtggacagggaagcccctgctgtcatggccccacatggggtaaggggggttgggggtgggggagagggagagagcgaacacccacgctggtttctgtgcagtgttaggaaaaccaatcaggttattgcattgacttcactcccaagaggtagatgcaaactgcccttcagtgagagcaacagaagctcttcacgttgagtttgcgaaatctttttgtctttgaactctagtactgtttatagttcatgactatggacaactcgggtgccactttttttttttttcagattccagtgtgacatgaggaattagattttgaagatgagcatatattactatctttaagcatttaaaaatactgttcacactttattaccaagcatcttggtctctcattcaacaagtactgtatctcactttaaactctttggggaaaaaacaaaaacaaaaaaaactaagttgctttctttttttcaacactgtaactacatttcagctctgcagaattgctgaagagcaagatattgaaagtttcaatgtggtttaaagggatgaatgtgaattatgaactagtatgtgacaataaatgaccaccaagtactacctgacgggaggcacttttcactttgatgtctgagaatcagttcaaggcatatgcagagttggcagagaaactgagagaaaagggatggagaagagaatactcatttttgtccagtgtttttctttttaagatgaacttttaaagaaccttgcgatttgcacatattgagtttataacttgtgtgatattcctgcagtttttatccaataacattgtgggaaaggtttgggggactgaacgagcataaataaatgtagcaaaatttctttctaacctgcctaaactctaggccattttataaggttatgttcctttgaaaattcattttggtctttttaccacatctgtcacaaaaagccaggtcttagcgggctcttagaaactctgagaattttcttcagattcattgagagagttttccataaagacatttatatatgtgagcaagattttttttaaacaattactttattattgttgttattaatgttattttcagaatggcttttttttttctattcaaaatcaaatcgagatttaatgtttggtacaaacccagaaagggtatttcatagtttttaaacctttcattcccagagatccgaaatatcatttgtgggttttgaatgcatctttaaagtgctttaaaaaaaagttttataagtagggagaaatttttaaatattcttacttggatggctgcaactaaactgaacaaatacctgacttttcttttaccccattgaaaatagtactttcttcgtttcacaaattaaaaaaaaaatctggtatcaacccacattttggctgtctagtattcatttacatttagggttcaccaggactaatgatttttataaaccgttttctggggtgtaccaaaaacatttgaataggtttagaatagctagaatagttccttgactttcctcgaatttcattaccctctcagcatgcttgcagagagctgggtgggctcattcttgcagtcatactgcttatttagtgctgtattttttaaacgtttctgttcagagaacttgcttaatcttccatatattctgctcagggcacttgcaattattaggttttgtttttctttttgttttttagcctttgatggtaagaggaatacgggctgccacatagactttgttctcattaatatcactatttacaactcatgtggactcagaaaaacacacaccaccttttggcttacttcgagtattgaattgactggatccactaaaccaacactaagatgggaaaacacacatggtttggagcaataggaacatcatcataatttttgtggttctatttcaggtataggaattataaaataattggttctttctaaacacttgtcccatttcattctcttgcttttttagcatgtgcaatactttctgtgccaatagagtctgaccagtgtgctatatagttaaagctcattcccttttggctttttccttgtttggttgatcttccccattctggccagagcagggctggagggaaggagccaggagggagagagcctcccacctttcccctgctgcggatgctgagtgctggggcggggagccttcaggagccccgtgcgtctgccgccacgttgcagaaagagccagccaaggagacccgggggaggaaccgcagtgtcccctgtcaccacacggaatagtgaatgtggagtgtggagaggaaggaggcagattcatttctaagacgcactctggagccatgtagcctggagtcaacccattttccacggtcttttctgcaagtgggcaggcccctcctcggggtctgtgtccttgagacttggagccctgcctctgagcctggacgggaagtgtggcctgttgtgtgtgtgcgttctgagcgtgttggccagtggctgtggaggggaccacctgccacccacggtcaccactcccttgtggcagctttctcttcaaataggaagaacgcacagagggcaggagcctcctgtttgcagacgttggcgggccccgaggctcccagagcagcctctgtcaccgcttctgtgtagcaaacattaacgatgacaggggtagaaattcttcggtgccgttcagcttacaaggatcagccatgtgcctctgtactatgtccactttgcaatatttaccgacagccgtcttttgttctttctttcctgttttccatttttaaactagtaacagcaggccttttgcgtttacaatggaacacaatcaccaagaaattagtcagggcgaaaagaaaaaaataatactattaataagaaaccaacaaacaagaacctctctttctagggatttctaaatatataaaatgactgttccttagaatgtttaacttaagaattatttcagtttgtctgggccacactggggcagaggggggagggagggatacagagatggatgccacttacctcagatcttttaaagtggaaatccaaattgaattttcatttggactttcaggataattttctatgttggtcaacttttcgttttccctaactcacccagtttagtttgggatgatttgatttctgttgttgttgatcccatttctaacttggaattgtgagcctctatgttttctgttaggtgagtgtgttgggttttttccccccaccaggaagtggcagcatccctccttctcccctaaagggactctgcggaacctttcacacctctttctcagggacggggcaggtgtgtgtgtggtacactgacgtgtccagaagcagcactttgactgctctggagtagggttgtacaatttcaaggaatgtttggatttcctgcatcttgtggattactccttagataccgcatagattgcaatataatgctgcatgttcaagatgaacagtagctcctagtaatcataaaatccactctttgcacagtttgatctttactgaaatatgttgccaaaatttatttttgttgttgtagctctggattttgttttgttttgttttttaaggaaacgattgacaataccctttaacatctgtgactactaaggaaacctatttctttcatagagagaaaaatctccaatgcttttgaagacactaataccgtgctatttcagatatgggtgaggaagcagagctctcggtaccgaaggccgggcttcttgagctgtgttggttgtcatggctactgtttcatgaaccacaagcagctcaacagactggtctgttgccttctgaaaccctttgcacttcaatttgcaccaggtgaaaacagggccagcagactccatggcccaattcggtttcttcggtggtgatgtgaaaggagagaattacactttttttttttttaagtggcgtggaggcctttgcttccacatttgtttttaacccagaatttctgaaatagagaatttaagaacacatcaagtaataaatatacagagaatatacttttttataaagcacatgcatctgctattgtgttgggttggtttcctctcttttccacggacagtgttgtgtttctggcatagggaaactccaaacaacttgcacacctctactccggagctgagatttcttttacatagatgacctcgcttcaaatacgttaccttactgatgataggatcttttcttgtagcactataccttgtgggaatttttttttaaatgtacacctgatttgagaagctgaagaaaacaaaattttgaagcactcactttgaggagtacaggtaatgttttaaaaaattgcacaaaagaaaaatgaatgtcgaaatgattcattcagtgtttgaaagatatggctctgttgaaacaatgagtttcatactttgtttgtaaaaaaaaaaaagcagagaagggttgaaagttacatgtttttttgtatatagaaatttgtcatgtctaaatgatcagatttgtatggttatggcctggaagaattactacgtaaaaggctcttaaactatacctatgcttattgttatttttgttacatatagccctcgtctgagggaggggaactcggtattctgcgatttgagaatactgttcattcctatgctgaaagtacttctctgagctcccttcttagtctaaactcttaagccattgcaacttctttttcttcagagatgatgtttgacattttcagcacttcctgttcctataaacccaaagaatataatcttgaacacgaagtgtttgtaacaagggatccaggctaccaatcaaacaggactcattatggggacaaaaaaaaaaattatttcaccttctttccccccacacctcatttaaatggggggagtaaaaacatgatttcaatgtaaatgcctcattttattttagttttattttgatttttatttaatataaagaggccagaataaatacggagcatcttctcagaatagtattcctgtccaaaaatcaagccggacagtggaaactggacagctgtggggatattaagcacccccacttacaattcttaaattcagaatctcgtcccctcccttctcgttgaaggcaactgttctggtagctaactttctcctgtgtaatggcgggagggaacaccggcttcagtttttcatgtccccatgacttgcatacaaatggttcaactgtattaaaattaagtgcatttggccaataggtagtatctatacaataacaacaatctctaagaatttccataacttttcttatctgaaaggactcaagtcttccactgcagatacattggaggcttcacccacgttttctttccctttagtttgtttgctgtctggatggccaatgagcctgtctccttttctgtggccaatctgaaggccttcgttggaagtgttgtttacagtaatccttaccaagataacatactgtcctccagaataccaagtattaggtgacactagctcaagctgttgtcttcagagcagttaccaagaagctcggtgcacaggttttctctggttcttacaggaaccacctactctttcagttttctggcccaggagtggggtaaatcctttagttagtgcatttgaacttgatacctgtgcattcagttctgtgaatactgccctttttggcggggtttcctcatctccccagcctgaactgctcaactctaaacccaaattagtgtcagccgaaaggaggtttcaagatagtcctgtcagtatttgtggtgaccttcagattagacagtcttcatttccagccagtggagtcctggctccagagccatctctgagactcgtactactggatgttttaatatcagatcattacccaccatatgcctcccacaggccaagggaaaacagacaccagaacttgggttgagggcactaccagactgacatggccagtacagaggagaactagggaaggaatgatgttttgcaccttattgaaaagaaaattttaagtgcatacataatagttaagagcttttattgtgacaggagaacttttttccatatgcgtgcatactctctgtaattccagtgtaaaatattgtacttgcactagcttttttaaacaaatattaaaaaatggaagaattcatattctattttctaatcgtggtgtgtctatttgtaggatacactcgagtctgtttattgaattttatggtccctttctttgatggtgcttgcaggttttctaggtagaaattatttcattattataataaaacaatgtttgattcaaaatttgaacaaaattgttttaaataaattgtctgtataccagtacaagtttattgtttcagtatactcgtactaataaaataacagtgccaattgca

SEQ ID NO: 109303 - DNA, 10587 bp, Homo sapiens
  Payload ID: 1472
  Gene Symbol: ATXN1
  Gene Name: ataxin 1
  Uniprot ID: P54253
  ENST ID: ENST00000436367
  CDS Start-End: 923-3370
gaggagagagcagagtataccgcagacatcatttctactacagtggcggagccgtacaggacctgtttcactgcagggggatccaaaacaagccccgtggagcagcagccagagcaacagcagccgcaagacattgtttctctccctctgcccccccttccccacgcaaccccagatccatttacactttacagagcatcgtgcatcaagtcaccagggtggtccattcaagctgcagatttgtttgtcatccttgtacagcaatctcctcctccactgccactacagggaagtgcatcacatgtcagcatactggagcatagtgaaagagtctattttgaagcttcaaacttagtgctgctgcagaccaggaacaagagagaaagagtggatttcagcctgcacggatggtcttgaaacacaaatggtttttggtctaggcgttttacactgagattctccactgccaccctttctactcaagcaaaatcttcgtgaaaagatctgctgcaaggaactgatagcttatggttctccattgtgatgaaagcacatggtacagttttccaaagaaattagaccattttcttcgtgagaaagaaatcgacgtgctgttttcatagggtatttctcacttctctgtgaaaggaagaaagaacacgcctgagcccaagagccctcaggagccctccagagcctgtgggaagtctccatggtgaagtataggctgaggctacctgtgaacagtacgcagtgaatgttcatccagagctgctgttggcggattgtacccacggggagatgattcctcatgaagagcctggatcccctacagaaatcaaatgtgactttccgtttatcagactaaaatcagagccatccagacagtgaaacagtcaccgtggaggggggacggcgaaaaatgaaatccaaccaagagcggagcaacgaatgcctgcctcccaagaagcgcgagatccccgccaccagccggtcctccgaggagaaggcccctaccctgcccagcgacaaccaccgggtggagggcacagcatggctcccgggcaaccctggtggccggggccacgggggcgggaggcatgggccggcagggacctcggtggagcttggtttacaacagggaataggtttacacaaagcattgtccacagggctggactactccccgcccagcgctcccaggtctgtccccgtggccaccacgctgcctgccgcgtacgccaccccgcagccagggaccccggtgtcccccgtgcagtacgctcacctgccgcacaccttccagttcattgggtcctcccaatacagtggaacctatgccagcttcatcccatcacagctgatccccccaaccgccaaccccgtcaccagtgcagtggcctcggccgcaggggccaccactccatcccagcgctcccagctggaggcctattccactctgctggccaacatgggcagtctgagccagacgccgggacacaaggctgagcagcagcagcagcagcagcagcagcagcagcagcagcatcagcatcagcagcagcagcagcagcagcagcagcagcagcagcagcagcacctcagcagggctccggggctcatcaccccggggtcccccccaccagcccagcagaaccagtacgtccacatttccagttctccgcagaacaccggccgcaccgcctctcctccggccatccccgtccacctccacccccaccagacgatgatcccacacacgctcaccctggggcccccctcccaggtcgtcatgcaatacgccgactccggcagccactttgtccctcgggaggccaccaagaaagctgagagcagccggctgcagcaggccatccaggccaaggaggtcctgaacggtgagatggagaagagccggcggtacggggccccgtcctcagccgacctgggcctgggcaaggcaggcggcaagtcggttcctcacccgtacgagtccaggcacgtggtggtccacccgagcccctcagactacagcagtcgtgatccttcgggggtccgggcctctgtgatggtcctgcccaacagcaacacgcccgcagctgacctggaggtgcaacaggccactcatcgtgaagcctccccttctaccctcaacgacaaaagtggcctgcatttagggaagcctggccaccggtcctacgcgctctcaccccacacggtcattcagaccacacacagtgcttcagagccactcccggtgggactgccagccacggccttctacgcagggactcaaccccctgtcatcggctacctgagcggccagcagcaagcaatcacctacgccggcagcctgccccagcacctggtgatccccggcacacagcccctgctcatcccggtcggcagcactgacatggaagcgtcgggggcagccccggccatagtcacgtcatccccccagtttgctgcagtgcctcacacgttcgtcaccaccgcccttcccaagagcgagaacttcaaccctgaggccctggtcacccaggccgcctacccagccatggtgcaggcccagatccacctgcctgtggtgcagtccgtggcctccccggcggcggctccccctacgctgcctccctacttcatgaaaggctccatcatccagttggccaacggggagctaaagaaggtggaagacttaaaaacagaagatttcatccagagtgcagagataagcaacgacctgaagatcgactccagcaccgtagagaggattgaagacagccatagcccgggcgtggccgtgatacagttcgccgtcggggagcaccgagcccaggtcagcgttgaagttttggtagagtatcctttttttgtgtttggacagggctggtcatcctgctgtccggagagaaccagccagctctttgatttgccgtgttccaaactctcagttggggatgtctgcatctcgcttaccctcaagaacctgaagaacggctctgttaaaaagggccagcccgtggatcccgccagcgtcctgctgaagcactcaaaggccgacggcctggcgggcagcagacacaggtatgccgagcaggaaaacggaatcaaccaggggagtgcccagatgctctctgagaatggcgaactgaagtttccagagaaaatgggattgcctgcagcgcccttcctcaccaaaatagaacccagcaagcccgcggcaacgaggaagaggaggtggtcggcgccagagagccgcaaactggagaagtcagaagacgaaccacctttgactcttcctaagccttctctaattcctcaggaggttaagatttgcattgaaggccggtctaatgtaggcaagtagaggcagcgtgggggaaaggaaacgtggctctcccttatcatttgtatccagattactgtactgtaggctaaaataacacagtatttacatgttatcttcttaattttaggtttctgttctaaccttgtcattagagttacagcaggtgtgtcgcaggagactggtgcatatgctttttccacgagtgtctgtcagtgagcgggcgggaggaagggcacagcaggagcggtcagggctccaggcatccccggggaagaaaggaacggggcttcacagtgcctgccttctctagcggcacagaagcagccgggggcgctgactcccgctagtgtcaggagaaaagtcccgtgggaagggtcctgcaggggtgcagggttgcacgcatgtgggggtgcacaggcgctgtggcggcgagtgagggtctctttttctctgcctccctctgcctcactctcttgctatcggcatgggccgggggggttcagagcagtgtcctcctggggttcccacgtgcaaaatcaacatcaggaacccagcttcagggcatcgcggagacgcgtcagatggcagatttggaaagttaaccatttaaaagaacatttttctctccaacatattttacaataaaagcaacttttaattgtatagatatatatttccccctatggggcctgactgcactgatatatattttttttaaagagcaactgccacatgcgggatttcatttctgctttttactagtgcagcgatgtcaccagggtgttgtggtggacagggaagcccctgctgtcatggccccacatggggtaaggggggttgggggtgggggagagggagagagcgaacacccacgctggtttctgtgcagtgttaggaaaaccaatcaggttattgcattgacttcactcccaagaggtagatgcaaactgcccttcagtgagagcaacagaagctcttcacgttgagtttgcgaaatctttttgtctttgaactctagtactgtttatagttcatgactatggacaactcgggtgccactttttttttttttcagattccagtgtgacatgaggaattagattttgaagatgagcatatattactatctttaagcatttaaaaatactgttcacactttattaccaagcatcttggtctctcattcaacaagtactgtatctcactttaaactctttggggaaaaaacaaaaacaaaaaaaactaagttgctttctttttttcaacactgtaactacatttcagctctgcagaattgctgaagagcaagatattgaaagtttcaatgtggtttaaagggatgaatgtgaattatgaactagtatgtgacaataaatgaccaccaagtactacctgacgggaggcacttttcactttgatgtctgagaatcagttcaaggcatatgcagagttggcagagaaactgagagaaaagggatggagaagagaatactcatttttgtccagtgtttttctttttaagatgaacttttaaagaaccttgcgatttgcacatattgagtttataacttgtgtgatattcctgcagtttttatccaataacattgtgggaaaggtttgggggactgaacgagcataaataaatgtagcaaaatttctttctaacctgcctaaactctaggccattttataaggttatgttcctttgaaaattcattttggtctttttaccacatctgtcacaaaaagccaggtcttagcgggctcttagaaactctgagaattttcttcagattcattgagagagttttccataaagacatttatatatgtgagcaagattttttttaaacaattactttattattgttgttattaatgttattttcagaatggcttttttttttctattcaaaatcaaatcgagatttaatgtttggtacaaacccagaaagggtatttcatagtttttaaacctttcattcccagagatccgaaatatcatttgtgggttttgaatgcatctttaaagtgctttaaaaaaaagttttataagtagggagaaatttttaaatattcttacttggatggctgcaactaaactgaacaaatacctgacttttcttttaccccattgaaaatagtactttcttcgtttcacaaattaaaaaaaaaatctggtatcaacccacattttggctgtctagtattcatttacatttagggttcaccaggactaatgatttttataaaccgttttctggggtgtaccaaaaacatttgaataggtttagaatagctagaatagttccttgactttcctcgaatttcattaccctctcagcatgcttgcagagagctgggtgggctcattcttgcagtcatactgcttatttagtgctgtattttttaaacgtttctgttcagagaacttgcttaatcttccatatattctgctcagggcacttgcaattattaggttttgtttttctttttgttttttagcctttgatggtaagaggaatacgggctgccacatagactttgttctcattaatatcactatttacaactcatgtggactcagaaaaacacacaccaccttttggcttacttcgagtattgaattgactggatccactaaaccaacactaagatgggaaaacacacatggtttggagcaataggaacatcatcataatttttgtggttctatttcaggtataggaattataaaataattggttctttctaaacacttgtcccatttcattctcttgcttttttagcatgtgcaatactttctgtgccaatagagtctgaccagtgtgctatatagttaaagctcattcccttttggctttttccttgtttggttgatcttccccattctggccagagcagggctggagggaaggagccaggagggagagagcctcccacctttcccctgctgcggatgctgagtgctggggcggggagccttcaggagccccgtgcgtctgccgccacgttgcagaaagagccagccaaggagacccgggggaggaaccgcagtgtcccctgtcaccacacggaatagtgaatgtggagtgtggagaggaaggaggcagattcatttctaagacgcactctggagccatgtagcctggagtcaacccattttccacggtcttttctgcaagtgggcaggcccctcctcggggtctgtgtccttgagacttggagccctgcctctgagcctggacgggaagtgtggcctgttgtgtgtgtgcgttctgagcgtgttggccagtggctgtggaggggaccacctgccacccacggtcaccactcccttgtggcagctttctcttcaaataggaagaacgcacagagggcaggagcctcctgtttgcagacgttggcgggccccgaggctcccagagcagcctctgtcaccgcttctgtgtagcaaacattaacgatgacaggggtagaaattcttcggtgccgttcagcttacaaggatcagccatgtgcctctgtactatgtccactttgcaatatttaccgacagccgtcttttgttctttctttcctgttttccatttttaaactagtaacagcaggccttttgcgtttacaatggaacacaatcaccaagaaattagtcagggcgaaaagaaaaaaataatactattaataagaaaccaacaaacaagaacctctctttctagggatttctaaatatataaaatgactgttccttagaatgtttaacttaagaattatttcagtttgtctgggccacactggggcagaggggggagggagggatacagagatggatgccacttacctcagatcttttaaagtggaaatccaaattgaattttcatttggactttcaggataattttctatgttggtcaacttttcgttttccctaactcacccagtttagtttgggatgatttgatttctgttgttgttgatcccatttctaacttggaattgtgagcctctatgttttctgttaggtgagtgtgttgggttttttccccccaccaggaagtggcagcatccctccttctcccctaaagggactctgcggaacctttcacacctctttctcagggacggggcaggtgtgtgtgtggtacactgacgtgtccagaagcagcactttgactgctctggagtagggttgtacaatttcaaggaatgtttggatttcctgcatcttgtggattactccttagataccgcatagattgcaatataatgctgcatgttcaagatgaacagtagctcctagtaatcataaaatccactctttgcacagtttgatctttactgaaatatgttgccaaaatttatttttgttgttgtagctctggattttgttttgttttgttttttaaggaaacgattgacaataccctttaacatctgtgactactaaggaaacctatttctttcatagagagaaaaatctccaatgcttttgaagacactaataccgtgctatttcagatatgggtgaggaagcagagctctcggtaccgaaggccgggcttcttgagctgtgttggttgtcatggctactgtttcatgaaccacaagcagctcaacagactggtctgttgccttctgaaaccctttgcacttcaatttgcaccaggtgaaaacagggccagcagactccatggcccaattcggtttcttcggtggtgatgtgaaaggagagaattacactttttttttttttaagtggcgtggaggcctttgcttccacatttgtttttaacccagaatttctgaaatagagaatttaagaacacatcaagtaataaatatacagagaatatacttttttataaagcacatgcatctgctattgtgttgggttggtttcctctcttttccacggacagtgttgtgtttctggcatagggaaactccaaacaacttgcacacctctactccggagctgagatttcttttacatagatgacctcgcttcaaatacgttaccttactgatgataggatcttttcttgtagcactataccttgtgggaatttttttttaaatgtacacctgatttgagaagctgaagaaaacaaaattttgaagcactcactttgaggagtacaggtaatgttttaaaaaattgcacaaaagaaaaatgaatgtcgaaatgattcattcagtgtttgaaagatatggctctgttgaaacaatgagtttcatactttgtttgtaaaaaaaaaaaagcagagaagggttgaaagttacatgtttttttgtatatagaaatttgtcatgtctaaatgatcagatttgtatggttatggcctggaagaattactacgtaaaaggctcttaaactatacctatgcttattgttatttttgttacatatagccctcgtctgagggaggggaactcggtattctgcgatttgagaatactgttcattcctatgctgaaagtacttctctgagctcccttcttagtctaaactcttaagccattgcaacttctttttcttcagagatgatgtttgacattttcagcacttcctgttcctataaacccaaagaatataatcttgaacacgaagtgtttgtaacaagggatccaggctaccaatcaaacaggactcattatggggacaaaaaaaaaaattatttcaccttctttccccccacacctcatttaaatggggggagtaaaaacatgatttcaatgtaaatgcctcattttattttagttttattttgatttttatttaatataaagaggccagaataaatacggagcatcttctcagaatagtattcctgtccaaaaatcaagccggacagtggaaactggacagctgtggggatattaagcacccccacttacaattcttaaattcagaatctcgtcccctcccttctcgttgaaggcaactgttctggtagctaactttctcctgtgtaatggcgggagggaacaccggcttcagtttttcatgtccccatgacttgcatacaaatggttcaactgtattaaaattaagtgcatttggccaataggtagtatctatacaataacaacaatctctaagaatttccataacttttcttatctgaaaggactcaagtcttccactgcagatacattggaggcttcacccacgttttctttccctttagtttgtttgctgtctggatggccaatgagcctgtctccttttctgtggccaatctgaaggccttcgttggaagtgttgtttacagtaatccttaccaagataacatactgtcctccagaataccaagtattaggtgacactagctcaagctgttgtcttcagagcagttaccaagaagctcggtgcacaggttttctctggttcttacaggaaccacctactctttcagttttctggcccaggagtggggtaaatcctttagttagtgcatttgaacttgatacctgtgcattcagttctgtgaatactgccctttttggcggggtttcctcatctccccagcctgaactgctcaactctaaacccaaattagtgtcagccgaaaggaggtttcaagatagtcctgtcagtatttgtggtgaccttcagattagacagtcttcatttccagccagtggagtcctggctccagagccatctctgagactcgtactactggatgttttaatatcagatcattacccaccatatgcctcccacaggccaagggaaaacagacaccagaacttgggttgagggcactaccagactgacatggccagtacagaggagaactagggaaggaatgatgttttgcaccttattgaaaagaaaattttaagtgcatacataatagttaagagcttttattgtgacaggagaacttttttccatatgcgtgcatactctctgtaattccagtgtaaaatattgtacttgcactagcttttttaaacaaatattaaaaaatggaagaattcatattctattttctaatcgtggtgtgtctatttgtaggatacactcgagtctgtttattgaattttatggtccctttctttgatggtgcttgcaggttttctaggtagaaattatttcattattataataaaacaatgtttgattcaaaatttgaacaaaattgttttaaataaattgtctgtataccagtacaagtttattgtttcagtatactcgtactaataaaataacagtgccaattgca

SEQ ID NO: 109304 - DNA, 3329 bp, Homo sapiens
  Payload ID: 1473
  Gene Symbol: ATXN10
  Gene Name: ataxin 10
  Uniprot ID: Q9UBB4
  ENST ID: ENST00000252934
  CDS Start-End: 266-1693
ggcgggacttccgccggcgccccctcccccgcggcgccgtctcctcctcccgcctgaggcgagtctgggctcagcctagagctctccggcggcggcgcagcttcagggcagcgcgggctgcagcggcggcggcggttagggctgtgtagggcgaggcctcccccttcctcctcgccatcctactcctccctcctcgtcatcctcccccttcgtcctcctcgccttcctcctcctcgtcaggctcgacccagctgtgagcggcaagatggcggcgcccaggccgccgcctgccaggctgtcgggcgtcatggtgccggcgcccatccaagacctggaggccctgcgcgcgctcacggcgctcttcaaagagcagcggaaccgagaaacagcacccaggactatcttccaaagagttctggatatcctaaagaaatcttctcatgctgttgagcttgcctgcagagatccatcccaagtggaaaacctggcttccagtctgcagttaataacagaatgcttcaggtgtcttcgcaatgcttgcatagagtgttctgtgaaccagaattcaatcaggaacttggatacgattggtgttgctgttgatttgattcttctgtttcgtgaactgcgagtggaacaggaatctctgttgacagcttttcgctgtggcctgcagtttttaggcaacattgcctcacggaatgaagattcccagtctattgtttgggtgcatgctttcccagaactgtttttgtcttgcttaaatcatccggacaaaaaaattgttgcctactcttcaatgattttgtttacatcccttaatcatgaaagaatgaaagaactggaggagaacctcaatattgcaattgatgtcatagatgcttaccaaaaacatcctgaatcagaatggccgttcttgattattacagacctctttctgaaaagcccggaattggtacaagccatgtttcccaaactgaacaatcaagaaagagttacactgttagaccttatgatagccaagataacgagtgatgagccactcaccaaggatgacatccctgtgtttttgcggcatgctgagttgattgcaagcacctttgtggatcagtgcaagactgtgctcaagctggcctctgaggagcctcctgatgatgaggaggcactggctacaattaggcttctcgacgtcctgtgcgaaatgactgtgaatactgagctgctcggctatctgcaggttttccctggcttgctggaaagagtgattgatcttttgcgggtgattcatgtagctggaaaagaaaccacaaacatcttcagtaattgtggttgcgtgagagcagaaggtgacatctccaatgtggccaatgggtttaagtctcatctcattcgtctgattggaaatctgtgttacaagaataaagataaccaagacaaggtaaatgagctggatggtatcccgttgatcctggacaactgcaacatcagtgacagtaacccctttctgacccagtgggtgatatatgccatccgaaaccttaccgaagacaacagccaaaaccaagatttgattgcaaagatggaggaacaggggctggcagatgcatccctacttaaaaaagtgggttttgaagttgaaaagaaaggcgaaaagctgatcctgaaatctactagagacacccctaagccatgaatgaactacatccaaatacctgaatttttggaatctgtttcatggatttttcatcttctaccgtatgtgaaattgcaagtgtttgaagatttataagtacaaatttgggaacatacaaatcttttaggtagtagagtttaacgtgtataagctaaaagtgaaagtaactgagtgttctcttgtttctttgcattaatgtaactgtgtggtttgcctttgtccccctggatagaacgtgcatttaaagaatatattgtacttactgtgacagcagataataaaccagtctcttggagggcacaacccttatttgacaaaacttggatgttggcttgactgtgtttgtcccttcagatggcaagtcagcatcattctttatattcctcttctcattgggttttctgaactctggcaggcggttgaagtagtttctcactgtgattaattctagcaatctcttttcacccctctgcctttccaaaacattgacaagactcatttccagttaattaattcgagaaccctccctcttcattttgggtactgggctgtcttgtcactgagccctatccctttggaatgtggcagggagtgaggttggtgagagaacatgtgggcacttaactcttcatgttccagttcatcccagaagtagacatcccaggacccattctgtgtcaaggtgaatgcctgtgtcctccccagcttcatgcctctgtcatgggggaaggaatagcttatgttctgctctggtgcagtgccgtagattaaaggtacatttctatcttctttgatttaaaaagcaccagtctcataaaggtgccactcagttttagccatgtcttcactgaaattgcaaaagtacttttagggagcaggagtttatttgacatctagttatctgtctgtctgttcatctatctatctgtctgctgtatgagaggtaggactggattaaatgaccactgaactcactgaatccagatcattcatatcatcaacaaaagctctagggggaggtcacgttgtgaatgcttaaaacatattattttcttcaacaaccatatcgctaaactaatatatccagagattttgcacaattcgtgttgaaccttccaaaacaaaaataaagacctgtccaaaagttttgacaaaaatactgattgctcccaaataaagtgcttctaagctttgtgtagacatagtttaactgatttgtaaaaatagcttaagcatgttgagaatgaagtaaaagttttcccatgtgctgtctaatgtactctgtgtaactctgaagacacatcagcttctaggattgcagcaatctatgaataacattttttctctcatttatgactttccatcagtaaagaagccattgcagaatttaaaattacacaaaggagtcattctctcctgggacataaagagttaaagctctgtcctctaaatagaagcctggccaaagggagaaaacagtgggagtcccttttcccttttaacaagtttgcaatagacacttctttttttcctgtctcaatggatgtgtgcacaccagtggaatcgcacaaacttgtcggtatgagctatataataacaaacacaaataaataaaagggagccttgtgagaataca

SEQ ID NO: 109305 - DNA, 3135 bp, Homo sapiens
  Payload ID: 1473
  Gene Symbol: ATXN10
  Gene Name: ataxin 10
  Uniprot ID: Q9UBB4
  ENST ID: ENST00000381061
  CDS Start-End: 267-1502
aggcgggacttccgccggcgccccctcccccgcggcgccgtctcctcctcccgcctgaggcgagtctgggctcagcctagagctctccggcggcggcgcagcttcagggcagcgcgggctgcagcggcggcggcggttagggctgtgtagggcgaggcctcccccttcctcctcgccatcctactcctccctcctcgtcatcctcccccttcgtcctcctcgccttcctcctcctcgtcaggctcgacccagctgtgagcggcaagatggcggcgcccaggccgccgcctgccaggctgtcgggcgtcatggtgccggcgcccatccaagacctggaggccctgcgcgcgctcacggcgctcttcaaagagcagcggaaccggaacttggatacgattggtgttgctgttgatttgattcttctgtttcgtgaactgcgagtggaacaggaatctctgttgacagcttttcgctgtggcctgcagtttttaggcaacattgcctcacggaatgaagattcccagtctattgtttgggtgcatgctttcccagaactgtttttgtcttgcttaaatcatccggacaaaaaaattgttgcctactcttcaatgattttgtttacatcccttaatcatgaaagaatgaaagaactggaggagaacctcaatattgcaattgatgtcatagatgcttaccaaaaacatcctgaatcagaatggccgttcttgattattacagacctctttctgaaaagcccggaattggtacaagccatgtttcccaaactgaacaatcaagaaagagttacactgttagaccttatgatagccaagataacgagtgatgagccactcaccaaggatgacatccctgtgtttttgcggcatgctgagttgattgcaagcacctttgtggatcagtgcaagactgtgctcaagctggcctctgaggagcctcctgatgatgaggaggcactggctacaattaggcttctcgacgtcctgtgcgaaatgactgtgaatactgagctgctcggctatctgcaggttttccctggcttgctggaaagagtgattgatcttttgcgggtgattcatgtagctggaaaagaaaccacaaacatcttcagtaattgtggttgcgtgagagcagaaggtgacatctccaatgtggccaatgggtttaagtctcatctcattcgtctgattggaaatctgtgttacaagaataaagataaccaagacaaggtaaatgagctggatggtatcccgttgatcctggacaactgcaacatcagtgacagtaacccctttctgacccagtgggtgatatatgccatccgaaaccttaccgaagacaacagccaaaaccaagatttgattgcaaagatggaggaacaggggctggcagatgcatccctacttaaaaaagtgggttttgaagttgaaaagaaaggcgaaaagctgatcctgaaatctactagagacacccctaagccatgaatgaactacatccaaatacctgaatttttggaatctgtttcatggatttttcatcttctaccgtatgtgaaattgcaagtgtttgaagatttataagtacaaatttgggaacatacaaatcttttaggtagtagagtttaacgtgtataagctaaaagtgaaagtaactgagtgttctcttgtttctttgcattaatgtaactgtgtggtttgcctttgtccccctggatagaacgtgcatttaaagaatatattgtacttactgtgacagcagataataaaccagtctcttggagggcacaacccttatttgacaaaacttggatgttggcttgactgtgtttgtcccttcagatggcaagtcagcatcattctttatattcctcttctcattgggttttctgaactctggcaggcggttgaagtagtttctcactgtgattaattctagcaatctcttttcacccctctgcctttccaaaacattgacaagactcatttccagttaattaattcgagaaccctccctcttcattttgggtactgggctgtcttgtcactgagccctatccctttggaatgtggcagggagtgaggttggtgagagaacatgtgggcacttaactcttcatgttccagttcatcccagaagtagacatcccaggacccattctgtgtcaaggtgaatgcctgtgtcctccccagcttcatgcctctgtcatgggggaaggaatagcttatgttctgctctggtgcagtgccgtagattaaaggtacatttctatcttctttgatttaaaaagcaccagtctcataaaggtgccactcagttttagccatgtcttcactgaaattgcaaaagtacttttagggagcaggagtttatttgacatctagttatctgtctgtctgttcatctatctatctgtctgctgtatgagaggtaggactggattaaatgaccactgaactcactgaatccagatcattcatatcatcaacaaaagctctagggggaggtcacgttgtgaatgcttaaaacatattattttcttcaacaaccatatcgctaaactaatatatccagagattttgcacaattcgtgttgaaccttccaaaacaaaaataaagacctgtccaaaagttttgacaaaaatactgattgctcccaaataaagtgcttctaagctttgtgtagacatagtttaactgatttgtaaaaatagcttaagcatgttgagaatgaagtaaaagttttcccatgtgctgtctaatgtactctgtgtaactctgaagacacatcagcttctaggattgcagcaatctatgaataacattttttctctcatttatgactttccatcagtaaagaagccattgcagaatttaaaattacacaaaggagtcattctctcctgggacataaagagttaaagctctgtcctctaaatagaagcctggccaaagggagaaaacagtgggagtcccttttcccttttaacaagtttgcaatagacacttctttttttcctgtctcaatggatgtgtgcacaccagtggaatcgcacaaacttgtcggtatgagctatataataacaaacacaaataaataaaagggagccttgtgagaat

SEQ ID NO: 109306 - DNA, 564 bp, Homo sapiens
  Payload ID: 1473
  Gene Symbol: ATXN10
  Gene Name: ataxin 10
  ENST ID: ENST00000402380
  CDS Start-End: 58-438
attttaggcagctattgcttcagaagtcacagtctgttccaccagcctttgccaaggatgcaggtgccacagcatctcaagagaagtcaccaatcacacagctccatgctgaggccctcttgcctgctactgaggagctcttgccacccccgattcctgcctttccccagtgatgcaggacaggtaaatgagctggatggtatcccgttgatcctggacaactgcaacatcagtgacagtaacccctttctgacccagtgggtgatatatgccatccgaaaccttaccgaagacaacagccaaaaccaagatttgattgcaaagatggaggaacaggggctggcagatgcatccctacttaaaaaagtgggttttgaagttgaaaagaaaggcgaaaagctgatcctgaaatctactagagacacccctaagccatgaatgaactacatccaaatacctgaatttttggaatctgtttcatggatttttcatcttctaccgtatgtgaaattgcaagtgtttgaagatttataagtacaaatttgggaacatacaaatctttta

SEQ ID NO: 109307 - DNA, 653 bp, Homo sapiens
  Payload ID: 1473
  Gene Symbol: ATXN10
  Gene Name: ataxin 10
  ENST ID: ENST00000435026
  CDS Start-End: 1-594
cttatgatagccaagataacgagtgatgagccactcaccaaggatgacatccctgtgtttttgcggcatgctgagttgattgcaagcacctttgtggatcagtgcaagactgtgctcaagctggcctctgaggagcctcctgatgatgaggaggcactggctacaattaggcttctcgacgtcctgtgcgaaatgactgtgaatactgagctgctcggctatctgcaggttttccctggcttgctggaaagagtgattgatcttttgcgggtgattcatgtagctggaaaagaaaccacaaacatcttcagtaattgtggttgcgtgagagcagaaggtgacatctccaatgtggccaatgggtttaagtctcatctcattcgtctgattggaaatctgtgttacaagaataaagataaccaagacaaggtaaatgagctggatggtatcccgttgatcctggacaactgcaacatcagtgacagtaacccctatgtatgtacgcatcacccagatggaaatacagaacatgcccatctccctaggcggcttcttgagtgtcccgtctccctcactgccaatccccagatgtaacttctgttctgacttctatgatgttttaatgaataaaaattcccaattttaatgtaaaa

SEQ ID NO: 109308 - DNA, 7886 bp, Homo sapiens
  Payload ID: 1474
  Gene Symbol: ATXN1L
  Gene Name: ataxin 1-like
  Uniprot ID: P0C7T5
  ENST ID: ENST00000427980
  CDS Start-End: 294-2363
gctgtggggggcgctgggtgtggggcggctccggggccggggatggcggcggccgcggttgcggcggctccgggacgagtgagtggatcctgggaagcgctgtgaaatgggctggctcccgagccagccgggaggacacttactacagctgctcagaagcaccactggaaactcagatgtgggcgccccagccagaagcagagaggggtacagggaagctacagagaagccccttctgatgccccagggagcaagtcgactccttccaggctccaggaacaccacaaagcaatatgaaacctgttcatgaaaggagtcaggaatgccttccaccaaagaaacgagacctccccgtgaccagcgaggatatggggagaactaccagctgctccactaaccacacaccctccagtgatgcttctgaatggtcccgaggggttgtggtggctgggcagagccaggcaggagccagagtcagcctggggggtgatggagctgaggccatcaccggtctgacagtggaccagtatggcatgctgtataaggtggctgtgccgcctgccaccttttcaccaactggactcccatctgtggtgaatatgagtcccttgcccccaacgtttaatgtagcgtcttcactaattcaacatccaggcatccactatcctccactccactatgctcagctcccatccacctcgctgcagttcattgggtctccttatagccttccctatgctgtgccacctaatttcctaccgagtcccctcctatctccttctgccaaccttgccacctctcaccttccacactttgtgccatatgcctcacttctggctgaaggagccactcctcccccacaggctccctccccggcccactcatttaacaaagctccctctgccacctccccatctgggcaattgccacatcattcaagtactcagccgctggaccttgctccaggtcggatgcccatttattatcagatgtccaggctacctgctgggtatactttgcatgaaacccctccagcaggtgccagcccagttcttacccctcaggagagccagtctgctctggaagcagctgctgcaaatggaggacagagaccacgagagcgaaatttagtaagacgggaaagtgaagcccttgactcccccaacagcaagggtgaaggccagggactggtgccagtggtagaatgtgtggtggatggacagttgttttcaggttctcagactccacgggtagaggtagcagcaccagcacaccgggggaccccggacactgaccttgaggtccagcgggtggttggcgctttagcttctcaggactatcgtgtggtggcagctcagaggaaggaggaacccagccccctcaacctatcccatcatacccccgaccatcagggtgaggggcgagggtcagccaggaaccctgcagagctggcagagaaaagtcaggcccgtgggttctaccctcagtcccatcaggaaccagtaaaacatagacctttacccaaagcaatggttgtagccaatggcaacctggtgcccactggaactgactcaggcctgctgcctgtgggctcggagatcctggtagcatcaagtctggacgtgcaggccagagccaccttcccagacaaggagccaacgccgccccccattacctcctctcacttgccttcccatttcatgaaaggcgccatcatccagctggctacgggagagctgaagcgggtggaggacctccagacccaggattttgtgcgcagtgccgaagtgagcggggggctgaagattgactctagcacggtcgtggacattcaggagagccaatggcctggatttgtcatgctgcattttgtggttggtgagcagcagagcaaagtgagcatcgaagtgccccccgagcaccccttctttgtatatggccagggttggtcctcttgcagccctgggcggacgacacaactcttctctctgccctgccatcggctacaggtgggagatgtctgcatctctatcagtttacagagcttgaacagtaactcagtttctcaggccagctgtgctcccccaagccagctgggtcccccccgagaaaggcctgagaggacggtcttgggatccagagagctatgtgacagtgaggggaagagccagccggcaggagagggctcccgtgtggtagagccttcccagcctgagtccggtgctcaggcctgctggccagccccgagcttccaaagatacagcatgcaaggggaggaggcacgggctgcgctgctccgtccctctttcattccacaggaggtaaagctgtccattgaagggcgttccaatgcgggaaaatgaacctcttccccagaccaggactggggctttaccccagagcctcgcctcgccgccgtgagcaggcagaggatttgcacacgccgagcagggaatggctttcttggcagtgagatttgggggaaaggggaggcatgaagtcagcctcccaaggcaggatctgttgttcattaccccatggcatcctttcaggacaaccccagagggtgttgtgatggggagcagcaggcctggggcaaggaaggaagggggtgcacacaggagaagaaacattccaaaatcagggcctccctgttctttcctccccatccctagctcctgcaagagaaagtccaggctttgggagcagatggcagagggagggagtaaagaaagagccaaaaatgatgatccacagcttatagtagcagttaaactgtcagaagttttttttcttttttgtggtagaagggcaggaggccccaaggttggaaataagagggttcccacccagaacccttcttgtgagagatgcgcactttaaagggtgattttgttccagatgtctatggctgggtgtgtgggggaggagcactctcatctgcaggactctgcttgatcctctgcttcatagcccttccccatctctcctcaccattctgcctacaaggcttctagcagcacgggggcccggagggagagccccttcagggttcagagtgaagtactaccttgccagggactcagtcaggggactttgggagaaagacttgatagccaggctgactgggttctaggcaggccctctggaaaggtagctcacctaacaaagctcctccatctcagcatgccagacccactttgaaatctcacagaatcttgctggtaatggtgactttagaactagtagaccctttttcccaggcactgaccccccacctttgtctgtgttgtgcccaagtgcctgcgccacccccaccctcctgctgcgctgaccgctgcatggtgtcgtgacctgggcctcatttgtagctgcactgcctttccttgtctgcaaagttggttttgtccactctgaccaagacctctagtttttggtgggtagggggtctctctggtttccccttcagctataatctctatttttaaaatctcaaaatcatgtcccctccacttccactgccaaacagcttggtgaagaaacaagaagggaactatgccctgggccagggcgaatgcgtggctgggcagtgcccatcatggcattttcacatgtcccatatgcccctcctgtcttattccactgcttctcccagcattctggtgcctccaagccatcccctcccaccaccagctctaagattctaggatagtcttgataacatttcagtacctgaatagatgtcattttgtgttggtatattcctctgcaaaaagtattttcaatcttggttgcattggcaccccccctaccccccaccaatgtcttaatcccacattttcttcacaacttttagcatcagctcagaccgtggggttccactgggtattgggaattaggctcccccactagctttcaggtgggtaagtttttttgtttgttttttgggggtctttagactcttgaaggcaactcagggtattgtccacgcagctctctggttagacttctcccaggctatgatcctggcatgtcctttataaggtatacttggattggccgagacctggcctggcatcaggagtccaaacctctgaggtctgatctctgctctgtcaaggactttcggcaagtctcgtgacctctggctctttcacttcctccccacctgccaaatggggataaataatcttacctacctcctggggggaggggaagttctgagaatggagtcattcttagtgttcaggtgctaaaggttgttctcctgggggaacagagtgactgaaactggcttgtttgctacaagccctaccctccactctttcattccttgaaagcagtttgcctggtcagtcagcttttgggggtccatcaaaggaggttgctgacctgaccgtgagtgcttcagtatctggtttgtgtcagaaccagacgccaactttgtactgcatttgggatcatatctttccccttctctgtcccccattctctgaatgctgctttctctggcttgtttcctacagtgggggcctgtggggttgagtcttgaggaatcccctcaaatgagaaggccttgggagaaggcctcatctctggctgtttcatgagcaactcattcctagagttcattgtttgcatgggtttctcacaagcgtccttcctcataggaaggctcatcaactgaatttagtgacatgtacacagtagatgctcaagcagtgtctgcaaggacacaagctgagctttctccttatggggcaaacctatgtctaaccagatacagaccaattagtttagatcaaatcaccttccacttgggctacttgtgactttccaacctggtaacttccactgaattctggaaagagaaattcttgaggaccctggcaagttgggccctgacctttctgttgctgtctcttgctggtgaagcaataccagcagttcctgtaataccacaatatcgttccatgcatatataacatattaatacttgattttgctgagctgcaaaggtatctgtcataaaatatggtccccaggaaaagaatctctgtgctctaaatctcggtcagagctgtggcctcccccttgcctttaacctctagtttagtcttttcctccaggcatgaaaaatatgactaacctgtggtgtgtccattcttccttataggaatttcctgagtttgcaggagacatgagagcagtttttagcgagtattttagtgggaagttgccaactttttaagaatgagcagttgacaagggccagagcctgtcccttgtcagcagtaggacatttccagctcttaggaatagaaaggaggactgctgactgtctggcgctgtataaaaatgtgtataccaatttgggaataggggaacccagtcatggatggataataagccaagtcttgaatcattcctatcaagattagtatacatgaggaagaggtggcatggggggaaggggctctgggagttcagagctgagtacttgtacctgagggagggcccccagccaatctgggctggtccttctatattcttggtcccagttggtcataacaccaagggctttgccctgcgctgctttgccactgctgctgtccgctcactgtcctgcctgctgtcctctacagctccctatccttccatgtctttggccatgtagattaagtgtaggcgtccggttcattcttacctgtgttaggccatgttattttatagcgaagtcatgttcgatagggatggtatgaaatgctgctggtgggctggtaaatccaaagggataaggcttcagtgctgttgggagccctctggctccaaatgtctgactatcttgagggagaaacaagcaggtttctactagtggtgtcttctgttgtattaacttctttcctttgtggtatcttgtatcctgttttaaaaactaaatgaagggaaccacattagggcccatgccagcatcccagtgaagttcgtccagctccagttaggtggattctggagttcggagagggtttaaagtttggctgaaatagcacctcaagtggggtttagttttatttttacctgcgggcatcatgggcgatttagggggaagcacaggatggtggtgtggtttaaacctgcagcaagcaggcatgttgaagagttgagtgatcacgctggagatgaagggttggacatggattgactgggaaaaggcctgggtccattggagtaaagataacctagtcgattgaattggccatgggaagttaggtcacagtcttataaacaaagtaaataggacagagactaagttttagggagacatcttggcctcctaggctaagtttactaaaccacactgaagctatagtaccttccagatgggcaaaagtgtacactacagttgaggagctgaaccttattaggttggatgtcgatcaggaacctgtttgccctttgctgggaagccttcactctccagctttcctggggtagggaaggtctcccacattatgcaataataaaataagcatctgggtctttgcagctgtcagttgctctttcaactctaggatccatctttggaccagaagcctggtctgtgcctaggatgacactggccccagagatgctagagtcgactgcactctctccttagctgcagaccatgcacagtgcctggggcggaaggaggagaggtgttgcggtttgccctgctgcctccccagcaggaacaatagtcataaatgcacttttcacactaaaggtttctttattagttctccagttaaacctagatccctccctggtagattgcgaactcaaagttttgtgatcccaaagccattccactgcaaatgcccagcagtgaagatggcctcaaattgggttcttgcctgcagtgtgtgtggcagcagcccatgtgcctttacctgttgtcaaacttgcaagcatttatttgtctttatgactgtcatggggactgaggttcttcagagaaagagtgtgagctgatgacacagtggttttacacccaccccctgggcagggagtttgcacgtagttgtgagctgtgagtggttagtgcattgctggtattgctgaaggcagggttgatccctcacttgactgatacttgcattcaagagaatctagattgtgttgggggagggactgactgtactcatggctaacttaaagtattaaaataaggctgtcccctacaaccttcttagtcacacaggatccctgtagccaaaacagtatatgatccagctgcagagagcagactgctctcagcttgcacagcaccttaggcgagggaagaatatacggatagggaatggggtggagaaaggatgggaatgttgtcatccaggtggctttagggtcctaaggagtggagaaggatggcactggggaggtctggatggatctgtgtaggagttccctgtagataaattactgatcccccatctactatccccagtatgtaatggctgaattaatatgtaatcaactgcattgtatctaaagccttagaactagtcaggtgctccctccacccaataccatttcttaccctctaatcctacctgatctttaacaaagcattaataattctaaggataatctctattttgttgtgcttttttgtaactgttttaaataaatcaatttgtactgtatatttgtacttttgtgagatcctttttgctgttttaccattttaagtctctgtacttggctacacacagattgtatttttattgttaatgctcttcttatggatacctgcatttaacttgtggactatgtaaacacaatatctatcaatatctatatatctatatatctatctatataaactactagcttttcctttt

SEQ ID NO: 109309 - DNA, 4702 bp, Homo sapiens
  Payload ID: 1475
  Gene Symbol: ATXN2
  Gene Name: ataxin 2
  Uniprot ID: Q99700
  ENST ID: ENST00000377617
  CDS Start-End: 163-4104
acccccgagaaagcaacccagcgcgccgcccgctcctcacgtgtccctcccggccccggggccacctcacgttctgcttccgtctgacccctccgacttccggtaaagagtccctatccgcacctccgctcccacccggcgcctcggcgcgcccgccctccgatgcgctcagcggccgcagctcctcggagtcccgcggtggccaccgagtctcgccgcttcgccgcagccaggtggcccgggtggcgctcgctccagcggccggcgcggcggagcgggcggggcggcggtggcgcggccccgggaccgtatccctccgccgcccctcccccgcccggccccggcccccctccctcccggcagagctcgcctccctccgcctcagactgttttggtagcaacggcaacggcggcggcgcgtttcggcccggctcccggcggctccttggtctcggcgggcctccccgccccttcgtcgtcctccttctccccctcgccagcccgggcgcccctccggccgcgccaacccgcgcctccccgctcggcgcccgcgcgtccccgccgcgttccggcgtctccttggcgcgcccggctcccggctgtccccgcccggcgtgcgagccggtgtatgggcccctcaccatgtcgctgaagccccagcagcagcagcagcagcagcagcagcagcagcagcagcaacagcagcagcagcagcagcagcagcagccgccgcccgcggctgccaatgtccgcaagcccggcggcagcggccttctagcgtcgcccgccgccgcgccttcgccgtcctcgtcctcggtctcctcgtcctcggccacggctccctcctcggtggtcgcggcgacctccggcggcgggaggcccggcctgggcagaggtcgaaacagtaacaaaggactgcctcagtctacgatttcttttgatggaatctatgcaaatatgaggatggttcatatacttacatcagttgttggctccaaatgtgaagtacaagtgaaaaatggaggtatatatgaaggagtttttaaaacttacagtccgaagtgtgatttggtacttgatgccgcacatgagaaaagtacagaatccagttcggggccgaaacgtgaagaaataatggagagtattttgttcaaatgttcagactttgttgtggtacagtttaaagatatggactccagttatgcaaaaagagatgcttttactgactctgctatcagtgctaaagtgaatggcgaacacaaagagaaggacctggagccctgggatgcaggtgaactcacagccaatgaggaacttgaggctttggaaaatgacgtatctaatggatgggatcccaatgatatgtttcgatataatgaagaaaattatggtgtagtgtctacgtatgatagcagtttatcttcgtatacagtgcccttagaaagagataactcagaagaatttttaaaacgggaagcaagggcaaaccagttagcagaagaaattgagtcaagtgcccagtacaaagctcgagtggccctggaaaatgatgataggagtgaggaagaaaaatacacagcagttcagagaaattccagtgaacgtgaggggcacagcataaacactagggaaaataaatatattcctcctggacaaagaaatagagaagtcatatcctggggaagtgggagacagaattcaccgcgtatgggccagcctggatcgggctccatgccatcaagatccacttctcacacttcagatttcaacccgaattctggttcagaccaaagagtagttaatggaggtgttccctggccatcgccttgcccatctccttcctctcgcccaccttctcgctaccagtcaggtcccaactctcttccacctcgggcagccacccctacacggccgccctccaggcccccctcgcggccatccagacccccgtctcacccctctgctcatggttctccagctcctgtctctactatgcctaaacgcatgtcttcagaagggcctccaaggatgtccccaaaggcccagcgacatcctcgaaatcacagagtttctgctgggaggggttccatatccagtggcctagaatttgtatcccacaacccacccagtgaagcagctactcctccagtagcaaggaccagtccctcggggggaacgtggtcatcagtggtcagtggggttccaagattatcccctaaaactcatagacccaggtctcccagacagaacagtattggaaatacccccagtgggccagttcttgcttctccccaagctggtattattccaactgaagctgttgccatgcctattccagctgcatctcctacgcctgctagtcctgcatcgaacagagctgttaccccttctagtgaggctaaagattccaggcttcaagatcagaggcagaactctcctgcagggaataaagaaaatattaaacccaatgaaacatcacctagcttctcaaaagctgaaaacaaaggtatatcaccagttgtttctgaacatagaaaacagattgatgatttaaagaaatttaagaatgattttaggttacagccaagttctacttctgaatctatggatcaactactaaacaaaaatagagagggagaaaaatcaagagatttgatcaaagacaaaattgaaccaagtgctaaggattctttcattgaaaatagcagcagcaactgtaccagtggcagcagcaagccgaatagccccagcatttccccttcaatacttagtaacacggagcacaagaggggacctgaggtcacttcccaaggggttcagacttccagcccagcatgtaaacaagagaaagacgataaggaagagaagaaagacgcagctgagcaagttaggaaatcaacattgaatcccaatgcaaaggagttcaacccacgttccttctctcagccaaagccttctactaccccaacttcacctcggcctcaagcacaacctagcccatctatggtgggtcatcaacagccaactccagtttatactcagcctgtttgttttgcaccaaatatgatgtatccagtcccagtgagcccaggcgtgcaacctttatacccaatacctatgacgcccatgccagtgaatcaagccaagacatatagagcagtaccaaatatgccccaacagcggcaagaccagcatcatcagagtgccatgatgcacccagcgtcagcagcgggcccaccgattgcagccaccccaccagcttactccacgcaatatgttgcctacagtcctcagcagttcccaaatcagccccttgttcagcatgtgccacattatcagtctcagcatcctcatgtctatagtcctgtaatacagggtaatgctagaatgatggcaccaccaacacacgcccagcctggtttagtatcttcttcagcaactcagtacggggctcatgagcagacgcatgcgatgtatgcatgtcccaaattaccatacaacaaggagacaagcccttctttctactttgccatttccacgggctcccttgctcagcagtatgcgcaccctaacgctaccctgcacccacatactccacaccctcagccttcagctacccccactggacagcagcaaagccaacatggtggaagtcatcctgcacccagtcctgttcagcaccatcagcaccaggccgcccaggctctccatctggccagtccacagcagcagtcagccatttaccacgcggggcttgcgccaactccaccctccatgacacctgcctccaacacgcagtcgccacagaatagtttcccagcagcacaacagactgtctttacgatccatccttctcacgttcagccggcgtataccaacccaccccacatggcccacgtacctcaggctcatgtacagtcaggaatggttccttctcatccaactgcccatgcgccaatgatgctaatgacgacacagccacccggcggtccccaggccgccctcgctcaaagtgcactacagcccattccagtctcgacaacagcgcatttcccctatatgacgcacccttcagtacaagcccaccaccaacagcagttgtaaggctgccctggaggaaccgaaaggccaaattccctcctcccttctactgcttctaccaactggaagcacagaaaactagaatttcatttattttgtttttaaaatatatatgttgatttcttgtaacatccaataggaatgctaacagttcacttgcagtggaagatacttggaccgagtagaggcatttaggaacttgggggctattccataattccatatgctgtttcagagtcccgcaggtaccccagctctgcttgccgaaactggaagttatttattttttaataacccttgaaagtcatgaacacatcagctagcaaaagaagtaacaagagtgattcttgctgctattactgctaaaaaaaaaaaaaaaaaaaaatcaagacttggaacgcccttttactaaacttgacaaagtttcagtaaattcttaccgtcaaactgacggattattatttataaatcaagtttgatgaggtgatcactgtctacagtggttcaacttttaagttaagggaaaaacttttactttgtagataatataaaataaaaacttaaaaaaaatttaaaaaataaaaaaagttttaaaaactga

SEQ ID NO: 109310 - DNA, 3854 bp, Homo sapiens
  Payload ID: 1475
  Gene Symbol: ATXN2
  Gene Name: ataxin 2
  ENST ID: ENST00000389153
  CDS Start-End: 104-3256
cgcggcgacctccggcggcgggaggcccggcctgggcagaggtcgaaacagtaacaaaggactgcctcagtctacgatttcttttgatggaatctatgcaaatatgaggatggttcatatacttacatcagttgttggctccaaatgtgaagtacaagtgaaaaatggaggtatatatgaaggagtttttaaaacttacagtccgaagtgtgatttggtacttgatgccgcacatgagaaaagtacagaatccagttcggggccgaaacgtgaagaaataatggagagtattttgttcaaatgttcagactttgttgtggtacagtttaaagatatggactccagttatgcaaaaagagatgcttttactgactctgctatcagtgctaaagtgaatggcgaacacaaagagaaggacctggagccctgggatgcaggtgaactcacagccaatgaggaacttgaggctttggaaaatgacgtatctaatggatgggatcccaatgatatgtttcgatataatgaagaaaattatggtgtagtgtctacgtatgatagcagtttatcttcgtatacagtgcccttagaaagagataactcagaagaatttttaaaacgggaagcaagggcaaaccagttagcagaagaaattgagtcaagtgcccagtacaaagctcgagtggccctggaaaatgatgataggagtgaggaagaaaaatacacagcagttcagagaaattccagtgaacgtgaggggcacagcataaacactagggaaaataaatatattcctcctggacaaagaaatagagaagtcatatcctggggaagtgggagacagaattcaccgcgtatgggccagcctggatcgggctccatgccatcaagatccacttctcacacttcagatttcaacccgaattctggttcagaccaaagagtagttaatggaggtgttccctggccatcgccttgcccatctccttcctctcgcccaccttctcgctaccagtcaggtcccaactctcttccacctcgggcagccacccctacacggccgccctccaggcccccctcgcggccatccagacccccgtctcacccctctgctcatggttctccagctcctgtctctactatgcctaaacgcatgtcttcagaagggcctccaaggatgtccccaaaggcccagcgacatcctcgaaatcacagagtttctgctgggaggggttccatatccagtggcctagaatttgtatcccacaacccacccagtgaagcagctactcctccagtagcaaggaccagtccctcggggggaacgtggtcatcagtggtcagtggggttccaagattatcccctaaaactcatagacccaggtctcccagacagaacagtattggaaatacccccagtgggccagttcttgcttctccccaagctggtattattccaactgaagctgttgccatgcctattccagctgcatctcctacgcctgctagtcctgcatcgaacagagctgttaccccttctagtgaggctaaagattccaggcttcaagatcagaggcagaactctcctgcagggaataaagaaaatattaaacccaatgaaacatcacctagcttctcaaaagctgaaaacaaaggtatatcaccagttgtttctgaacatagaaaacagattgatgatttaaagaaatttaagaatgattttaggttacagccaagttctacttctgaatctatggatcaactactaaacaaaaatagagagggagaaaaatcaagagatttgatcaaagacaaaattgaaccaagtgctaaggattctttcattgaaaatagcagcagcaactgtaccagtggcagcagcaagccgaatagccccagcatttccccttcaatacttagtaacacggagcacaagaggggacctgaggtcacttcccaaggggttcagacttccagcccagcatgtaaacaagagaaagacgataaggaagagaagaaagacgcagctgagcaagttaggaaatcaacattgaatcccaatgcaaaggagttcaacccacgttccttctctcagccaaagccttctactaccccaacttcacctcggcctcaagcacaacctagcccatctatggtgggtcatcaacagccaactccagtttatactcagcctgtttgttttgcaccaaatatgatgtatccagtcccagtgagcccaggcgtgcaacctttatacccaatacctatgacgcccatgccagtgaatcaagccaagacatatagagcaggtaaagtaccaaatatgccccaacagcggcaagaccagcatcatcagagtgccatgatgcacccagcgtcagcagcgggcccaccgattgcagccaccccaccagcttactccacgcaatatgttgcctacagtcctcagcagttcccaaatcagccccttgttcagcatgtgccacattatcagtctcagcatcctcatgtctatagtcctgtaatacagggtaatgctagaatgatggcaccaccaacacacgcccagcctggtttagtatcttcttcagcaactcagtacggggctcatgagcagacgcatgcgatgtatgcatgtcccaaattaccatacaacaaggagacaagcccttctttctactttgccatttccacgggctcccttgctcagcagtatgcgcaccctaacgctaccctgcacccacatactccacaccctcagccttcagctacccccactggacagcagcaaagccaacatggtggaagtcatcctgcacccagtcctgttcagcaccatcagcaccaggccgcccaggctctccatctggccagtccacagcagcagtcagccatttaccacgcggggcttgcgccaactccaccctccatgacacctgcctccaacacgcagtcgccacagaatagtttcccagcagcacaacagactgtctttacgatccatccttctcacgttcagccggcgtataccaacccaccccacatggcccacgtacctcaggctcatgtacagtcaggaatggttccttctcatccaactgcccatgcgccaatgatgctaatgacgacacagccacccggcggtccccaggccgccctcgctcaaagtgcactacagcccattccagtctcgacaacagcgcatttcccctatatgacgcacccttcagtacaagcccaccaccaacagcagttgtaaggctgccctggaggaaccgaaaggccaaattccctcctcccttctactgcttctaccaactggaagcacagaaaactagaatttcatttattttgtttttaaaatatatatgttgatttcttgtaacatccaataggaatgctaacagttcacttgcagtggaagatacttggaccgagtagaggcatttaggaacttgggggctattccataattccatatgctgtttcagagtcccgcaggtaccccagctctgcttgccgaaactggaagttatttattttttaataacccttgaaagtcatgaacacatcagctagcaaaagaagtaacaagagtgattcttgctgctattactgctaaaaaaaaaaaaaaaaaaaaatcaagacttggaacgcccttttactaaacttgacaaagtttcagtaaattcttaccgtcaaactgacggattattatttataaatcaagtttgatgaggtgatcactgtctacagtggttcaacttttaagttaagggaaaaacttttactttgtagataatataaaataaaaacttaaaaaaaatttaaaaaataaaaaaagttttaaaaactga

SEQ ID NO: 109311 - DNA, 1794 bp, Homo sapiens
  Payload ID: 1475
  Gene Symbol: ATXN2
  Gene Name: ataxin 2
  ENST ID: ENST00000389154
  CDS Start-End: 1-1275
cccagcatttccccttcaatacttagtaacacggagcacaagaggggacctgaggtcacttcccaaggggttcagacttccagcccagcatgtaaacaagagaaagacgataaggaagagaagaaagacgcagctgagcaagttaggaaatcaacattgaatcccaatgcaaaggagttcaacccacgttccttctctcagccaaagccttctactaccccaacttcacctcggcctcaagcacaacctagcccatctatggtgggtcatcaacagccaactccagtttatactcagcctgtttgttttgcaccaaatatgatgtatccagtcccagtgagcccaggcgtgcaacctttatacccaatacctatgacgcccatgccagtgaatcaagccaagacatatagagcaggtaaagtaccaaatatgccccaacagcggcaagaccagcatcatcagagtgccatgatgcacccagcgtcagcagcgggcccaccgattgcagccaccccaccagcttactccacgcaatatgttgcctacagtcctcagcagttcccaaatcagccccttgttcagcatgtgccacattatcagtctcagcatcctcatgtctatagtcctgtaatacagggtaatgctagaatgatggcaccaccaacacacgcccagcctggtttagtatcttcttcagcaactcagtacggggctcatgagcagacgcatgcgatgtatgcatgtcccaaattaccatacaacaaggagacaagcccttctttctactttgccatttccacgggctcccttgctcagcagtatgcgcaccctaacgctaccctgcacccacatactccacaccctcagccttcagctacccccactggacagcagcaaagccaacatggtggaagtcatcctgcacccagtcctgttcagcaccatcagcaccaggccgcccaggctctccatctggccagtccacagcagcagtcagccatttaccacgcggggcttgcgccaactccaccctccatgacacctgcctccaacacgcagtcgccacagaatagtttcccagcagcacaacagactgtctttacgatccatccttctcacgttcagccggcgtataccaacccaccccacatggcccacgtacctcagtacaagcccaccaccaacagcagttgtaaggctgccctggaggaaccgaaaggccaaattccctcctcccttctactgcttctaccaactggaagcacagaaaactagaatttcatttattttgtttttaaaatatatatgttgatttcttgtaacatccaataggaatgctaacagttcacttgcagtggaagatacttggaccgagtagaggcatttaggaacttgggggctattccataattccatatgctgtttcagagtcccgcaggtaccccagctctgcttgccgaaactggaagttatttattttttaataacccttgaaagtcatgaacacatcagctagcaaaagaagtaacaagagtgattcttgctgctattactgctaaaaaaaaaaaaaaaaaaaaatcaagacttggaacgcccttttactaaacttgacaaagtttcagtaaattcttaccgtcaaactgacggattattatttataaatcaagtttgatgaggtgatcactgtctacagtggttcaacttttaagttaagggaaaaacttttactttgtagataatataaaataaaaacttaaaaaaaatttaaaaaataaaaaaagttttaaaaactga

SEQ ID NO: 109312 - DNA, 3205 bp, Homo sapiens
  Payload ID: 1475
  Gene Symbol: ATXN2
  Gene Name: ataxin 2
  Uniprot ID: Q99700
  ENST ID: ENST00000535949
  CDS Start-End: 127-3147
cccgagaaagcaacccagcgcgccgcccgctcctcacgtgtccctcccggccccggggccacctcacgttctgcttccgtctgacccctccgacttccgatttcttttgatggaatctatgcaaatatgaggatggttcatatacttacatcagttgtttgtgatttggtacttgatgccgcacatgagaaaagtacagaatccagttcggggccgaaacgtgaagaaataatggagagtattttgttcaaatgttcagactttgttgtggtacagtttaaagatatggactccagttatgcaaaaagagatgcttttactgactctgctatcagtgctaaagtgaatggcgaacacaaagagaaggacctggagccctgggatgcaggtgaactcacagccaatgaggaacttgaggctttggaaaatgacgtatctaatggatgggatcccaatgatatgtttcgatataatgaagaaaattatggtgtagtgtctacgtatgatagcagtttatcttcgtatacagtgcccttagaaagagataactcagaagaatttttaaaacgggaagcaagggcaaaccagttagcagaagaaattgagtcaagtgcccagtacaaagctcgagtggccctggaaaatgatgataggagtgaggaagaaaaatacacagcagttcagagaaattccagtgaacgtgaggggcacagcataaacactagggaaaataaatatattcctcctggacaaagaaatagagaagtcatatcctggggaagtgggagacagaattcaccgcgtatgggccagcctggatcgggctccatgccatcaagatccacttctcacacttcagatttcaacccgaattctggttcagaccaaagagtagttaatggaggtgttccctggccatcgccttgcccatctccttcctctcgcccaccttctcgctaccagtcaggtcccaactctcttccacctcgggcagccacccctacacggccgccctccaggcccccctcgcggccatccagacccccgtctcacccctctgctcatggttctccagctcctgtctctactatgcctaaacgcatgtcttcagaagggcctccaaggatgtccccaaaggcccagcgacatcctcgaaatcacagagtttctgctgggaggggttccatatccagtggcctagaatttgtatcccacaacccacccagtgaagcagctactcctccagtagcaaggaccagtccctcggggggaacgtggtcatcagtggtcagtggggttccaagattatcccctaaaactcatagacccaggtctcccagacagaacagtattggaaatacccccagtgggccagttcttgcttctccccaagctggtattattccaactgaagctgttgccatgcctattccagctgcatctcctacgcctgctagtcctgcatcgaacagagctgttaccccttctagtgaggctaaagattccaggcttcaagatcagaggcagaactctcctgcagggaataaagaaaatattaaacccaatgaaacatcacctagcttctcaaaagctgaaaacaaaggtatatcaccagttgtttctgaacatagaaaacagattgatgatttaaagaaatttaagaatgattttaggttacagccaagttctacttctgaatctatggatcaactactaaacaaaaatagagagggagaaaaatcaagagatttgatcaaagacaaaattgaaccaagtgctaaggattctttcattgaaaatagcagcagcaactgtaccagtggcagcagcaagccgaatagccccagcatttccccttcaatacttagtaacacggagcacaagaggggacctgaggtcacttcccaaggggttcagacttccagcccagcatgtaaacaagagaaagacgataaggaagagaagaaagacgcagctgagcaagttaggaaatcaacattgaatcccaatgcaaaggagttcaacccacgttccttctctcagccaaagccttctactaccccaacttcacctcggcctcaagcacaacctagcccatctatggtgggtcatcaacagccaactccagtttatactcagcctgtttgttttgcaccaaatatgatgtatccagtcccagtgagcccaggcgtgcaacctttatacccaatacctatgacgcccatgccagtgaatcaagccaagacatatagagcagtaccaaatatgccccaacagcggcaagaccagcatcatcagagtgccatgatgcacccagcgtcagcagcgggcccaccgattgcagccaccccaccagcttactccacgcaatatgttgcctacagtcctcagcagttcccaaatcagccccttgttcagcatgtgccacattatcagtctcagcatcctcatgtctatagtcctgtaatacagggtaatgctagaatgatggcaccaccaacacacgcccagcctggtttagtatcttcttcagcaactcagtacggggctcatgagcagacgcatgcgatgtatgtttccacgggctcccttgctcagcagtatgcgcaccctaacgctaccctgcacccacatactccacaccctcagccttcagctacccccactggacagcagcaaagccaacatggtggaagtcatcctgcacccagtcctgttcagcaccatcagcaccaggccgcccaggctctccatctggccagtccacagcagcagtcagccatttaccacgcggggcttgcgccaactccaccctccatgacacctgcctccaacacgcagtcgccacagaatagtttcccagcagcacaacagactgtctttacgatccatccttctcacgttcagccggcgtataccaacccaccccacatggcccacgtacctcaggctcatgtacagtcaggaatggttccttctcatccaactgcccatgcgccaatgatgctaatgacgacacagccacccggcggtccccaggccgccctcgctcaaagtgcactacagcccattccagtctcgacaacagcgcatttcccctatatgacgcacccttcagtacaagcccaccaccaacagcagttgtaaggctgccctggaggaaccgaaaggccaaattccctcctcccttctactgcttctacca

SEQ ID NO: 109313 - DNA, 3443 bp, Homo sapiens
  Payload ID: 1475
  Gene Symbol: ATXN2
  Gene Name: ataxin 2
  ENST ID: ENST00000542287
  CDS Start-End: 164-3385
cccgagaaagcaacccagcgcgccgcccgctcctcacgtgtccctcccggccccggggccacctcacgttctgcttccgtctgacccctccgacttccgaggtcgaaacagtaacaaaggactgcctcagtctacgatttcttttgatggaatctatgcaaatatgaggatggttcatatacttacatcagttgttggctccaaatgtgaagtacaagtgaaaaatggaggtatatatgaaggagtttttaaaacttacagtccgaagtgtgatttggtacttgatgccgcacatgagaaaagtacagaatccagttcggggccgaaacgtgaagaaataatggagagtattttgttcaaatgttcagactttgttgtggtacagtttaaagatatggactccagttatgcaaaaagagatgcttttactgactctgctatcagtgctaaagtgaatggcgaacacaaagagaaggacctggagccctgggatgcaggtgaactcacagccaatgaggaacttgaggctttggaaaatgacgtatctaatggatgggatcccaatgatatgtttcgatataatgaagaaaattatggtgtagtgtctacgtatgatagcagtttatcttcgtatacagtgcccttagaaagagataactcagaagaatttttaaaacgggaagcaagggcaaaccagttagcagaagaaattgagtcaagtgcccagtacaaagctcgagtggccctggaaaatgatgataggagtgaggaagaaaaatacacagcagttcagagaaattccagtgaacgtgaggggcacagcataaacactagggaaaataaatatattcctcctggacaaagaaatagagaagtcatatcctggggaagtgggagacagaattcaccgcgtatgggccagcctggatcgggctccatgccatcaagatccacttctcacacttcagatttcaacccgaattctggttcagaccaaagagtagttaatggaggtgttccctggccatcgccttgcccatctccttcctctcgcccaccttctcgctaccagtcaggtcccaactctcttccacctcgggcagccacccctacacggccgccctccaggcccccctcgcggccatccagacccccgtctcacccctctgctcatggttctccagctcctgtctctactatgcctaaacgcatgtcttcagaagggcctccaaggatgtccccaaaggcccagcgacatcctcgaaatcacagagtttctgctgggaggggttccatatccagtggcctagaatttgtatcccacaacccacccagtgaagcagctactcctccagtagcaaggaccagtccctcggggggaacgtggtcatcagtggtcagtggggttccaagattatcccctaaaactcatagacccaggtctcccagacagaacagtattggaaatacccccagtgggccagttcttgcttctccccaagctggtattattccaactgaagctgttgccatgcctattccagctgcatctcctacgcctgctagtcctgcatcgaacagagctgttaccccttctagtgaggctaaagattccaggcttcaagatcagaggcagaactctcctgcagggaataaagaaaatattaaacccaatgaaacatcacctagcttctcaaaagctgaaaacaaaggtatatcaccagttgtttctgaacatagaaaacagattgatgatttaaagaaatttaagaatgattttaggttacagccaagttctacttctgaatctatggatcaactactaaacaaaaatagagagggagaaaaatcaagagatttgatcaaagacaaaattgaaccaagtgctaaggattctttcattgaaaatagcagcagcaactgtaccagtggcagcagcaagccgaatagccccagcatttccccttcaatacttagtaacacggagcacaagaggggacctgaggtcacttcccaaggggttcagacttccagcccagcatgtaaacaagagaaagacgataaggaagagaagaaagacgcagctgagcaagttaggaaatcaacattgaatcccaatgcaaaggagttcaacccacgttccttctctcagccaaagccttctactaccccaacttcacctcggcctcaagcacaacctagcccatctatggtgggtcatcaacagccaactccagtttatactcagcctgtttgttttgcaccaaatatgatgtatccagtcccagtgagcccaggcgtgcaacctttatacccaatacctatgacgcccatgccagtgaatcaagccaagacatatagagcagtaccaaatatgccccaacagcggcaagaccagcatcatcagagtgccatgatgcacccagcgtcagcagcgggcccaccgattgcagccaccccaccagcttactccacgcaatatgttgcctacagtcctcagcagttcccaaatcagccccttgttcagcatgtgccacattatcagtctcagcatcctcatgtctatagtcctgtaatacagggtaatgctagaatgatggcaccaccaacacacgcccagcctggtttagtatcttcttcagcaactcagtacggggctcatgagcagacgcatgcgatgtatgcatgtcccaaattaccatacaacaaggagacaagcccttctttctactttgccatttccacgggctcccttgctcagcagtatgcgcaccctaacgctaccctgcacccacatactccacaccctcagccttcagctacccccactggacagcagcaaagccaacatggtggaagtcatcctgcacccagtcctgttcagcaccatcagcaccaggccgcccaggctctccatctggccagtccacagcagcagtcagccatttaccacgcggggcttgcgccaactccaccctccatgacacctgcctccaacacgcagtcgccacagaatagtttcccagcagcacaacagactgtctttacgatccatccttctcacgttcagccggcgtataccaacccaccccacatggcccacgtacctcagtgcgccagtgaggctctggcaaggtgtgggctagagatgcgactcagttggatctatctctcagaaggctaccttgctcatgtacagtcaggaatggttccttctcatccaactgcccatgcgccaatgatgctaatgacgacacagccacccggcggtccccaggccgccctcgctcaaagtgcactacagcccattccagtctcgacaacagcgcatttcccctatatgacgcacccttcagtacaagcccaccaccaacagcagttgtaaggctgccctggaggaaccgaaaggccaaattccctcctcccttctactgcttctacca

SEQ ID NO: 109314 - DNA, 4159 bp, Homo sapiens
  Payload ID: 1475
  Gene Symbol: ATXN2
  Gene Name: ataxin 2
  ENST ID: ENST00000483311
  CDS Start-End: 1-2750
acggcaacggcggcggcgcgtttcggcccggctcccggcggctccttggtctcggcgggcctccccgccccttcgtcgtcctccttctccccctcgccagcccgggcgcccctccggccgcgccaacccgcgcctccccgctcggcgcccgcgcgtccccgccgcgttccggcgtctccttggcgcgcccggctcccggctgtccccgcccggcgtgcgagccggtgtatgggcccctcaccatgtcgctgaagccccagcagcagcagcagcagcagcagcagcagcagcagcagcaacagcagcagcagcagcagcagcagcagccgccgcccgcggctgccaatgtccgcaagcccggcggcagcggccttctagcgtcgcccgccgccgcgccttcgccgtcctcgtcctcggtctcctcgtcctcggccacggctccctcctcggtggtcgcggcgacctccggcggcgggaggcccggcctgggcagaggtcgaaacagtaacaaaggactgcctcagtctacgatttcttttgatggaatctatgcaaatatgaggatggttcatatacttacatcagttgttggctccaaatgtgaagtacaagtgaaaaatggaggtatatatgaaggagtttttaaaacttacagtccgaagtgtgatttggtacttgatgccgcacatgagaaaagtacagaatccagttcggggccgaaacgtgaagaaataatggagagtattttgttcaaatgttcagactttgttgtggtacagtttaaagatatggactccagttatgcaaaaagagatgcttttactgactctgctatcagtgctaaagtgaatggcgaacacaaagagaaggacctggagccctgggatgcaggtgaactcacagccaatgaggaacttgaggctttggaaaatgacgtatctaatggatgggatcccaatgatatgtttcgatataatgaagaaaattatggtgtagtgtctacgtatgatagcagtttatcttcgtatacagtgcccttagaaagagataactcagaagaatttttaaaacgggaagcaagggcaaaccagttagcagaagaaattgagtcaagtgcccagtacaaagctcgagtggccctggaaaatgatgataggagtgaggaagaaaaatacacagcagttcagagaaattccagtgaacgtgaggggcacagcataaacactagggaaaataaatatattcctcctggacaaagaaatagagaagtcatatcctggggaagtgggagacagaattcaccgcgtatgggccagcctggatcgggctccatgccatcaagatccacttctcacacttcagatttcaacccgaattctggttcagaccaaagagtagttaatggaggtgttccctggccatcgccttgcccatctccttcctctcgcccaccttctcgctaccagtcaggtcccaactctcttccacctcgggcagccacccctacacggccgccctccaggcccccctcgcggccatccagacccccgtctcacccctctgctcatggttctccagctcctgtctctactatgcctaaacgcatgtcttcagaagggcctccaaggatgtccccaaaggcccagcgacatcctcgaaatcacagagtttctgctgggaggggttccatatccagtggcctagaatttgtatcccacaacccacccagtgaagcagctactcctccagtagcaaggaccagtccctcggggggaacgtggtcatcagtggtcagtggggttccaagattatcccctaaaactcatagacccaggtctcccagacagaacagtattggaaatacccccagtgggccagttcttgcttctccccaagctggtattattccaactgaagctgttgccatgcctattccagctgcatctcctacgcctgctagtcctgcatcgaacagagctgttaccccttctagtgaggctaaagattccaggcttcaagatcagaggcagaactctcctgcagggaataaagaaaatattaaacccaatgaaacatcacctagcttctcaaaagctgaaaacaaaggtatatcaccagttgtttctgaacatagaaaacagattgatgatttaaagaaatttaagaatgattttaggttacagccaagttctacttctgaatctatggatcaactactaaacaaaaatagagagggagaaaaatcaagagatttgatcaaagacaaaattgaaccaagtgctaaggattctttcattgaaaatagcagcagcaactgtaccagtggcagcagcaagccgaatagccccagcatttccccttcaatacttagtaacacggagcacaagaggggacctgaggtcacttcccaaggggttcagacttccagcccagcatgtaaacaagagaaagacgataaggaagagaagaaagacgcagctgagcaagttaggaaatcaacattgaatcccaatgcaaaggagttcaacccacgttccttctctcagccaaagccttctactaccccaacttcacctcggcctcaagcacaacctagcccatctatggtgggtcatcaacagccaactccagtttatactcagcctgtttgttttgcaccaaatatgatgtatccagtcccagtgagcccaggcgtgcaataccaaatatgccccaacagcggcaagaccagcatcatcagagtgccatgatgcacccagcgtcagcagcgggcccaccgattgcagccaccccaccagcttactccacgcaatatgttgcctacagtcctcagcagttcccaaatcagccccttgttcagcatgtgccacattatcagtctcagcatcctcatgtctatagtcctgtaatacagggtaatgctagaatgatggcaccaccaacacacgcccagcctggtttagtatcttcttcagcaactcagtacggggctcatgagcagacgcatgcgatgtatgcatgtcccaaattaccatacaacaaggagacaagcccttctttctactttgccatttccacgggctcccttgctcagcagtatgcgcaccctaacgctaccctgcacccacatactccacaccctcagccttcagctacccccactggacagcagcaaagccaacatggtggaagtcatcctgcacccagtcctgttcagcaccatcagcaccaggccgcccaggctctccatctggccagtccacagcagcagtcagccatttaccacgcggggcttgcgccaactccaccctccatgacacctgcctccaacacgcagtcgccacagaatagtttcccagcagcacaacagactgtctttacgatccatccttctcacgttcagccggcgtataccaacccaccccacatggcccacgtacctcaggctcatgtacagtcaggaatggttccttctcatccaactgcccatgcgccaatgatgctaatgacgacacagccacccggcggtccccaggccgccctcgctcaaagtgcactacagcccattccagtctcgacaacagcgcatttcccctatatgacgcacccttcagtacaagcccaccaccaacagcagttgtaaggctgccctggaggaaccgaaaggccaaattccctcctcccttctactgcttctaccaactggaagcacagaaaactagaatttcatttattttgtttttaaaatatatatgttgatttcttgtaacatccaataggaatgctaacagttcacttgcagtggaagatacttggaccgagtagaggcatttaggaacttgggggctattccataattccatatgctgtttcagagtcccgcaggtaccccagctctgcttgccgaaactggaagttatttattttttaataacccttgaaagtcatgaacacatcagctagcaaaagaagtaacaagagtgattcttgctgctattactgctaaaaaaaaaaaaaaaaaaaaatcaagacttggaacgcccttttactaaacttgacaaagtttcagtaaattcttaccgtcaaactgacggattattatttataaatcaagtttgatgaggtgatcactgtctacagtggttcaacttttaagtta

SEQ ID NO: 109315 - DNA, 4648 bp, Homo sapiens
  Payload ID: 1475
  Gene Symbol: ATXN2
  Gene Name: ataxin 2
  Uniprot ID: Q99700
  ENST ID: ENST00000550104
  CDS Start-End: 163-4104
acccccgagaaagcaacccagcgcgccgcccgctcctcacgtgtccctcccggccccggggccacctcacgttctgcttccgtctgacccctccgacttccggtaaagagtccctatccgcacctccgctcccacccggcgcctcggcgcgcccgccctccgatgcgctcagcggccgcagctcctcggagtcccgcggtggccaccgagtctcgccgcttcgccgcagccaggtggcccgggtggcgctcgctccagcggccggcgcggcggagcgggcggggcggcggtggcgcggccccgggaccgtatccctccgccgcccctcccccgcccggccccggcccccctccctcccggcagagctcgcctccctccgcctcagactgttttggtagcaacggcaacggcggcggcgcgtttcggcccggctcccggcggctccttggtctcggcgggcctccccgccccttcgtcgtcctccttctccccctcgccagcccgggcgcccctccggccgcgccaacccgcgcctccccgctcggcgcccgcgcgtccccgccgcgttccggcgtctccttggcgcgcccggctcccggctgtccccgcccggcgtgcgagccggtgtatgggcccctcaccatgtcgctgaagccccagcagcagcagcagcagcagcagcagcagcagcagcagcaacagcagcagcagcagcagcagcagcagccgccgcccgcggctgccaatgtccgcaagcccggcggcagcggccttctagcgtcgcccgccgccgcgccttcgccgtcctcgtcctcggtctcctcgtcctcggccacggctccctcctcggtggtcgcggcgacctccggcggcgggaggcccggcctgggcagaggtcgaaacagtaacaaaggactgcctcagtctacgatttcttttgatggaatctatgcaaatatgaggatggttcatatacttacatcagttgttggctccaaatgtgaagtacaagtgaaaaatggaggtatatatgaaggagtttttaaaacttacagtccgaagtgtgatttggtacttgatgccgcacatgagaaaagtacagaatccagttcggggccgaaacgtgaagaaataatggagagtattttgttcaaatgttcagactttgttgtggtacagtttaaagatatggactccagttatgcaaaaagagatgcttttactgactctgctatcagtgctaaagtgaatggcgaacacaaagagaaggacctggagccctgggatgcaggtgaactcacagccaatgaggaacttgaggctttggaaaatgacgtatctaatggatgggatcccaatgatatgtttcgatataatgaagaaaattatggtgtagtgtctacgtatgatagcagtttatcttcgtatacagtgcccttagaaagagataactcagaagaatttttaaaacgggaagcaagggcaaaccagttagcagaagaaattgagtcaagtgcccagtacaaagctcgagtggccctggaaaatgatgataggagtgaggaagaaaaatacacagcagttcagagaaattccagtgaacgtgaggggcacagcataaacactagggaaaataaatatattcctcctggacaaagaaatagagaagtcatatcctggggaagtgggagacagaattcaccgcgtatgggccagcctggatcgggctccatgccatcaagatccacttctcacacttcagatttcaacccgaattctggttcagaccaaagagtagttaatggaggtgttccctggccatcgccttgcccatctccttcctctcgcccaccttctcgctaccagtcaggtcccaactctcttccacctcgggcagccacccctacacggccgccctccaggcccccctcgcggccatccagacccccgtctcacccctctgctcatggttctccagctcctgtctctactatgcctaaacgcatgtcttcagaagggcctccaaggatgtccccaaaggcccagcgacatcctcgaaatcacagagtttctgctgggaggggttccatatccagtggcctagaatttgtatcccacaacccacccagtgaagcagctactcctccagtagcaaggaccagtccctcggggggaacgtggtcatcagtggtcagtggggttccaagattatcccctaaaactcatagacccaggtctcccagacagaacagtattggaaatacccccagtgggccagttcttgcttctccccaagctggtattattccaactgaagctgttgccatgcctattccagctgcatctcctacgcctgctagtcctgcatcgaacagagctgttaccccttctagtgaggctaaagattccaggcttcaagatcagaggcagaactctcctgcagggaataaagaaaatattaaacccaatgaaacatcacctagcttctcaaaagctgaaaacaaaggtatatcaccagttgtttctgaacatagaaaacagattgatgatttaaagaaatttaagaatgattttaggttacagccaagttctacttctgaatctatggatcaactactaaacaaaaatagagagggagaaaaatcaagagatttgatcaaagacaaaattgaaccaagtgctaaggattctttcattgaaaatagcagcagcaactgtaccagtggcagcagcaagccgaatagccccagcatttccccttcaatacttagtaacacggagcacaagaggggacctgaggtcacttcccaaggggttcagacttccagcccagcatgtaaacaagagaaagacgataaggaagagaagaaagacgcagctgagcaagttaggaaatcaacattgaatcccaatgcaaaggagttcaacccacgttccttctctcagccaaagccttctactaccccaacttcacctcggcctcaagcacaacctagcccatctatggtgggtcatcaacagccaactccagtttatactcagcctgtttgttttgcaccaaatatgatgtatccagtcccagtgagcccaggcgtgcaacctttatacccaatacctatgacgcccatgccagtgaatcaagccaagacatatagagcagtaccaaatatgccccaacagcggcaagaccagcatcatcagagtgccatgatgcacccagcgtcagcagcgggcccaccgattgcagccaccccaccagcttactccacgcaatatgttgcctacagtcctcagcagttcccaaatcagccccttgttcagcatgtgccacattatcagtctcagcatcctcatgtctatagtcctgtaatacagggtaatgctagaatgatggcaccaccaacacacgcccagcctggtttagtatcttcttcagcaactcagtacggggctcatgagcagacgcatgcgatgtatgcatgtcccaaattaccatacaacaaggagacaagcccttctttctactttgccatttccacgggctcccttgctcagcagtatgcgcaccctaacgctaccctgcacccacatactccacaccctcagccttcagctacccccactggacagcagcaaagccaacatggtggaagtcatcctgcacccagtcctgttcagcaccatcagcaccaggccgcccaggctctccatctggccagtccacagcagcagtcagccatttaccacgcggggcttgcgccaactccaccctccatgacacctgcctccaacacgcagtcgccacagaatagtttcccagcagcacaacagactgtctttacgatccatccttctcacgttcagccggcgtataccaacccaccccacatggcccacgtacctcaggctcatgtacagtcaggaatggttccttctcatccaactgcccatgcgccaatgatgctaatgacgacacagccacccggcggtccccaggccgccctcgctcaaagtgcactacagcccattccagtctcgacaacagcgcatttcccctatatgacgcacccttcagtacaagcccaccaccaacagcagttgtaaggctgccctggaggaaccgaaaggccaaattccctcctcccttctactgcttctaccaactggaagcacagaaaactagaatttcatttattttgtttttaaaatatatatgttgatttcttgtaacatccaataggaatgctaacagttcacttgcagtggaagatacttggaccgagtagaggcatttaggaacttgggggctattccataattccatatgctgtttcagagtcccgcaggtaccccagctctgcttgccgaaactggaagttatttattttttaataacccttgaaagtcatgaacacatcagctagcaaaagaagtaacaagagtgattcttgctgctattactgctaaaaaaaaaaaaaaaaaaaaatcaagacttggaacgcccttttactaaacttgacaaagtttcagtaaattcttaccgtcaaactgacggattattatttataaatcaagtttgatgaggtgatcactgtctacagtggttcaacttttaagttaagggaaaaacttttactttgtagataat

SEQ ID NO: 109316 - DNA, 887 bp, Homo sapiens
  Payload ID: 1475
  Gene Symbol: ATXN2
  Gene Name: ataxin 2
  ENST ID: ENST00000492467
  CDS Start-End: 1-887
catctccttcctctcgcccaccttctcgctaccagtcaggtcccaactctcttccacctcgggcagccacccctacacggccgccctccaggcccccctcgcggccatccagacccccgtctcacccctctgctcatggttctccagctcctgtctctactatgcctaaacgcatgtcttcagaagggcctccaaggatgtccccaaaggcccagcgacatcctcgaaatcacagagtttctgctgggaggggttccatatccagtggcctagaatttgtatcccacaacccacccagtgaagcagctactcctccagtagcaaggaccagtccctcggggggaacgtggtcatcagtggtcagtggggctaaagattccaggcttcaagatcagaggcagaactctcctgcagggaataaagaaaatattaaacccaatgaaacatcacctagcttctcaaaagctgaaaacaaaggtatatcaccagttgtttctgaacatagaaaacagattgatgatttaaagaaatttaagaatgattttaggttacagccaagttctacttctgaatctatggatcaactactaaacaaaaatagagagggagaaaaatcaagagatttgatcaaagacaaaattgaaccaagtgctaaggattctttcattgaaaatagcagcagcaactgtaccagtggcagcagcaagccgaatagccccagcatttccccttcaatacttagtaacacggagcacaagaggggacctgaggtcacttcccaaggggttcagacttccagcccagcatgtaaacaagagaaagacgataaggaagagaagaaagacgcagctgagcaagttaggaaatcaacattgaatcccaatgca

SEQ ID NO: 109317 - DNA, 3104 bp, Homo sapiens
  Payload ID: 1475
  Gene Symbol: ATXN2
  Gene Name: ataxin 2
  ENST ID: ENST00000550844
  CDS Start-End: 1-591
catcctcatgtctatagtcctgtaatacagggtaatgctagaatgatggcaccaccaacacacgcccagcctggtttagtatcttcttcagcaactcagtacggggctcatgagcagacgcatgcgatgtatgcatgtcccaaattaccatacaacaaggagacaagcccttctttctactttgccatttccacgggctcccttgctcagcagtatgcgcaccctaacgctaccctgcacccacatactccacaccctcagccttcagctacccccactggacagcagcaaagccaacatggtggaagtcatcctgcacccagtcctgttcagcaccatcagcaccaggccgcccaggctctccatctggccagtccacagcagcagtcagccatttaccacgcggggcttgcgccaactccaccctccatgacacctgcctccaacacgcagtcgccacagaatagtttcccagcagcacaacagactgtctttacgatccatccttctcacgttcagccggcgtataccaacccaccccacatggcccacgtacctcaggtaataccagctttagccaactttctgtgaaggccaagtagaatgtgaaggttatcagtaagcagctagaggctctcccagctaggaaaccctgtgtgtcatgccatttgcctgtctccctttccctctcaaatacacgtgatctggccctaagggaatgtttgtgtggttttgtcatgggatcagtgaaggtgctgattggtcagtcctttagttttccaactgagaccttaaaaatatctttgactctggaatgcaacccagtccttctttcctttctgtgtctgctttgctatgtctatatagcctcactactatatatatgtgtacatatatattcccctacacacttaccttggaagccaggcagggatgatggccttcacagagtctcagctctccgaagtgactaccggggcctgtcaacttgattgttactcacatgagttccagacacatctctccaattgttttccctggttatccatatatctgctttgaccataagttgtactcttgagagggcttggccttggacattggtgcagtgtaactagaagctggaagcacccaggtggtcccatttttctttaagagcagccctggaagcactttggagctcacctccagtgtaagctgctacaggtgaaaggtgtgcttgccatctcagtggttgctgtctgcatcagctgctgacaaaggtccctgcactccagggcccaggggattgtcttaatgaggagaaggagctgcactgaagttgggctctaacgctggccttgaggccctccctggggctgttacgggtgaattggctgtattagatgtctctgctactttcataacagaactctctgaggcgggtctaagtgagacctgccacaatgaattccatttcctgttaaatagtgcgccagtgaggctctggcaaggtgtgggctagagatgcgactcagttggatctatctctcagaaggctaccttgtaagtagagttccacagctctgggaagtttgggcgtcctcaccctgcaaagtttaggttctgtggtgtagcgcactgcagttgatttgctttttgatagtggggagggaagccggtttggtccgtgtgggccagcgtggtttggtggagtcagcttcataagagctggggtcctgtaggtgtctaccagaggctggtggctaagtaggcatgtgaacttacatgtaagtcagggatccctaaaacctcactctgtttttgtgctgaaagggcaaaaaggttaacacagggaagctcaaatttgccatgtgcccgtttgaatatgtgagagtaaaaacggcatttcatccaaggcttatcgtagtctagaacagtgcacagtgtgggaaaaaggaaacaagggctcttcctggccctgccaaccccctgcagagctggaatccagctgtttgggctgactaaaatcacctttccaacttgacagtgagtgagaccaggttgaacttggtacagagacgctgggctggcccagatgacttcaggttactcctttccatctcactggagccattaaaaactccaactcctcctcctcctcctgctccatcagcatatctctgagagagtcacgggggcctaagagtctcttttcactgcctggtgagcagaccagaagcagagggagagaggcaaatgaacagaggtccaagtaattcacatacttgactgtgacagtctctgcttattaatgtaatctgttttcctatttgaaagggatgttatctgcaaaactacctcaggccccacatggcagcctgattctgaagcatcattgaatcttgtatgatattaagttgagaaagctgcccttggatccagtgtctaatctttgtgaagatcttaccccatacatagaatacaatgatcagaaatgtcaagggttaggacagcacagccctgacttctacccaggctcacttgttgcctgctccctgacccttgcaggatctgcccaaaggtgaagcgcgtcttcaggtcaatagataatctactagagattgtccccagagaacagaactgggccctgaggcccaccgttgccctttcctgagagtcccagcccagtgaaaggaacacagttgacatgttgttgaagccggagatgttgcctgtatgcgtaaaagagctctctgtttcaggctcatgtacagtcaggaatggttccttctcatccaactgcccatgcgccaatgatgctaatgacgacacagccacccggcggtccccaggccgccctcgctcaaagtgcactacagcccattccagtctcgacaacagcgcatttcccctatatgacgcacccttcaggtgaggcgtgtgtgtgcaggggccgccggggcaccccaaagcattctgctcgcacaggtggaatggcaggcagggccagtgcttcaagccccgcatttgagaactagcaagacccgtccaggagtgtgcacaggagggactgtgacgatcagttcagcatcagggcctgaggcttccgggagccgagtctg

SEQ ID NO: 109318 - DNA, 704 bp, Homo sapiens
  Payload ID: 1475
  Gene Symbol: ATXN2
  Gene Name: ataxin 2
  ENST ID: ENST00000550236
  CDS Start-End: 1-704
ttcgatataatgaagaaaattatggtgtagtgtctacgtatgatagcagtttatcttcgtatacagtgcccttagaaagagataactcagaagaatttttaaaacgggaagcaagggcaaaccagttagcagaagaaattgagtcaagtgcccagtacaaagctcgagtggccctggaaaatgatgataggagtgaggaagaaaaatacacagcagttcagagaaattccagtgaacgtgaggggcacagcataaacactagggaaaataaatatattcctcctggacaaagaaatagagaagtcatatcctggggaagtgggagacagaattcaccgcgtatgggccagcctggatcgggctccatgccatcaagatccacttctcacacttcagatttcaacccgaattctggttcagaccaaagagtagttaatggagggcctccaaggatgtccccaaaggcccagcgacatcctcgaaatcacagagtttctgctgggaggggttccatatccagtggcctagaatttgtatcccacaacccacccagtgaagcagctactcctccagtagcaaggaccagtccctcggggggaacgtggtcatcagtggtcagtggggctaaagattccaggcttcaagatcagaggcagaactctcctgcagggaataaagaaaatattaaacccaatgaaacatca

SEQ ID NO: 109319 - DNA, 556 bp, Homo sapiens
  Payload ID: 1475
  Gene Symbol: ATXN2
  Gene Name: ataxin 2
  ENST ID: ENST00000548492
  CDS Start-End: 3-556
aaatgctaggagagagagattgcagcaggggacgtggtcgggttcctgaaggcagaaagggctccaaatgtgaagtacaagtgaaaaatggaggtatatatgaaggagtttttaaaacttacagtccgaagtgtgatttggtacttgatgccgcacatgagaaaagtacagaatccagttcggggccgaaacgtgaagaaataatggagagtattttgttcaaatgttcagactttgttgtggtacagtttaaagatatggactccagttatgcaaaaagagatgcttttactgactctgctatcagtgctaaagtgaatggcgaacacaaagagaaggacctggagccctgggatgcaggtgaactcacagccaatgaggaacttgaggctttggaaaatgacgtatctaatggatgggatcccaatgatatgtttcgatataatgaagaaaattatggtgtagtgtctacgtatgatagcagtttatcttcgtatacagtgcccttagaaagagataactcagaagaatttttaaaacgggaagcaagggcaaa

SEQ ID NO: 109320 - DNA, 695 bp, Homo sapiens
  Payload ID: 1475
  Gene Symbol: ATXN2
  Gene Name: ataxin 2
  ENST ID: ENST00000551755
  CDS Start-End: 1-322
gcaagttaggaaatcaacattgaatcccaatgcaaaggagttcaacccacgttccttctctcagccaaagccttctactaccccaacttcacctcggcctcaagcacaacctagcccatctatggtgggtcatcaacagccaactccagtttatactcagcctgtttgttttgcaccaaatatgatgtatccagtcccagtgagcccaggcgtgcaacctttatacccaatacctatgacgcccatgccagtgaatcaagccaagacatatagagcagccttggaacatatgaacctgttgaaagaactctgcctgaaataattaccaaatatgccccaacagcggcaagaccagcatcatcagagtgccatgatgcacccagcgtcagcagcgggcccaccgattgcagccaccccaccagcttactccacgcaatatgttgcctacagtcctcagcagttcccaaatcagccccttgttcagcatgtgccacattatcagtctcagcatcctcatgtctatagtcctgtaatacagggtaatgctagaatgatggcaccaccaacacacgcccagcctggtttagtatcttcttcagcaactcagtacggggctcatgagcagacgcatgcgatgtatgcatgtcccaaattaccatacaacaaggagacaagcccttctttctactttgcca

SEQ ID NO: 109321 - DNA, 610 bp, Homo sapiens
  Payload ID: 1475
  Gene Symbol: ATXN2
  Gene Name: ataxin 2
  ENST ID: ENST00000475132
  CDS Start-End: 1-360
gcacaacagactgtctttacgatccatccttctcacgttcagccggcgtataccaacccaccccacatggcccacgtacctcaggctcatgtacagtcaggaatggttccttctcatccaactgcccatgcgccaatgatgctaatgacgacacagccacccggcggtccccaggccgccctcgctcaaagtgcactacagcccattccagtctcgacaacagcgcatttcccctatatgacgcacccttcaggtgaggcgtgtgtgtgcaggggccgccggggcaccccaaagcattctgctcgcacaggtggaatggcaggcagggccagtgcttcaagccccgcatttgagaactagcaagacccgtccaggagtgtgcacaggagggactgtgacgatcagttcagcatcagggcctgaggcttccgggagccgagtctgtgtgtgttctgatggtatacaggatttggcttgatgagaagcagcagcagcagcaacagcagcctgatgcatgcctaggactcagttggccttccttgttatgacaggctggacagggcagtgttttccttcctgagtcccaaaagtctgacatgtggggggttat

SEQ ID NO: 109322 - DNA, 4376 bp, Homo sapiens
  Payload ID: 1475
  Gene Symbol: ATXN2
  Gene Name: ataxin 2
  ENST ID: ENST00000608853
  CDS Start-End: 317-3778
tcccccgcccggccccggcccccctccctcccggcagagctcgcctccctccgcctcagactgttttggtagcaacggcaacggcggcggcgcgtttcggcccggctcccggcggctccttggtctcggcgggcctccccgccccttcgtcgtcctccttctccccctcgccagcccgggcgcccctccggccgcgccaacccgcgcctccccgctcggcgcccgcgcgtccccgccgcgttccggcgtctccttggcgcgcccggctcccggctgtccccgcccggcgtgcgagccggtgtatgggcccctcaccatgtcgctgaagccccagcagcagcagcagcagcagcagcagcagcagcagcagcaacagcagcagcagcagcagcagcagcagccgccgcccgcggctgccaatgtccgcaagcccggcggcagcggccttctagcgtcgcccgccgccgcgccttcgccgtcctcgtcctcggtctcctcgtcctcggccacggctccctcctcggtggtcgcggcgacctccggcggcgggaggcccggcctgggcagaggtcgaaacagtaacaaaggactgcctcagtctacgatttcttttgatggaatctatgcaaatatgaggatggttcatatacttacatcagttgttggctccaaatgtgaagtacaagtgaaaaatggaggtatatatgaaggagtttttaaaacttacagtccgaagtgtgatttggtacttgatgccgcacatgagaaaagtacagaatccagttcggggccgaaacgtgaagaaataatggagagtattttgttcaaatgttcagactttgttgtggtacagtttaaagatatggactccagttatgcaaaaagagatgcttttactgactctgctatcagtgctaaagtgaatggcgaacacaaagagaaggacctggagccctgggatgcaggtgaactcacagccaatgaggaacttgaggctttggaaaatgacgtatctaatggatgggatcccaatgatatgtttcgatataatgaagaaaattatggtgtagtgtctacgtatgatagcagtttatcttcgtatacagtgcccttagaaagagataactcagaagaatttttaaaacgggaagcaagggcaaaccagttagcagaagaaattgagtcaagtgcccagtacaaagctcgagtggccctggaaaatgatgataggagtgaggaagaaaaatacacagcagttcagagaaattccagtgaacgtgaggggcacagcataaacactagggaaaataaatatattcctcctggacaaagaaatagagaagtcatatcctggggaagtgggagacagaattcaccgcgtatgggccagcctggatcgggctccatgccatcaagatccacttctcacacttcagatttcaacccgaattctggttcagaccaaagagtagttaatggaggtgttccctggccatcgccttgcccatctccttcctctcgcccaccttctcgctaccagtcaggtcccaactctcttccacctcgggcagccacccctacacggccgccctccaggcccccctcgcggccatccagacccccgtctcacccctctgctcatggttctccagctcctgtctctactatgcctaaacgcatgtcttcagaagggcctccaaggatgtccccaaaggcccagcgacatcctcgaaatcacagagtttctgctgggaggggttccatatccagtggcctagaatttgtatcccacaacccacccagtgaagcagctactcctccagtagcaaggaccagtccctcggggggaacgtggtcatcagtggtcagtggggttccaagattatcccctaaaactcatagacccaggtctcccagacagaacagtattggaaatacccccagtgggccagttcttgcttctccccaagctggtattattccaactgaagctgttgccatgcctattccagctgcatctcctacgcctgctagtcctgcatcgaacagagctgttaccccttctagtgaggctaaagattccaggcttcaagatcagaggcagaactctcctgcagggaataaagaaaatattaaacccaatgaaacatcacctagcttctcaaaagctgaaaacaaaggtatatcaccagttgtttctgaacatagaaaacagattgatgatttaaagaaatttaagaatgattttaggttacagccaagttctacttctgaatctatggatcaactactaaacaaaaatagagagggagaaaaatcaagagatttgatcaaagacaaaattgaaccaagtgctaaggattctttcattgaaaatagcagcagcaactgtaccagtggcagcagcaagccgaatagccccagcatttccccttcaatacttagtaacacggagcacaagaggggacctgaggtcacttcccaaggggttcagacttccagcccagcatgtaaacaagagaaagacgataaggaagagaagaaagacgcagctgagcaagttaggaaatcaacattgaatcccaatgcaaaggagttcaacccacgttccttctctcagccaaagccttctactaccccaacttcacctcggcctcaagcacaacctagcccatctatggtgggtcatcaacagccaactccagtttatactcagcctgtttgttttgcaccaaatatgatgtatccagtcccagtgagcccaggcgtgcaacctttatacccaatacctatgacgcccatgccagtgaatcaagccaagacatatagagcagtaccaaatatgccccaacagcggcaagaccagcatcatcagagtgccatgatgcacccagcgtcagcagcgggcccaccgattgcagccaccccaccagcttactccacgcaatatgttgcctacagtcctcagcagttcccaaatcagccccttgttcagcatgtgccacattatcagtctcagcatcctcatgtctatagtcctgtaatacagggtaatgctagaatgatggcaccaccaacacacgcccagcctggtttagtatcttcttcagcaactcagtacggggctcatgagcagacgcatgcgatgtatgcatgtcccaaattaccatacaacaaggagacaagcccttctttctactttgccatttccacgggctcccttgctcagcagtatgcgcaccctaacgctaccctgcacccacatactccacaccctcagccttcagctacccccactggacagcagcaaagccaacatggtggaagtcatcctgcacccagtcctgttcagcaccatcagcaccaggccgcccaggctctccatctggccagtccacagcagcagtcagccatttaccacgcggggcttgcgccaactccaccctccatgacacctgcctccaacacgcagtcgccacagaatagtttcccagcagcacaacagactgtctttacgatccatccttctcacgttcagccggcgtataccaacccaccccacatggcccacgtacctcaggctcatgtacagtcaggaatggttccttctcatccaactgcccatgcgccaatgatgctaatgacgacacagccacccggcggtccccaggccgccctcgctcaaagtgcactacagcccattccagtctcgacaacagcgcatttcccctatatgacgcacccttcagtacaagcccaccaccaacagcagttgtaaggctgccctggaggaaccgaaaggccaaattccctcctcccttctactgcttctaccaactggaagcacagaaaactagaatttcatttattttgtttttaaaatatatatgttgatttcttgtaacatccaataggaatgctaacagttcacttgcagtggaagatacttggaccgagtagaggcatttaggaacttgggggctattccataattccatatgctgtttcagagtcccgcaggtaccccagctctgcttgccgaaactggaagttatttattttttaataacccttgaaagtcatgaacacatcagctagcaaaagaagtaacaagagtgattcttgctgctattactgctaaaaaaaaaaaaaaaaaaaaatcaagacttggaacgcccttttactaaacttgacaaagtttcagtaaattcttaccgtcaaactgacggattattatttataaatcaagtttgatgaggtgatcactgtctacagtggttcaacttttaagttaagggaaaaacttttactttgtagataatataaaataaaaacttaaaaaaaatttaaaaaataaaaaaagttttaaaaactga

SEQ ID NO: 109323 - DNA, 4575 bp, Homo sapiens
  Payload ID: 1475
  Gene Symbol: ATXN2
  Gene Name: ataxin 2
  Uniprot ID: Q99700
  ENST ID: ENST00000616825
  CDS Start-End: 958-3978
acccccgagaaagcaacccagcgcgccgcccgctcctcacgtgtccctcccggccccggggccacctcacgttctgcttccgtctgacccctccgacttccggtaaagagtccctatccgcacctccgctcccacccggcgcctcggcgcgcccgccctccgatgcgctcagcggccgcagctcctcggagtcccgcggtggccaccgagtctcgccgcttcgccgcagccaggtggcccgggtggcgctcgctccagcggccggcgcggcggagcgggcggggcggcggtggcgcggccccgggaccgtatccctccgccgcccctcccccgcccggccccggcccccctccctcccggcagagctcgcctccctccgcctcagactgttttggtagcaacggcaacggcggcggcgcgtttcggcccggctcccggcggctccttggtctcggcgggcctccccgccccttcgtcgtcctccttctccccctcgccagcccgggcgcccctccggccgcgccaacccgcgcctccccgctcggcgcccgcgcgtccccgccgcgttccggcgtctccttggcgcgcccggctcccggctgtccccgcccggcgtgcgagccggtgtatgggcccctcaccatgtcgctgaagccccagcagcagcagcagcagcagcagcagcagcagcagcagcaacagcagcagcagcagcagcagcagcagccgccgcccgcggctgccaatgtccgcaagcccggcggcagcggccttctagcgtcgcccgccgccgcgccttcgccgtcctcgtcctcggtctcctcgtcctcggccacggctccctcctcggtggtcgcggcgacctccggcggcgggaggcccggcctgggcagaggtcgaaacagtaacaaaggactgcctcagtctacgatttcttttgatggaatctatgcaaatatgaggatggttcatatacttacatcagttgtttgtgatttggtacttgatgccgcacatgagaaaagtacagaatccagttcggggccgaaacgtgaagaaataatggagagtattttgttcaaatgttcagactttgttgtggtacagtttaaagatatggactccagttatgcaaaaagagatgcttttactgactctgctatcagtgctaaagtgaatggcgaacacaaagagaaggacctggagccctgggatgcaggtgaactcacagccaatgaggaacttgaggctttggaaaatgacgtatctaatggatgggatcccaatgatatgtttcgatataatgaagaaaattatggtgtagtgtctacgtatgatagcagtttatcttcgtatacagtgcccttagaaagagataactcagaagaatttttaaaacgggaagcaagggcaaaccagttagcagaagaaattgagtcaagtgcccagtacaaagctcgagtggccctggaaaatgatgataggagtgaggaagaaaaatacacagcagttcagagaaattccagtgaacgtgaggggcacagcataaacactagggaaaataaatatattcctcctggacaaagaaatagagaagtcatatcctggggaagtgggagacagaattcaccgcgtatgggccagcctggatcgggctccatgccatcaagatccacttctcacacttcagatttcaacccgaattctggttcagaccaaagagtagttaatggaggtgttccctggccatcgccttgcccatctccttcctctcgcccaccttctcgctaccagtcaggtcccaactctcttccacctcgggcagccacccctacacggccgccctccaggcccccctcgcggccatccagacccccgtctcacccctctgctcatggttctccagctcctgtctctactatgcctaaacgcatgtcttcagaagggcctccaaggatgtccccaaaggcccagcgacatcctcgaaatcacagagtttctgctgggaggggttccatatccagtggcctagaatttgtatcccacaacccacccagtgaagcagctactcctccagtagcaaggaccagtccctcggggggaacgtggtcatcagtggtcagtggggttccaagattatcccctaaaactcatagacccaggtctcccagacagaacagtattggaaatacccccagtgggccagttcttgcttctccccaagctggtattattccaactgaagctgttgccatgcctattccagctgcatctcctacgcctgctagtcctgcatcgaacagagctgttaccccttctagtgaggctaaagattccaggcttcaagatcagaggcagaactctcctgcagggaataaagaaaatattaaacccaatgaaacatcacctagcttctcaaaagctgaaaacaaaggtatatcaccagttgtttctgaacatagaaaacagattgatgatttaaagaaatttaagaatgattttaggttacagccaagttctacttctgaatctatggatcaactactaaacaaaaatagagagggagaaaaatcaagagatttgatcaaagacaaaattgaaccaagtgctaaggattctttcattgaaaatagcagcagcaactgtaccagtggcagcagcaagccgaatagccccagcatttccccttcaatacttagtaacacggagcacaagaggggacctgaggtcacttcccaaggggttcagacttccagcccagcatgtaaacaagagaaagacgataaggaagagaagaaagacgcagctgagcaagttaggaaatcaacattgaatcccaatgcaaaggagttcaacccacgttccttctctcagccaaagccttctactaccccaacttcacctcggcctcaagcacaacctagcccatctatggtgggtcatcaacagccaactccagtttatactcagcctgtttgttttgcaccaaatatgatgtatccagtcccagtgagcccaggcgtgcaacctttatacccaatacctatgacgcccatgccagtgaatcaagccaagacatatagagcagtaccaaatatgccccaacagcggcaagaccagcatcatcagagtgccatgatgcacccagcgtcagcagcgggcccaccgattgcagccaccccaccagcttactccacgcaatatgttgcctacagtcctcagcagttcccaaatcagccccttgttcagcatgtgccacattatcagtctcagcatcctcatgtctatagtcctgtaatacagggtaatgctagaatgatggcaccaccaacacacgcccagcctggtttagtatcttcttcagcaactcagtacggggctcatgagcagacgcatgcgatgtatgtttccacgggctcccttgctcagcagtatgcgcaccctaacgctaccctgcacccacatactccacaccctcagccttcagctacccccactggacagcagcaaagccaacatggtggaagtcatcctgcacccagtcctgttcagcaccatcagcaccaggccgcccaggctctccatctggccagtccacagcagcagtcagccatttaccacgcggggcttgcgccaactccaccctccatgacacctgcctccaacacgcagtcgccacagaatagtttcccagcagcacaacagactgtctttacgatccatccttctcacgttcagccggcgtataccaacccaccccacatggcccacgtacctcaggctcatgtacagtcaggaatggttccttctcatccaactgcccatgcgccaatgatgctaatgacgacacagccacccggcggtccccaggccgccctcgctcaaagtgcactacagcccattccagtctcgacaacagcgcatttcccctatatgacgcacccttcagtacaagcccaccaccaacagcagttgtaaggctgccctggaggaaccgaaaggccaaattccctcctcccttctactgcttctaccaactggaagcacagaaaactagaatttcatttattttgtttttaaaatatatatgttgatttcttgtaacatccaataggaatgctaacagttcacttgcagtggaagatacttggaccgagtagaggcatttaggaacttgggggctattccataattccatatgctgtttcagagtcccgcaggtaccccagctctgcttgccgaaactggaagttatttattttttaataacccttgaaagtcatgaacacatcagctagcaaaagaagtaacaagagtgattcttgctgctattactgctaaaaaaaaaaaaaaaaaaaaatcaagacttggaacgcccttttactaaacttgacaaagtttcagtaaattcttaccgtcaaactgacggattattatttataaatcaagtttgatgaggtgatcactgtctacagtggttcaacttttaagttaagggaaaaacttttactttgtagataatataaaataaaaacttaaaaaaaatttaaaaaataaaaaaagttttaaaaactg

SEQ ID NO: 109324 - DNA, 3788 bp, Homo sapiens
  Payload ID: 1476
  Gene Symbol: ATXN2L
  Gene Name: ataxin 2-like
  Uniprot ID: Q8WWM7
  ENST ID: ENST00000325215
  CDS Start-End: 168-3356
ccgcggtcttctctctccacccccgacaccgcggggctccccccgcccgcccacggcgggccccggctgcccgatccccctcgcttcccgcgctctccagcggggccccagccccggccccctctctccctcccttctctctaattccccttccggacgctgccatcatgttgaagcctcagccgctacaacagccctcccagccccagcagccgccccccacgcaacaggccgtggcccgtcggccccccgggggcaccagccctcccaacggcggcctcccggggccgctggccacctctgcggctcctcccgggcctccagcggccgcctccccctgcctggggcctgtggccgctgccgggagcgggctccgccggggagccgaaggcatcttggcgccgcagccgccgccgccgcagcaacaccaggagaggccgggggcagccgccatcggcagcgccaggggacagagcacaggaaagggacccccacagtcacctgtgtttgaaggcgtctacaacaattccagaatgctgcatttccttacagctgttgtgggctccacttgtgatgtaaaggtgaaaaatggtaccacttatgagggtatcttcaagacgctaagctcaaagtttgaactagccgtggatgctgtgcaccggaaagcatctgagccagcaggtggccctcgtcgggaggacattgtggacaccatggtgtttaagccaagtgatgtcatgcttgttcacttccgaaatgttgacttcaactatgctactaaagacaagttcaccgattcagccattgccatgaactcgaaagtgaatggggaacacaaagagaaggtgcttcagcgctgggaggggggtgacagcaacagcgacgactatgacctcgagtctgacatgtccaatggatgggaccccaatgaaatgttcaagttcaatgaggagaactacggtgtgaagactacctatgatagcagtctttcttcttatacggtgcccttagaaaaggacaactcagaagagtttcgtcagcgagagctgcgtgcggcccagttggctcgagagattgaatcaagcccccagtaccgcctacggatcgccatggagaacgacgatgggcgcactgaagaggagaagcacagtgcagtccagcggcagggctcagggcgggagagccccagcttggcatccagggaggggaagtatatccctctgcctcaacgagtccgggaaggtccccggggaggagttcgatgcagcagctctcggggcggtcggcctggccttagctctttgccacctcgtggccctcaccatctggacaacagcagccctggcccaggttctgaggcccgtggtatcaatggaggcccttcccgcatgtccccaaaggcacaacggcctctgagaggtgccaagactctgtcttcgcccagtaataggccttctggagaaacttctgttccacctcctcctgcagtgggccggatgtatcccccgcgttctcccaagtctgctgcccctgccccaatctcagcttcctgtccagagcctcccatcggctcggcagtgccaacctcttcagcctccatccctgtgacctcatcagtctcagatcctggagtgggctccatttctccagcttctccaaagatctccctggcccccacagatgtaaaagaactctctaccaaggaacctgggagaactctggagccccaggagctggctcggatagctgggaaagtccctggtcttcagaatgaacagaaacgattccaactggaagaactgagaaagtttggggcccagtttaagcttcagcccagtagctcccctgagaacagcctggatccttttcctccccggatcttaaaggaggagcccaaaggaaaggagaaagaggttgatggtctgttgacttcagagcccatggggtctcccgtctcctccaagacagagtccgtatcggataaggaggacaaaccacccctggcaccatcaggaggcactgaggggccagagcagcccccaccaccttgtccaagccaaactggcagccccccggtgggcctcatcaagggagaagacaaagatgagggccctgttgctgaacaagtaaagaaatcaacgttgaaccctaatgctaaggagttcaatcctacaaagcctctgctgtctgtgaataaatccaccagtaccccaacttctccggggccccggactcattcaactccctccatcccggtgctgacagcaggccagagtgggctatacagcccccagtacatctcctacatacctcagatccacatgggaccagctgtgcaggcacctcagatgtatccatatcctgtatccaattcagtgcctgggcagcagggcaagtaccggggagcaaaaggctcccttcctccgcagcgctcggaccaacaccagccagcctcagccccgccgatgatgcaggccgccgcggctgctggcccgcctctggtggctgccacgccctattcttcctacatcccctacaaccctcagcagttcccaggccagccagccatgatgcagcccatggcccactacccctcacagccggtgtttgcccccatgcttcagagcaacccacgcatgctgacgtcgggcagccatccccaggccatcgtgtcatcctctacccctcagtacccttctgcagagcagcctaccccccaagccctttatgccactgttcaccagtcctacccacaccatgccacacagctccatgcccaccagccgcagccggctaccacgcctactggaagccagccgcagtcccagcatgcggcccccagtcctgtccagcatcaggcggggcaggccccacacttgggcagtggacagccacagcagaatctgtaccacccaggggccctgacaggcacgccgccctctctgccaccgggaccttctgcccagtcccctcagagcagcttcccccagccagccgctgtgtatgccatccaccaccagcagctgccccacggcttcaccaacatggcccatgttacccaggcccatgtccaaactggaatcacagcagccccgccccctcaccctggggctccccacccgccccaggtgatgctgctgcacccaccccagagtcatggggggcccccccaaggcgcggtgccccagagtggggtgcctgcactctcagcttccacaccctcaccctacccctacatcggacacccccaaggtgagcagcctggccaggcgcctggatttccaggaggagccgatgacaggattcctccccttccaccccccggggaactgaagattgtcctggccgcgacctgagacctccatgagtggagggaagagtgatctatgtctcttcccccagcagctcggaccactcccagccccccatccccccgttccccaggggagctggggaattcctgccaagcaccttgaatgggaggggcctcacagagggcagggccagggtccagcaggggtggggggttcctgctctgcccctgcccgtccccacccagtcttgccctcccatcctctcatctattcccccgctggagacggaagatcttttattttctattatttataacttcagacttgggccccctgttctttctttcccattaacttgagtgacctgtgtgagagacagacagatgccccacgaggatggctggacaaggacttttactttttattacataaaaatattaaaaaataaataaaaaaaataaaattttaaactaa

SEQ ID NO: 109325 - DNA, 4367 bp, Homo sapiens
  Payload ID: 1476
  Gene Symbol: ATXN2L
  Gene Name: ataxin 2-like
  Uniprot ID: Q8WWM7
  ENST ID: ENST00000336783
  CDS Start-End: 168-3395
ccgcggtcttctctctccacccccgacaccgcggggctccccccgcccgcccacggcgggccccggctgcccgatccccctcgcttcccgcgctctccagcggggccccagccccggccccctctctccctcccttctctctaattccccttccggacgctgccatcatgttgaagcctcagccgctacaacagccctcccagccccagcagccgccccccacgcaacaggccgtggcccgtcggccccccgggggcaccagccctcccaacggcggcctcccggggccgctggccacctctgcggctcctcccgggcctccagcggccgcctccccctgcctggggcctgtggccgctgccgggagcgggctccgccggggagccgaaggcatcttggcgccgcagccgccgccgccgcagcaacaccaggagaggccgggggcagccgccatcggcagcgccaggggacagagcacaggaaagggacccccacagtcacctgtgtttgaaggcgtctacaacaattccagaatgctgcatttccttacagctgttgtgggctccacttgtgatgtaaaggtgaaaaatggtaccacttatgagggtatcttcaagacgctaagctcaaagtttgaactagccgtggatgctgtgcaccggaaagcatctgagccagcaggtggccctcgtcgggaggacattgtggacaccatggtgtttaagccaagtgatgtcatgcttgttcacttccgaaatgttgacttcaactatgctactaaagacaagttcaccgattcagccattgccatgaactcgaaagtgaatggggaacacaaagagaaggtgcttcagcgctgggaggggggtgacagcaacagcgacgactatgacctcgagtctgacatgtccaatggatgggaccccaatgaaatgttcaagttcaatgaggagaactacggtgtgaagactacctatgatagcagtctttcttcttatacggtgcccttagaaaaggacaactcagaagagtttcgtcagcgagagctgcgtgcggcccagttggctcgagagattgaatcaagcccccagtaccgcctacggatcgccatggagaacgacgatgggcgcactgaagaggagaagcacagtgcagtccagcggcagggctcagggcgggagagccccagcttggcatccagggaggggaagtatatccctctgcctcaacgagtccgggaaggtccccggggaggagttcgatgcagcagctctcggggcggtcggcctggccttagctctttgccacctcgtggccctcaccatctggacaacagcagccctggcccaggttctgaggcccgtggtatcaatggaggcccttcccgcatgtccccaaaggcacaacggcctctgagaggtgccaagactctgtcttcgcccagtaataggccttctggagaaacttctgttccacctcctcctgcagtgggccggatgtatcccccgcgttctcccaagtctgctgcccctgccccaatctcagcttcctgtccagagcctcccatcggctcggcagtgccaacctcttcagcctccatccctgtgacctcatcagtctcagatcctggagtgggctccatttctccagcttctccaaagatctccctggcccccacagatgtaaaagaactctctaccaaggaacctgggagaactctggagccccaggagctggctcggatagctgggaaagtccctggtcttcagaatgaacagaaacgattccaactggaagaactgagaaagtttggggcccagtttaagcttcagcccagtagctcccctgagaacagcctggatccttttcctccccggatcttaaaggaggagcccaaaggaaaggagaaagaggttgatggtctgttgacttcagagcccatggggtctcccgtctcctccaagacagagtccgtatcggataaggaggacaaaccacccctggcaccatcaggaggcactgaggggccagagcagcccccaccaccttgtccaagccaaactggcagccccccggtgggcctcatcaagggagaagacaaagatgagggccctgttgctgaacaagtaaagaaatcaacgttgaaccctaatgctaaggagttcaatcctacaaagcctctgctgtctgtgaataaatccaccagtaccccaacttctccggggccccggactcattcaactccctccatcccggtgctgacagcaggccagagtgggctatacagcccccagtacatctcctacatacctcagatccacatgggaccagctgtgcaggcacctcagatgtatccatatcctgtatccaattcagtgcctgggcagcagggcaagtaccggggagcaaaaggctcccttcctccgcagcgctcggaccaacaccagccagcctcagccccgccgatgatgcaggccgccgcggctgctggcccgcctctggtggctgccacgccctattcttcctacatcccctacaaccctcagcagttcccaggccagccagccatgatgcagcccatggcccactacccctcacagccggtgtttgcccccatgcttcagagcaacccacgcatgctgacgtcgggcagccatccccaggccatcgtgtcatcctctacccctcagtacccttctgcagagcagcctaccccccaagccctttatgccactgttcaccagtcctacccacaccatgccacacagctccatgcccaccagccgcagccggctaccacgcctactggaagccagccgcagtcccagcatgcggcccccagtcctgtccagcatcaggcggggcaggccccacacttgggcagtggacagccacagcagaatctgtaccacccaggggccctgacaggcacgccgccctctctgccaccgggaccttctgcccagtcccctcagagcagcttcccccagccagccgctgtgtatgccatccaccaccagcagctgccccacggcttcaccaacatggcccatgttacccaggcccatgtccaaactggaatcacagcagccccgccccctcaccctggggctccccacccgccccaggtgatgctgctgcacccaccccagagtcatggggggcccccccaaggcgcggtgccccagagtggggtgcctgcactctcagcttccacaccctcaccctacccctacatcggacacccccaaggtgagcagcctggccaggcgcctggatttccaggaggagccgatgacaggattcgtgagttctcattagctgggggaatttggcatggaagagctgaggggctgcaggtggggcaggatgcacgggttctgggtggggagtgaggggtcttggaggcagggctgtcccacagggcgcccgccgacctgcacctgtctgtgaagtatgtagggtgggcagaagccacagtcgccgccgccaggggcttgctcctggctctgtcctttgcttccctccgtcctcgctcagttgtgatccagcagcccccctccccactgcctccccagctctcagtgaccccgactgtctcctgacttagccgaggtaaggtcagtgcagcagacagggccagactggggtgtggggggctgagctgggcacatgagtgagggctctggcttactgggaaacagcgattgacctgtgcttctgacagcccccgagacaccttgaggaggccgctccttcccagacacacccccacgcccccactggacggcattggaggaagggacagctgcttgggttctaatgctcctgctctcttctctttcccctccaaccagttcaatctcatccctcccagcagctccccttccaccccccggggaactgaagattgtcctggccgcgacctgagacctccatgagtggagggaagagtgatctatgtctcttcccccagcagctcggaccactcccagccccccatccccccgttccccaggggagctggggaattcctgccaagcaccttgaatgggaggggcctcacagagggcagggccagggtccagcaggggtggggggttcctgctctgcccctgcccgtccccacccagtcttgccctcccatcctctcatctattcccccgctggagacggaagatcttttattttctattatttataacttcagacttgggccccctgttctttctttcccattaacttgagtgacctgtgtgagagacagacagatgccccacgaggatggctggacaaggacttttactttttattacataaaaatattaaaaaataaataaaaaaaataaaattttaaactaacttaa

SEQ ID NO: 109326 - DNA, 3807 bp, Homo sapiens
  Payload ID: 1476
  Gene Symbol: ATXN2L
  Gene Name: ataxin 2-like
  Uniprot ID: Q8WWM7
  ENST ID: ENST00000340394
  CDS Start-End: 213-3347
agccgcgagaccccctccccttccgcctcgcggcgcttcctcgcgccgcggtcttctctctccacccccgacaccgcggggctccccccgcccgcccacggcgggccccggctgcccgatccccctcgcttcccgcgctctccagcggggccccagccccggccccctctctccctcccttctctctaattccccttccggacgctgccatcatgttgaagcctcagccgctacaacagccctcccagccccagcagccgccccccacgcaacaggccgtggcccgtcggccccccgggggcaccagccctcccaacggcggcctcccggggccgctggccacctctgcggctcctcccgggcctccagcggccgcctccccctgcctggggcctgtggccgctgccgggagcgggctccgccggggagccgaaggcatcttggcgccgcagccgccgccgccgcagcaacaccaggagaggccgggggcagccgccatcggcagcgccaggggacagagcacaggaaagggacccccacagtcacctgtgtttgaaggcgtctacaacaattccagaatgctgcatttccttacagctgttgtgggctccacttgtgatgtaaaggtgaaaaatggtaccacttatgagggtatcttcaagacgctaagctcaaagtttgaactagccgtggatgctgtgcaccggaaagcatctgagccagcaggtggccctcgtcgggaggacattgtggacaccatggtgtttaagccaagtgatgtcatgcttgttcacttccgaaatgttgacttcaactatgctactaaagacaagttcaccgattcagccattgccatgaactcgaaagtgaatggggaacacaaagagaaggtgcttcagcgctgggaggggggtgacagcaacagcgacgactatgacctcgagtctgacatgtccaatggatgggaccccaatgaaatgttcaagttcaatgaggagaactacggtgtgaagactacctatgatagcagtctttcttcttatacggtgcccttagaaaaggacaactcagaagagtttcgtcagcgagagctgcgtgcggcccagttggctcgagagattgaatcaagcccccagtaccgcctacggatcgccatggagaacgacgatgggcgcactgaagaggagaagcacagtgcagtccagcggcagggctcagggcgggagagccccagcttggcatccagggaggggaagtatatccctctgcctcaacgagtccgggaaggtccccggggaggagttcgatgcagcagctctcggggcggtcggcctggccttagctctttgccacctcgtggccctcaccatctggacaacagcagccctggcccaggttctgaggcccgtggtatcaatggaggcccttcccgcatgtccccaaaggcacaacggcctctgagaggtgccaagactctgtcttcgcccagtaataggccttctggagaaacttctgttccacctcctcctgcagtgggccggatgtatcccccgcgttctcccaagtctgctgcccctgccccaatctcagcttcctgtccagagcctcccatcggctcggcagtgccaacctcttcagcctccatccctgtgacctcatcagtctcagatcctggagtgggctccatttctccagcttctccaaagatctccctggcccccacagatgtaaaagaactctctaccaaggaacctgggagaactctggagccccaggagctggctcggatagctgggaaagtccctggtcttcagaatgaacagaaacgattccaactggaagaactgagaaagtttggggcccagtttaagcttcagcccagtagctcccctgagaacagcctggatccttttcctccccggatcttaaaggaggagcccaaaggaaaggagaaagaggttgatggtctgttgacttcagagcccatggggtctcccgtctcctccaagacagagtccgtatcggataaggaggacaaaccacccctggcaccatcaggaggcactgaggggccagagcagcccccaccaccttgtccaagccaaactggcagccccccggtgggcctcatcaagggagaagacaaagatgagggccctgttgctgaacaagtaaagaaatcaacgttgaaccctaatgctaaggagttcaatcctacaaagcctctgctgtctgtgaataaatccaccagtaccccaacttctccggggccccggactcattcaactccctccatcccggtgctgacagcaggccagagtgggctatacagcccccagtacatctcctacatacctcagatccacatgggaccagctgtgcaggcacctcagatgtatccatatcctgtatccaattcagtgcctgggcagcagggcaagtaccggggagcaaaaggctcccttcctccgcagcgctcggaccaacaccagccagcctcagccccgccgatgatgcaggccgccgcggctgctggcccgcctctggtggctgccacgccctattcttcctacatcccctacaaccctcagcagttcccaggccagccagccatgatgcagcccatggcccactacccctcacagccggtgtttgcccccatgcttcagagcaacccacgcatgctgacgtcgggcagccatccccaggccatcgtgtcatcctctacccctcagtacccttctgcagagcagcctaccccccaagccctttatgccactgttcaccagtcctacccacaccatgccacacagctccatgcccaccagccgcagccggctaccacgcctactggaagccagccgcagtcccagcatgcggcccccagtcctgtccagcatcaggcggggcaggccccacacttgggcagtggacagccacagcagaatctgtaccacccaggggccctgacaggcacgccgccctctctgccaccgggaccttctgcccagtcccctcagagcagcttcccccagccagccgctgtgtatgccatccaccaccagcagctgccccacggcttcaccaacatggcccatgttacccaggcccatgtccaaactggaatcacagcagccccgccccctcaccctggggctccccacccgccccaggtgatgctgctgcacccaccccagagtcatggggggcccccccaaggcgcggtgccccagagtggggtgcctgcactctcagcttccacaccctcaccctacccctacatcggacacccccaagttcaatctcatccctcccagcagctccccttccaccccccggggaactgaagattgtcctggccgcgacctgagacctccatgagtggagggaagagtgatctatgtctcttcccccagcagctcggaccactcccagccccccatccccccgttccccaggggagctggggaattcctgccaagcaccttgaatgggaggggcctcacagagggcagggccagggtccagcaggggtggggggttcctgctctgcccctgcccgtccccacccagtcttgccctcccatcctctcatctattcccccgctggagacggaagatcttttattttctattatttataacttcagacttgggccccctgttctttctttcccattaacttgagtgacctgtgtgagagacagacagatgccccacgaggatggctggacaaggacttttactttttattacataaaaatattaaaaaataaataaaaaaaataaaattttaaactaacttaa

SEQ ID NO: 109327 - DNA, 3739 bp, Homo sapiens
  Payload ID: 1476
  Gene Symbol: ATXN2L
  Gene Name: ataxin 2-like
  Uniprot ID: Q8WWM7
  ENST ID: ENST00000382686
  CDS Start-End: 168-3302
ccgcggtcttctctctccacccccgacaccgcggggctccccccgcccgcccacggcgggccccggctgcccgatccccctcgcttcccgcgctctccagcggggccccagccccggccccctctctccctcccttctctctaattccccttccggacgctgccatcatgttgaagcctcagccgctacaacagccctcccagccccagcagccgccccccacgcaacaggccgtggcccgtcggccccccgggggcaccagccctcccaacggcggcctcccggggccgctggccacctctgcggctcctcccgggcctccagcggccgcctccccctgcctggggcctgtggccgctgccgggagcgggctccgccggggagccgaaggcatcttggcgccgcagccgccgccgccgcagcaacaccaggagaggccgggggcagccgccatcggcagcgccaggggacagagcacaggaaagggacccccacagtcacctgtgtttgaaggcgtctacaacaattccagaatgctgcatttccttacagctgttgtgggctccacttgtgatgtaaaggtgaaaaatggtaccacttatgagggtatcttcaagacgctaagctcaaagtttgaactagccgtggatgctgtgcaccggaaagcatctgagccagcaggtggccctcgtcgggaggacattgtggacaccatggtgtttaagccaagtgatgtcatgcttgttcacttccgaaatgttgacttcaactatgctactaaagacaagttcaccgattcagccattgccatgaactcgaaagtgaatggggaacacaaagagaaggtgcttcagcgctgggaggggggtgacagcaacagcgacgactatgacctcgagtctgacatgtccaatggatgggaccccaatgaaatgttcaagttcaatgaggagaactacggtgtgaagactacctatgatagcagtctttcttcttatacggtgcccttagaaaaggacaactcagaagagtttcgtcagcgagagctgcgtgcggcccagttggctcgagagattgaatcaagcccccagtaccgcctacggatcgccatggagaacgacgatgggcgcactgaagaggagaagcacagtgcagtccagcggcagggctcagggcgggagagccccagcttggcatccagggaggggaagtatatccctctgcctcaacgagtccgggaaggtccccggggaggagttcgatgcagcagctctcggggcggtcggcctggccttagctctttgccacctcgtggccctcaccatctggacaacagcagccctggcccaggttctgaggcccgtggtatcaatggaggcccttcccgcatgtccccaaaggcacaacggcctctgagaggtgccaagactctgtcttcgcccagtaataggccttctggagaaacttctgttccacctcctcctgcagtgggccggatgtatcccccgcgttctcccaagtctgctgcccctgccccaatctcagcttcctgtccagagcctcccatcggctcggcagtgccaacctcttcagcctccatccctgtgacctcatcagtctcagatcctggagtgggctccatttctccagcttctccaaagatctccctggcccccacagatgtaaaagaactctctaccaaggaacctgggagaactctggagccccaggagctggctcggatagctgggaaagtccctggtcttcagaatgaacagaaacgattccaactggaagaactgagaaagtttggggcccagtttaagcttcagcccagtagctcccctgagaacagcctggatccttttcctccccggatcttaaaggaggagcccaaaggaaaggagaaagaggttgatggtctgttgacttcagagcccatggggtctcccgtctcctccaagacagagtccgtatcggataaggaggacaaaccacccctggcaccatcaggaggcactgaggggccagagcagcccccaccaccttgtccaagccaaactggcagccccccggtgggcctcatcaagggagaagacaaagatgagggccctgttgctgaacaagtaaagaaatcaacgttgaaccctaatgctaaggagttcaatcctacaaagcctctgctgtctgtgaataaatccaccagtaccccaacttctccggggccccggactcattcaactccctccatcccggtgctgacagcaggccagagtgggctatacagcccccagtacatctcctacatacctcagatccacatgggaccagctgtgcaggcacctcagatgtatccatatcctgtatccaattcagtgcctgggcagcagggcaagtaccggggagcaaaaggctcccttcctccgcagcgctcggaccaacaccagccagcctcagccccgccgatgatgcaggccgccgcggctgctggcccgcctctggtggctgccacgccctattcttcctacatcccctacaaccctcagcagttcccaggccagccagccatgatgcagcccatggcccactacccctcacagccggtgtttgcccccatgcttcagagcaacccacgcatgctgacgtcgggcagccatccccaggccatcgtgtcatcctctacccctcagtacccttctgcagagcagcctaccccccaagccctttatgccactgttcaccagtcctacccacaccatgccacacagctccatgcccaccagccgcagccggctaccacgcctactggaagccagccgcagtcccagcatgcggcccccagtcctgtccagcatcaggcggggcaggccccacacttgggcagtggacagccacagcagaatctgtaccacccaggggccctgacaggcacgccgccctctctgccaccgggaccttctgcccagtcccctcagagcagcttcccccagccagccgctgtgtatgccatccaccaccagcagctgccccacggcttcaccaacatggcccatgttacccaggcccatgtccaaactggaatcacagcagccccgccccctcaccctggggctccccacccgccccaggtgatgctgctgcacccaccccagagtcatggggggcccccccaaggcgcggtgccccagagtggggtgcctgcactctcagcttccacaccctcaccctacccctacatcggacacccccaagctccccttccaccccccggggaactgaagattgtcctggccgcgacctgagacctccatgagtggagggaagagtgatctatgtctcttcccccagcagctcggaccactcccagccccccatccccccgttccccaggggagctggggaattcctgccaagcaccttgaatgggaggggcctcacagagggcagggccagggtccagcaggggtggggggttcctgctctgcccctgcccgtccccacccagtcttgccctcccatcctctcatctattcccccgctggagacggaagatcttttattttctattatttataacttcagacttgggccccctgttctttctttcccattaacttgagtgacctgtgtgagagacagacagatgccccacgaggatggctggacaaggacttttactttttattacataaaaatattaaaaaataaataaaaaaaataaaattttaaactaacttaa

SEQ ID NO: 109328 - DNA, 3981 bp, Homo sapiens
  Payload ID: 1476
  Gene Symbol: ATXN2L
  Gene Name: ataxin 2-like
  Uniprot ID: Q8WWM7
  ENST ID: ENST00000395547
  CDS Start-End: 168-3461
ccgcggtcttctctctccacccccgacaccgcggggctccccccgcccgcccacggcgggccccggctgcccgatccccctcgcttcccgcgctctccagcggggccccagccccggccccctctctccctcccttctctctaattccccttccggacgctgccatcatgttgaagcctcagccgctacaacagccctcccagccccagcagccgccccccacgcaacaggccgtggcccgtcggccccccgggggcaccagccctcccaacggcggcctcccggggccgctggccacctctgcggctcctcccgggcctccagcggccgcctccccctgcctggggcctgtggccgctgccgggagcgggctccgccggggagccgaaggcatcttggcgccgcagccgccgccgccgcagcaacaccaggagaggccgggggcagccgccatcggcagcgccaggggacagagcacaggaaagggacccccacagtcacctgtgtttgaaggcgtctacaacaattccagaatgctgcatttccttacagctgttgtgggctccacttgtgatgtaaaggtgaaaaatggtaccacttatgagggtatcttcaagacgctaagctcaaagtttgaactagccgtggatgctgtgcaccggaaagcatctgagccagcaggtggccctcgtcgggaggacattgtggacaccatggtgtttaagccaagtgatgtcatgcttgttcacttccgaaatgttgacttcaactatgctactaaagacaagttcaccgattcagccattgccatgaactcgaaagtgaatggggaacacaaagagaaggtgcttcagcgctgggaggggggtgacagcaacagcgacgactatgacctcgagtctgacatgtccaatggatgggaccccaatgaaatgttcaagttcaatgaggagaactacggtgtgaagactacctatgatagcagtctttcttcttatacggtgcccttagaaaaggacaactcagaagagtttcgtcagcgagagctgcgtgcggcccagttggctcgagagattgaatcaagcccccagtaccgcctacggatcgccatggagaacgacgatgggcgcactgaagaggagaagcacagtgcagtccagcggcagggctcagggcgggagagccccagcttggcatccagggaggggaagtatatccctctgcctcaacgagtccgggaaggtccccggggaggagttcgatgcagcagctctcggggcggtcggcctggccttagctctttgccacctcgtggccctcaccatctggacaacagcagccctggcccaggttctgaggcccgtggtatcaatggaggcccttcccgcatgtccccaaaggcacaacggcctctgagaggtgccaagactctgtcttcgcccagtaataggccttctggagaaacttctgttccacctcctcctgcagtgggccggatgtatcccccgcgttctcccaagtctgctgcccctgccccaatctcagcttcctgtccagagcctcccatcggctcggcagtgccaacctcttcagcctccatccctgtgacctcatcagtctcagatcctggagtgggctccatttctccagcttctccaaagatctccctggcccccacagatgtaaaagaactctctaccaaggaacctgggagaactctggagccccaggagctggctcggatagctgggaaagtccctggtcttcagaatgaacagaaacgattccaactggaagaactgagaaagtttggggcccagtttaagcttcagcccagtagctcccctgagaacagcctggatccttttcctccccggatcttaaaggaggagcccaaaggaaaggagaaagaggttgatggtctgttgacttcagagcccatggggtctcccgtctcctccaagacagagtccgtatcggataaggaggacaaaccacccctggcaccatcaggaggcactgaggggccagagcagcccccaccaccttgtccaagccaaactggcagccccccggtgggcctcatcaagggagaagacaaagatgagggccctgttgctgaacaagtaaagaaatcaacgttgaaccctaatgctaaggagttcaatcctacaaagcctctgctgtctgtgaataaatccaccagtaccccaacttctccggggccccggactcattcaactccctccatcccggtgctgacagcaggccagagtgggctatacagcccccagtacatctcctacatacctcagatccacatgggaccagctgtgcaggcacctcagatgtatccatatcctgtatccaattcagtgcctgggcagcagggcaagtaccggggagcaaaaggctcccttcctccgcagcgctcggaccaacaccagccagcctcagccccgccgatgatgcaggccgccgcggctgctggcccgcctctggtggctgccacgccctattcttcctacatcccctacaaccctcagcagttcccaggccagccagccatgatgcagcccatggcccactacccctcacagccggtgtttgcccccatgcttcagagcaacccacgcatgctgacgtcgggcagccatccccaggccatcgtgtcatcctctacccctcagtacccttctgcagagcagcctaccccccaagccctttatgccactgttcaccagtcctacccacaccatgccacacagctccatgcccaccagccgcagccggctaccacgcctactggaagccagccgcagtcccagcatgcggcccccagtcctgtccagcatcaggcggggcaggccccacacttgggcagtggacagccacagcagaatctgtaccacccaggggccctgacaggcacgccgccctctctgccaccgggaccttctgcccagtcccctcagagcagcttcccccagccagccgctgtgtatgccatccaccaccagcagctgccccacggcttcaccaacatggcccatgttacccaggcccatgtccaaactggaatcacagcagccccgccccctcaccctggggctccccacccgccccaggtgatgctgctgcacccaccccagagtcatggggggcccccccaaggcgcggtgccccagagtggggtgcctgcactctcagcttccacaccctcaccctacccctacatcggacacccccaaggtgagcagcctggccaggcgcctggatttccaggaggagccgatgacaggattctatgtagggtgggcagaagccacagtcgccgccgccaggggcttgctcctggctctgtcctttgcttccctccgtcctcgctcagttgtgatccagcagcccccctccccactgcctccccagctctcagtgaccccgactgtctcctgacttagccgaggtaagttcaatctcatccctcccagcagctccccttccaccccccggggaactgaagattgtcctggccgcgacctgagacctccatgagtggagggaagagtgatctatgtctcttcccccagcagctcggaccactcccagccccccatccccccgttccccaggggagctggggaattcctgccaagcaccttgaatgggaggggcctcacagagggcagggccagggtccagcaggggtggggggttcctgctctgcccctgcccgtccccacccagtcttgccctcccatcctctcatctattcccccgctggagacggaagatcttttattttctattatttataacttcagacttgggccccctgttctttctttcccattaacttgagtgacctgtgtgagagacagacagatgccccacgaggatggctggacaaggacttttactttttattacataaaaatattaaaaaataaataaaaaaaataaaattttaaactaacttaa

SEQ ID NO: 109329 - DNA, 3635 bp, Homo sapiens
  Payload ID: 1476
  Gene Symbol: ATXN2L
  Gene Name: ataxin 2-like
  Uniprot ID: Q8WWM7
  ENST ID: ENST00000570200
  CDS Start-End: 9-3197
ctgccatcatgttgaagcctcagccgctacaacagccctcccagccccagcagccgccccccacgcaacaggccgtggcccgtcggccccccgggggcaccagccctcccaacggcggcctcccggggccgctggccacctctgcggctcctcccgggcctccagcggccgcctccccctgcctggggcctgtggccgctgccgggagcgggctccgccggggagccgaaggcatcttggcgccgcagccgccgccgccgcagcaacaccaggagaggccgggggcagccgccatcggcagcgccaggggacagagcacaggaaagggacccccacagtcacctgtgtttgaaggcgtctacaacaattccagaatgctgcatttccttacagctgttgtgggctccacttgtgatgtaaaggtgaaaaatggtaccacttatgagggtatcttcaagacgctaagctcaaagtttgaactagccgtggatgctgtgcaccggaaagcatctgagccagcaggtggccctcgtcgggaggacattgtggacaccatggtgtttaagccaagtgatgtcatgcttgttcacttccgaaatgttgacttcaactatgctactaaagacaagttcaccgattcagccattgccatgaactcgaaagtgaatggggaacacaaagagaaggtgcttcagcgctgggaggggggtgacagcaacagcgacgactatgacctcgagtctgacatgtccaatggatgggaccccaatgaaatgttcaagttcaatgaggagaactacggtgtgaagactacctatgatagcagtctttcttcttatacggtgcccttagaaaaggacaactcagaagagtttcgtcagcgagagctgcgtgcggcccagttggctcgagagattgaatcaagcccccagtaccgcctacggatcgccatggagaacgacgatgggcgcactgaagaggagaagcacagtgcagtccagcggcagggctcagggcgggagagccccagcttggcatccagggaggggaagtatatccctctgcctcaacgagtccgggaaggtccccggggaggagttcgatgcagcagctctcggggcggtcggcctggccttagctctttgccacctcgtggccctcaccatctggacaacagcagccctggcccaggttctgaggcccgtggtatcaatggaggcccttcccgcatgtccccaaaggcacaacggcctctgagaggtgccaagactctgtcttcgcccagtaataggccttctggagaaacttctgttccacctcctcctgcagtgggccggatgtatcccccgcgttctcccaagtctgctgcccctgccccaatctcagcttcctgtccagagcctcccatcggctcggcagtgccaacctcttcagcctccatccctgtgacctcatcagtctcagatcctggagtgggctccatttctccagcttctccaaagatctccctggcccccacagatgtaaaagaactctctaccaaggaacctgggagaactctggagccccaggagctggctcggatagctgggaaagtccctggtcttcagaatgaacagaaacgattccaactggaagaactgagaaagtttggggcccagtttaagcttcagcccagtagctcccctgagaacagcctggatccttttcctccccggatcttaaaggaggagcccaaaggaaaggagaaagaggttgatggtctgttgacttcagagcccatggggtctcccgtctcctccaagacagagtccgtatcggataaggaggacaaaccacccctggcaccatcaggaggcactgaggggccagagcagcccccaccaccttgtccaagccaaactggcagccccccggtgggcctcatcaagggagaagacaaagatgagggccctgttgctgaacaagtaaagaaatcaacgttgaaccctaatgctaaggagttcaatcctacaaagcctctgctgtctgtgaataaatccaccagtaccccaacttctccggggccccggactcattcaactccctccatcccggtgctgacagcaggccagagtgggctatacagcccccagtacatctcctacatacctcagatccacatgggaccagctgtgcaggcacctcagatgtatccatatcctgtatccaattcagtgcctgggcagcagggcaagtaccggggagcaaaaggctcccttcctccgcagcgctcggaccaacaccagccagcctcagccccgccgatgatgcaggccgccgcggctgctggcccgcctctggtggctgccacgccctattcttcctacatcccctacaaccctcagcagttcccaggccagccagccatgatgcagcccatggcccactacccctcacagccggtgtttgcccccatgcttcagagcaacccacgcatgctgacgtcgggcagccatccccaggccatcgtgtcatcctctacccctcagtacccttctgcagagcagcctaccccccaagccctttatgccactgttcaccagtcctacccacaccatgccacacagctccatgcccaccagccgcagccggctaccacgcctactggaagccagccgcagtcccagcatgcggcccccagtcctgtccagcatcaggcggggcaggccccacacttgggcagtggacagccacagcagaatctgtaccacccaggggccctgacaggcacgccgccctctctgccaccgggaccttctgcccagtcccctcagagcagcttcccccagccagccgctgtgtatgccatccaccaccagcagctgccccacggcttcaccaacatggcccatgttacccaggcccatgtccaaactggaatcacagcagccccgccccctcaccctggggctccccacccgccccaggtgatgctgctgcacccaccccagagtcatggggggcccccccaaggcgcggtgccccagagtggggtgcctgcactctcagcttccacaccctcaccctacccctacatcggacacccccaaggtgagcagcctggccaggcgcctggatttccaggaggagccgatgacaggattcttcaatctcatccctcccagcagctccccttccaccccccggggaactgaagattgtcctggccgcgacctgagacctccatgagtggagggaagagtgatctatgtctcttcccccagcagctcggaccactcccagccccccatccccccgttccccaggggagctggggaattcctgccaagcaccttgaatgggaggggcctcacagagggcagggccagggtccagcaggggtggggggttcctgctctgcccctgcccgtccccacccagtcttgccctcccatcctctcatctattcccccgctggagacggaagatcttttattttctattatttataacttcagacttgggccccctgttctttctttcccattaacttgagtgacctgtgtgagagacagacagatgccccacgaggatggctggacaaggacttttactttttattacataaaaatattaaaaaataaataaaaaaa

SEQ ID NO: 109330 - DNA, 559 bp, Homo sapiens
  Payload ID: 1476
  Gene Symbol: ATXN2L
  Gene Name: ataxin 2-like
  ENST ID: ENST00000569318
  CDS Start-End: 1-559
gacgtcgggcagccatccccaggccatcgtgtcatcctctacccctcagtacccttctgcagagcagcctaccccccaagccctttatgccactgttcaccagtcctacccacaccatgccacacagctccatgcccaccagccgcagccggctaccacgcctactggaagccagccgcagtcccagcatgcggcccccagtcctgtccaggcggggcaggccccacacttgggcagtggacagccacagcagaatctgtaccacccaggggccctgacaggcacgccgccctctctgccaccgggaccttctgcccagtcccctcagagcagcttcccccagccagccgctgtgtatgccatccaccaccagcagctgccccacggcttcaccaacatggcccatgttacccaggcccatgtccaaactggaatcacagcagccccgccccctcaccctggggctccccacccgccccaggtgatgctgctgcacccaccccagagtcatggggggcccccccaaggcgcggtgccccagagtggggtgcctgcactc

SEQ ID NO: 109331 - DNA, 2162 bp, Homo sapiens
  Payload ID: 1476
  Gene Symbol: ATXN2L
  Gene Name: ataxin 2-like
  ENST ID: ENST00000566946
  CDS Start-End: 1-1206
aataaatccaccagtaccccaacttctccggggccccggactcattcaactccctccatcccggtgctgacagcaggccagagtgggctatacagcccccagtacatctcctacatacctcagatccacatgggaccagctgtgcaggcacctcagatgtatccatatcctgtatccaattcagtgcctgggcagcagggcaagtaccggggagcaaaaggctcccttcctccgcagcgctcggaccaacaccagccagcctcagccccgccgatgatgcaggccgccgcggctgctggcccgcctctggtggctgccacgccctattcttcctacatcccctacaaccctcagcagttcccaggccagccagccatgatgcagcccatggcccactacccctcacagccggtgtttgcccccatgcttcagagcaacccacgcatgctgacgtcgggcagccatccccaggccatcgtgtcatcctctacccctcagtacccttctgcagagcagcctaccccccaagccctttatgccactgttcaccagtcctacccacaccatgccacacagctccatgcccaccagccgcagccggctaccacgcctactggaagccagccgcagtcccagcatgcggcccccagtcctgtccagcagcatcaggcggggcaggccccacacttgggcagtggacagccacagcagaatctgtaccacccaggggccctgacaggcacgccgccctctctgccaccgggaccttctgcccagtcccctcagagcagcttcccccagccagccgctgtgtatgccatccaccaccagcagctgccccacggcttcaccaacatggcccatgttacccaggcccatgtccaaactggaatcacagcagccccgccccctcaccctggggctccccacccgccccaggtgatgctgctgcacccaccccagagtcatggggggcccccccaaggcgcggtgccccagagtggggtgcctgcactctcagcttccacaccctcaccctacccctacatcggacacccccaaggtgagcagcctggccaggcgcctggatttccaggaggagccgatgacaggattcgtgagttctcattagctgggggaatttggcatggaagagctgaggggctgcaggtggggcaggatgcacgggttctgggtggggagtgaggggtcttggaggcagggctgtcccacagggcgcccgccgacctgcacctgtctgtgaagtatgtagggtgggcagaagccacagtcgccgccgccaggggcttgctcctggctctgtcctttgcttccctccgtcctcgctcagttgtgatccagcagcccccctccccactgcctccccagctctcagtgaccccgactgtctcctgacttagccgaggtaaggtcagtgcagcagacagggccagactggggtgtggggggctgagctgggcacatgagtgagggctctggcttactgggaaacagcgattgacctgtgcttctgacagcccccgagacaccttgaggaggccgctccttcccagacacacccccacgcccccactggacggcattggaggaagggacagctgcttgggttctaatgctcctgctctcttctctttcccctccaaccagttcaatctcatccctcccagcagctccccttccaccccccggggaactgaagattgtcctggccgcgacctgagacctccatgagtggagggaagagtgatctatgtctcttcccccagcagctcggaccactcccagccccccatccccccgttccccaggggagctggggaattcctgccaagcaccttgaatgggaggggcctcacagagggcagggccagggtccagcaggggtggggggttcctgctctgcccctgcccgtccccacccagtcttgccctcccatcctctcatctattcccccgctggagacggaagatcttttattttctattatttataacttcagacttgggccccctgttctttctttcccattaacttgagtgacctgtgtgagagacagacagatgccccacgaggatggctggacaaggacttttactttttattacataaaaatattaaaaaataaataaaaaaaataaaa

SEQ ID NO: 109332 - DNA, 770 bp, Homo sapiens
  Payload ID: 1476
  Gene Symbol: ATXN2L
  Gene Name: ataxin 2-like
  ENST ID: ENST00000564162
  CDS Start-End: 1-333
cagagcagcttcccccagccagccgctgtgtatgccatccaccaccagcagctgccccacggcttcaccaacatggcccatgttacccaggcccatgtccaaactggaatcacagcagccccgccccctcaccctggggctccccacccgccccaggtgatgctgctgcacccaccccagagtcatggggggcccccccaaggcgcggtgccccagagtggggtgcctgcactctcagcttccacaccctcaccctacccctacatcggacacccccaagcagctccccttccaccccccggggaactgaagattgtcctggccgcgacctgagacctccatgagtggagggaagagtgatctatgtctcttcccccagcagctcggaccactcccagccccccatccccccgttccccaggggagctggggaattcctgccaagcaccttgaatgggaggggcctcacagagggcagggccagggtccagcaggggtggggggttcctgctctgcccctgcccgtccccacccagtcttgccctcccatcctctcatctattcccccgctggagacggaagatcttttattttctattatttataacttcagacttgggccccctgttctttctttcccattaacttgagtgacctgtgtgagagacagacagatgccccacgaggatggctggacaaggacttttactttttattacataaaaatattaaaaaataaataaaaaaaataaaattttaaactaacttaa

SEQ ID NO: 109333 - DNA, 525 bp, Homo sapiens
  Payload ID: 1476
  Gene Symbol: ATXN2L
  Gene Name: ataxin 2-like
  ENST ID: ENST00000567024
  CDS Start-End: 1-35
cagctctcagtgaccccgactgtctcctgacttagccgagcagctccccttccaccccccggggaactgaagattgtcctggccgcgacctgagacctccatgagtggagggaagagtgatctatgtctcttcccccagcagctcggaccactcccagccccccatccccccgttccccaggggagctggggaattcctgccaagcaccttgaatgggaggggcctcacagagggcagggccagggtccagcaggggtggggggttcctgctctgcccctgcccgtccccacccagtcttgccctcccatcctctcatctattcccccgctggagacggaagatcttttattttctattatttataacttcagacttgggccccctgttctttctttcccattaacttgagtgacctgtgtgagagacagacagatgccccacgaggatggctggacaaggacttttactttttattacataaaaatattaaaaaataaataaaaaaaataaaattttaaactaa

SEQ ID NO: 109334 - DNA, 471 bp, Homo sapiens
  Payload ID: 1476
  Gene Symbol: ATXN2L
  Gene Name: ataxin 2-like
  ENST ID: ENST00000566007
  CDS Start-End: 1-386
agaatctgtaccacccaggggccctgacaggcacgccgccctctctgccaccgggaccttctgcccagtcccctcagagcagcttcccccagccagccgctgtgtatgccatccaccaccagcagctgccccacggcttcaccaacatggcccatgttacccaggcccatgtccaaactggaatcacagcagccccgccccctcaccctggggctccccacccgccccaggtgatgctgctgcacccaccccagagtcatggggggcccccccaaggcgcggtgccccagagtggggtgcctgcactctcagcttccacaccctcaccctacccctacatcggacacccccaagctctcagtgaccccgactgtctcctgacttagccgagctcggaccactcccagccccccatccccccgttccccaggggagctggggaattcctgccaagcaccttgaatgggaggg

SEQ ID NO: 109335 - DNA, 1933 bp, Homo sapiens
  Payload ID: 1476
  Gene Symbol: ATXN2L
  Gene Name: ataxin 2-like
  ENST ID: ENST00000562583
  CDS Start-End: 1-1203
aataaatccaccagtaccccaacttctccggggccccggactcattcaactccctccatcccggtgctgacagcaggccagagtgggctatacagcccccagtacatctcctacatacctcagatccacatgggaccagctgtgcaggcacctcagatgtatccatatcctgtatccaattcagtgcctgggcagcagggcaagtaccggggagcaaaaggctcccttcctccgcagcgctcggaccaacaccagccagcctcagccccgccgatgatgcaggccgccgcggctgctggcccgcctctggtggctgccacgccctattcttcctacatcccctacaaccctcagcagttcccaggccagccagccatgatgcagcccatggcccactacccctcacagccggtgtttgcccccatgcttcagagcaacccacgcatgctgacgtcgggcagccatccccaggccatcgtgtcatcctctacccctcagtacccttctgcagagcagcctaccccccaagccctttatgccactgttcaccagtcctacccacaccatgccacacagctccatgcccaccagccgcagccggctaccacgcctactggaagccagccgcagtcccagcatgcggcccccagtcctgtccagcatcaggcggggcaggccccacacttgggcagtggacagccacagcagaatctgtaccacccaggggccctgacaggcacgccgccctctctgccaccgggaccttctgcccagtcccctcagagcagcttcccccagccagccgctgtgtatgccatccaccaccagcagctgccccacggcttcaccaacatggcccatgttacccaggcccatgtccaaactggaatcacagcagccccgccccctcaccctggggctccccacccgccccaggtgatgctgctgcacccaccccagagtcatggggggcccccccaaggcgcggtgccccagagtggggtgcctgcactctcagcttccacaccctcaccctacccctacatcggacacccccaaggtgagcagcctggccaggcgcctggatttccaggaggagccgatgacaggattcgtgagttctcattagctgggggaatttggcatggaagagctgaggggctgcaggtggggcaggatgcacgggttctgggtggggagtgaggggtcttggaggcagggctgtcccacagggcgcccgccgacctgcacctgtctgtgaagtatgtagggtgggcagaagccacagtcgccgccgccaggggcttgctcctggctctgtcctttgcttccctccgtcctcgctcagttgtgatccagcagcccccctccccactgcctccccagctctcagtgaccccgactgtctcctgacttagccgagttcaatctcatccctcccagcagctccccttccaccccccggggaactgaagattgtcctggccgcgacctgagacctccatgagtggagggaagagtgatctatgtctcttcccccagcagctcggaccactcccagccccccatccccccgttccccaggggagctggggaattcctgccaagcaccttgaatgggaggggcctcacagagggcagggccagggtccagcaggggtggggggttcctgctctgcccctgcccgtccccacccagtcttgccctcccatcctctcatctattcccccgctggagacggaagatcttttattttctattatttataacttcagacttgggccccctgttctttctttcccattaacttgagtgacctgtgtgagagacagacagatgccccacgaggatggctggacaaggacttttactttttattacataaaaatattaaaaaataaataaaaaaaataaaattttaaactaacttaa

SEQ ID NO: 109336 - DNA, 1294 bp, Homo sapiens
  Payload ID: 1476
  Gene Symbol: ATXN2L
  Gene Name: ataxin 2-like
  ENST ID: ENST00000568266
  CDS Start-End: 287-1294
gcccccttcccgtacgtgcgcgtggatgctcggtctcatgacccgggcattcgcgcgccccgggaacacctagggcagggactagttcgtggaggggctcgtctggtggcagtgcatgagtagtggaggccctgctcagtttttcctgtgcgagtgtgtgtgtgttaatggaattaagagtggcagcacacgcaggcgcagtgggctctgatcgctggaggtgggggttcggaaagtcccgtgggttttagtgcgcaggcgcagaccgggcgaggcctcccggtggatggcttttgcggctgcgctgtcccccagccccgccagcggccccctcttcgccctcaaccgccggttacatcagccagcgacgagcagggttacctggcgattggtgatccccgcagagggacagagcacaggaaagggacccccacagtcacctgtgtttgaaggcgtctacaacaattccagaatgctgcatttccttacagctgttgtgggctccacttgtgatgtaaaggtgaaaaatggtaccacttatgagggtatcttcaagacgctaagctcaaagtttgaactagccgtggatgctgtgcaccggaaagcatctgagccagcaggtggccctcgtcgggaggacattgtggacaccatggtgtttaagccaagtgatgtcatgcttgttcacttccgaaatgttgacttcaactatgctactaaagacaagttcaccgattcagccattgccatgaactcgaaagtgaatggggaacacaaagagaaggtgcttcagcgctgggaggggggtgacagcaacagcgacgactatgacctcgagtctgacatgtccaatggatgggaccccaatgaaatgttcaagttcaatgaggagaactacggtgtgaagactacctatgatagcagtctttcttcttatacggtgcccttagaaaaggacaactcagaagagtttcgtcagcgagagctgcgtgcggcccagttggctcgagagattgaatcaagcccccagtaccgcctacggatcgccatggagaacgacgatgggcgcactgaagaggagaagcacagtgcagtccagcggcagggctcagggcgggagagccccagcttggcatccagggaggggaagtatatccctctgcctcaacgagtccgggaaggtccccggggaggagttcgatgcagcagctctcggggcggtcggcctggccttagctctttgccacctcgtggccctcaccatctggacaacagcagccctggcccaggttct

SEQ ID NO: 109337 - DNA, 552 bp, Homo sapiens
  Payload ID: 1476
  Gene Symbol: ATXN2L
  Gene Name: ataxin 2-like
  ENST ID: ENST00000564656
  CDS Start-End: 279-552
agccccgccagcggccccctcttcgccctcaaccgccggttacatcagccagcgacgagcagggttacctggcgattggtgatccccgcagagtgggtaacgggctgaatgagtcatgaggtcgaggggatggggtgtggaggggatacccctcctcccacagttttgaggcgtcaggctgctgaaaatgattgtcttttctgtttgggaggggacagagcacaggaaagggacccccacagtcacctgtgtttgaaggcgtctacaacaattccagaatgctgcatttccttacagctgttgtgggctccacttgtgatgtaaaggtgaaaaatggtaccacttatgagggtatcttcaagacgctaagctcaaagtttgaactagccgtggatgctgtgcaccggaaagcatctgagccagcaggtggccctcgtcgggaggacattgtggacaccatggtgtttaagccaagtgatgtcatgcttgttcacttccgaaatgttgacttcaactatgctactaaagacaagttcaccgattcagccattg

SEQ ID NO: 109338 - DNA, 3264 bp, Homo sapiens
  Payload ID: 1476
  Gene Symbol: ATXN2L
  Gene Name: ataxin 2-like
  ENST ID: ENST00000565971
  CDS Start-End: 1-654
ggctccacttgtgatgtaaaggtgaaaaatggtaccacttatgagggtatcttcaagacgctaagctcaaagtttgaactagccgtggatgctgtgcaccggaaagcatctgagccagcaggtggccctcgtcgggaggacattgtggacaccatggtgtttaagccaagtgatgtcatgcttgttcacttccgaaatgttgacttcaactatgctactaaagacaagttcaccgattcagccattgccatgaactcgaaagtgaatggggaacacaaagagaagaaaaggacaactcagaagagtttcgtcagcgagagctgcgtgcggcccagttggctcgagagattgaatcaagcccccagtaccgcctacggatcgccatggagaacgacgatgggcgcactgaagaggagaagcacagtgcagtccagcggcagggctcagggcgggagagccccagcttggcatccagggaggggaagtatatccctctgcctcaacgagtccgggaaggtccccggggaggagttcgatgcagcagctctcggggcggtcggcctggccttagctctttgccacctcgtggccctcaccatctggacaacagcagccctggcccaggttctgaggcccgtggtatcaatggagtaaaagaactctctaccaaggaacctgggagaactctggagccccaggagctggctcggatagctgggaaagcttcagcccagtagctcccctgagaacagcctggatccttttcctccccggatcttaaaggaggagcccaaaggaaaggagaaagaggttgatggtctgttgacttcagagcccatggggtctcccgtctcctccaagacagagtccgtatcggataaggaggacaaaccacccctggcaccatcaggaggcactgaggggccagagcagcccccaccaccttgtccaagccaaactggcagccccccggtgggcctcatcaagggagaagacaaagatgagggccctgttgctgaacaagtaaagaaatcaacgttgaaccctaatgctaaggagttcaatcctacaaagcctctgctgtctgtgaataaatccaccagtaccccaacttctccggggccccggactcattcaactccctccatcccggtgctgacagcaggccagagtgggctatacagcccccagtacatctcctacatacctcagatccacatgggaccagctgtgcaggcacctcagatgtatccatatcctgtatccaattcagtgcctgggcagcagggcaagtaccggggagcaaaaggctcccttcctccgcagcgctcggaccaacaccagccagcctcagccccgccgatgatgcaggccgccgcggctgctggcccgcctctggtggctgccacgccctattcttcctacatcccctacaaccctcagcagttcccaggccagccagccatgatgcagcccatggcccactacccctcacagccggtgtttgcccccatgcttcagagcaacccacgcatgctgacgtcgggcagccatccccaggccatcgtgtcatcctctacccctcagtacccttctgcagagcagcctaccccccaagccctttatgccactgttcaccagtcctacccacaccatgccacacagctccatgcccaccagccgcagccggctaccacgcctactggaagccagccgcagtcccagcatgcggcccccagtcctgtccagcatcaggcggggcaggccccacacttgggcagtggacagccacagcagaatctgtaccacccaggggccctgacaggcacgccgccctctctgccaccgggaccttctgcccagtcccctcagagcagcttcccccagccagccgctgtgtatgccatccaccaccagcagctgccccacggcttcaccaacatggcccatgttacccaggcccatgtccaaactggaatcacagcagccccgccccctcaccctggggctccccacccgccccaggtgatgctgctgcacccaccccagagtcatggggggcccccccaaggcgcggtgccccagagtggggtgcctgcactctcagcttccacaccctcaccctacccctacatcggacacccccaaggtgagcagcctggccaggcgcctggatttccaggaggagccgatgacaggattcgtgagttctcattagctgggggaatttggcatggaagagctgaggggctgcaggtggggcaggatgcacgggttctgggtggggagtgaggggtcttggaggcagggctgtcccacagggcgcccgccgacctgcacctgtctgtgaagtatgtagggtgggcagaagccacagtcgccgccgccaggggcttgctcctggctctgtcctttgcttccctccgtcctcgctcagttgtgatccagcagcccccctccccactgcctccccagctctcagtgaccccgactgtctcctgacttagccgaggtaaggtcagtgcagcagacagggccagactggggtgtggggggctgagctgggcacatgagtgagggctctggcttactgggaaacagcgattgacctgtgcttctgacagcccccgagacaccttgaggaggccgctccttcccagacacacccccacgcccccactggacggcattggaggaagggacagctgcttgggttctaatgctcctgctctcttctctttcccctccaaccagttcaatctcatccctcccagcagctccccttccaccccccggggaactgaagattgtcctggccgcgacctgagacctccatgagtggagggaagagtgatctatgtctcttcccccagcagctcggaccactcccagccccccatccccccgttccccaggggagctggggaattcctgccaagcaccttgaatgggaggggcctcacagagggcagggccagggtccagcaggggtggggggttcctgctctgcccctgcccgtccccacccagtcttgccctcccatcctctcatctattcccccgctggagacggaagatcttttattttctattatttataacttcagacttgggccccctgttctttctttcccattaacttgagtgacctgtgtgagagacagacagatgccccacgaggatggctggacaaggacttttactttttattacataaaaatattaaaaaataaataaaaaaaataaaattttaaactaacttaa

SEQ ID NO: 109339 - DNA, 3514 bp, Homo sapiens
  Payload ID: 1476
  Gene Symbol: ATXN2L
  Gene Name: ataxin 2-like
  ENST ID: ENST00000564304
  CDS Start-End: 166-3372
gcggtcttctctctccacccccgacaccgcggggctccccccgcccgcccacggcgggccccggctgcccgatccccctcgcttcccgcgctctccagcggggccccagccccggccccctctctccctcccttctctctaattccccttccggacgctgccatcatgttgaagcctcagccgctacaacagccctcccagccccagcagccgccccccacgcaacaggccgtggcccgtcggccccccgggggcaccagccctcccaacggcggcctcccggggccgctggccacctctgcggctcctcccgggcctccagcggccgcctccccctgcctggggcctgtggccgctgccgggagcgggctccgccggggagccgaaggcatcttggcgccgcagccgccgccgccgcagcaacaccaggagaggccgggggcagccgccatcggcagcgccaggggacagagcacaggaaagggacccccacagtcacctgtgtttgaaggcgtctacaacaattccagaatgctgcatttccttacagctgttgtgggctccacttgtgatgtaaaggtgaaaaatggtaccacttatgagggtatcttcaagacgctaagctcaaagtttgaactagccgtggatgctgtgcaccggaaagcatctgagccagcaggtggccctcgtcgggaggacattgtggacaccatggtgtttaagccaagtgatgtcatgcttgttcacttccgaaatgttgacttcaactatgctactaaagacaagttcaccgattcagccattgccatgaactcgaaagtgaatggggaacacaaagagaaggtgcttcagcgctgggaggggggtgacagcaacagcgacgactatgacctcgagtctgacatgtccaatggatgggaccccaatgaaatgttcaagttcaatgaggagaactacggtgtgaagactacctatgatagcagtctttcttcttatacggtgcccttagaaaaggacaactcagaagagtttcgtcagcgagagctgcgtgcggcccagttggctcgagagattgaatcaagcccccagtaccgcctacggatcgccatggagaacgacgatgggcgcactgaagaggagaagcacagtgcagtccagcggcagggctcagggcgggagagccccagcttggcatccagggaggggaagtatatccctctgcctcaacgagtccgggaaggtccccggggaggagttcgatgcagcagctctcggggcggtcggcctggccttagctctttgccacctcgtggccctcaccatctggacaacagcagccctggcccaggttctgaggcccgtggtatcaatggaggcccttcccgcatgtccccaaaggcacaacggcctctgagaggtgccaagactctgtcttcgcccagtaataggccttctggagaaacttctgttccacctcctcctgcagctcccccttttcttccagtgggccggatgtatcccccgcgttctcccaagtctgctgcccctgccccaatctcagcttcctgtccagagcctcccatcggctcggcagtgccaacctcttcagcctccatccctgtgacctcatcagtctcagatcctggagtgggctccatttctccagcttctccaaagatctccctggcccccacagatgtaaaagaactctctaccaaggaacctgggagaactctggagccccaggagctggctcggatagctgggaaagtccctggtcttcagaatgaacagaaacgattccaactggaagaactgagaaagtttggggcccagtttaagcttcagcccagtagctcccctgagaacagcctggatccttttcctccccggatcttaaaggaggagcccaaaggaaaggagaaagaggttgatggtctgttgacttcagagcccatggggtctcccgtctcctccaagacagagtccgtatcggataaggaggacaaaccacccctggcaccatcaggaggcactgaggggccagagcagcccccaccaccttgtccaagccaaactggcagccccccggtgggcctcatcaagggagaagacaaagatgagggccctgttgctgaacaagtaaagaaatcaacgttgaaccctaatgctaaggagttcaatcctacaaagcctctgctgtctgtgaataaatccaccagtaccccaacttctccggggccccggactcattcaactccctccatcccggtgctgacagcaggccagagtgggctatacagcccccagtacatctcctacatacctcagatccacatgggaccagctgtgcaggcacctcagatgtatccatatcctgtatccaattcagtgcctgggcagcagggcaagtaccggggagcaaaaggctcccttcctccgcagcgctcggaccaacaccagccagcctcagccccgccgatgatgcaggccgccgcggctgctggcccgcctctggtggctgccacgccctattcttcctacatcccctacaaccctcagcagttcccaggccagccagccatgatgcagcccatggcccactacccctcacagccggtgtttgcccccatgcttcagagcaacccacgcatgctgacgtcgggcagccatccccaggccatcgtgtcatcctctacccctcagtacccttctgcagagcagcctaccccccaagccctttatgccactgttcaccagtcctacccacaccatgccacacagctccatgcccaccagccgcagccggctaccacgcctactggaagccagccgcagtcccagcatgcggcccccagtcctgtccagcatcaggcggggcaggccccacacttgggcagtggacagccacagcagaatctgtaccacccaggggccctgacaggcacgccgccctctctgccaccgggaccttctgcccagtcccctcagagcagcttcccccagccagccgctgtgtatgccatccaccaccagcagctgccccacggcttcaccaacatggcccatgttacccaggcccatgtccaaactggaatcacagcagccccgccccctcaccctggggctccccacccgccccaggtgatgctgctgcacccaccccagagtcatggggggcccccccaaggcgcggtgccccagagtggggtgcctgcactctcagcttccacaccctcaccctacccctacatcggacacccccaaggtgagcagcctggccaggcgcctggatttccaggaggagccgatgacaggattcttcaatctcatccctcccagcagctccccttccaccccccggggaactgaagattgtcctggccgcgacctgagacctccatgagtggagggaagagtgatctatgtctcttcccccagcagctcggaccactcccagccccccatccccccgttccccaggggagctggggaattcctgccaagcaccttg

SEQ ID NO: 109340 - DNA, 1205 bp, Homo sapiens
  Payload ID: 1477
  Gene Symbol: ATXN3
  Gene Name: ataxin 3
  Uniprot ID: P54252
  ENST ID: ENST00000340660
  CDS Start-End: 59-979
ggggcggagctggagggggtggttcggcgtgggggccgttggctccagacaaataaacatggagtccatcttccacgagaaacagccttctggaaatatggatgacagtggttttttctctattcaggttataagcaatgccttgaaagtttggggtttagaactaatcctgttcaacagtccagagtatcagaggctcaggatcgatcctataaatgaaagatcatttatatgcaattataaggaacactggtttacagttagaaaattaggaaaacagtggtttaacttgaattctctcttgacgggtccagaattaatatcagatacatatcttgcacttttcttggctcaattacaacaggaaggttattctatatttgtcgttaagggtgatctgccagattgcgaagctgaccaactcctgcagatgattagggtccaacagatgcatcgaccaaaacttattggagaagaattagcacaactaaaagagcaaagagtccataaaacagacctggaacgagtgttagaagcaaatgatggctcaggaatgttagacgaagatgaggaggatttgcagagggctctggcactaagtcgccaagaaattgacatggaagatgaggaagcagatctccgcagggctattcagctaagtatgcaaggtagttccagaaacatatctcaagatatgacacagacatcaggtacaaatcttacttcagaagagcttcggaagagacgagaagcctactttgaaaaacagcagcaaaagcagcaacagcagcagcagcagcagcagcagggggacctatcaggacagagttcacatccatgtgaaaggccagccaccagttcaggagcacttgggagtgatctaggtgatgctatgagtgaagaagacatgcttcaggcagctgtgaccatgtctttagaaactgtcagaaatgatttgaaaacagaaggaaaaaaataatacctttaaaaaataatttagatattcatactttccaacattatcctgtgtgattacagcatagggtccactttggtaatgtgtcaaagagatgaggaaataagacttttagcggtttgcaaacaaaatgatgggaaagtggaacaatgcgtcggttgtaggactaaataatgatcttccaaatattagccaaagaggcattcagcaattaaagacatttaaaata

SEQ ID NO: 109341 - DNA, 2584 bp, Homo sapiens
  Payload ID: 1477
  Gene Symbol: ATXN3
  Gene Name: ataxin 3
  ENST ID: ENST00000359366
  CDS Start-End: 39-278
ggttcggcgtgggggccgttggctccagacaaataaacatggagtccatcttccacgagaaacaagaaggctcactttgtgctcaacattgcctgaataacttattgcaaggagaatattttagccctgtggaattatcctcaattgcacatcagctggatgaggaggagaggatgagaatggcagaaggaggagttactagtgaagattatcgcacgtttttacagcagccttctggaaatatggatgacagtggttttttctctattcagaaatgaaagatcatttatatgcaattataaggaacactggtttacagttagaaaattaggaaaacagtggtttaacttgaattctctcttgacgggtccagaattaatatcagatacatatcttgcacttttcttggctcaattacaacaggaaggttattctatatttgtcgttaagggtgatctgccagattgcgaagctgaccaactcctgcagatgattagggtccaacagatgcatcgaccaaaacttattggagaagaattagcacaactaaaagagcaaagagtccataaaacagacctggaacgagtgttagaagcaaatgatggctcaggaatgttagacgaagatgaggaggatttgcagagggctctggcactaagtcgccaagaaattgacatggaagatgaggaagcagatctccgcagggctattcagctaagtatgcaaggtagttccagaaacatatctcaagatatgacacagacatcaggtacaaatcttacttcagaagagcttcggaagagacgagaagcctactttgaaaaacagcagcaaaagcagcaacagcagcagcagcagcagcagcagggggacctatcaggacagagttcacatccatgtgaaaggccagccaccagttcaggagcacttgggagtgatctaggtgatgctatgagtgaagaagacatgcttcaggcagctgtgaccatgtctttagaaactgtcagaaatgatttgaaaacagaaggaaaaaaataatacctttaaaaaataatttagatattcatactttccaacattatcctgtgtgattacagcatagggtccactttggtaatgtgtcaaagagatgaggaaataagacttttagcggtttgcaaacaaaatgatgggaaagtggaacaatgcgtcggttgtaggactaaataatgatcttccaaatattagccaaagaggcattcagcaattaaagacatttaaaatagttttctaaatgtttctttttcttttttgagtgtgcaatatgtaacatgtctaaagttagggcatttttcttggatctttttgcagactagctaattagctctcgcctcaggctttttccatatagtttgttttctttttctgtcttgtaggtaagttggctcacatcatgtaatagtggctttcatttcttattaaccaaattaacctttcaggaaagtatctctactttcctgatgttgataatagtaatggttctagaaggatgaacagttctcccttcaactgtataccgtgtgctccagtgttttcttgtgttgttttctctgatcacaacttttctgctacctggttttcattattttcccacaattcttttgaaagatggtaatcttttctgaggtttagcgttttaagccctacgatgggatcattatttcatgactggtgcgttcctaaactctgaaatcagccttgcacaagtacttgagaataaatgagcattttttaaaatgtgtgagcatgtgctttcccagatgctttatgaatgtcttttcacttatatcaaaaccttacagctttgttgcaaccccttcttcctgcgccttattttttcctttcttctccaattgagaaaactaggagaagcatagtatgcaggcaagtctccttctgttagaagactaaacatacgtacccaccatgaatgtatgatacatgaaatttggccttcaattttaatagcagttttattttattttttctcctatgactggagctttgtgttctctttacagttgagtcatggaatgtaggtgtctgcttcacatcttttagtaggtatagcttgtcaaagatggtgatctggaacatgaaaataatttactaatgaaaatatgtttaaatttatactgtgatttgacacttgcatcatgtttagatagcttaagaacaatggaagtcacagtacttagtggatctataaataagaaagtccatagttttgataaatattctctttaattgagatgtacagagagtttcttgctgggtcaataggatagtatcattttggtgaaaaccatgtctctgaaattgatgttttagtttcagtgttccctatccctcattctccatctccttttgaagctcttttgaatgttgaattgttcataagctaaaatccaagaaatttcagctgacaacttcgaaaattataatatggtatattgccctcctggtgtgtggctgcacacattttatcagggaaagttttttgatctaggatttattgctaactaactgaaaagagaagaaaaaa

SEQ ID NO: 109342 - DNA, 6770 bp, Homo sapiens
  Payload ID: 1477
  Gene Symbol: ATXN3
  Gene Name: ataxin 3
  ENST ID: ENST00000393287
  CDS Start-End: 70-1002
gagaggggcagggggcggagctggagggggtggttcggcgtgggggccgttggctccagacaaataaacatggagtccatcttccacgagaaacaagaaggctcactttgtgctcaacattgcctgaataacttattgcaaggagaatattttagccctgtggaattatcctcaattgcacatcagctggatgaggaggagaggatgagaatggcagaaggaggagttactagtgaagattatcgcacgtttttacagcagccttctggaaatatggatgacagtggttttttctctattcagtggtttaacttgaattctctcttgacgggtccagaattaatatcagatacatatcttgcacttttcttggctcaattacaacaggaaggttattctatatttgtcgttaagggtgatctgccagattgcgaagctgaccaactcctgcagatgattagggtccaacagatgcatcgaccaaaacttattggagaagaattagcacaactaaaagagcaaagagtccataaaacagacctggaacgagtgttagaagcaaatgatggctcaggaatgttagacgaagatgaggaggatttgcagagggctctggcactaagtcgccaagaaattgacatggaagatgaggaagcagatctccgcagggctattcagctaagtatgcaaggtagttccagaaacatatctcaagatatgacacagacatcaggtacaaatcttacttcagaagagcttcggaagagacgagaagcctactttgaaaaacagcagcaaaagcagcaacagcagcagcagcagcagcagcagggggacctatcaggacagagttcacatccatgtgaaaggccagccaccagttcaggagcacttgggagtgatctaggtgatgctatgagtgaagaagacatgcttcaggcagctgtgaccatgtctttagaaactgtcagaaatgatttgaaaacagaaggaaaaaaataatacctttaaaaaataatttagatattcatactttccaacattatcctgtgtgattacagcatagggtccactttggtaatgtgtcaaagagatgaggaaataagacttttagcggtttgcaaacaaaatgatgggaaagtggaacaatgcgtcggttgtaggactaaataatgatcttccaaatattagccaaagaggcattcagcaattaaagacatttaaaatagttttctaaatgtttctttttcttttttgagtgtgcaatatgtaacatgtctaaagttagggcatttttcttggatctttttgcagactagctaattagctctcgcctcaggctttttccatatagtttgttttctttttctgtcttgtaggtaagttggctcacatcatgtaatagtggctttcatttcttattaaccaaattaacctttcaggaaagtatctctactttcctgatgttgataatagtaatggttctagaaggatgaacagttctcccttcaactgtataccgtgtgctccagtgttttcttgtgttgttttctctgatcacaacttttctgctacctggttttcattattttcccacaattcttttgaaagatggtaatcttttctgaggtttagcgttttaagccctacgatgggatcattatttcatgactggtgcgttcctaaactctgaaatcagccttgcacaagtacttgagaataaatgagcattttttaaaatgtgtgagcatgtgctttcccagatgctttatgaatgtcttttcacttatatcaaaaccttacagctttgttgcaaccccttcttcctgcgccttattttttcctttcttctccaattgagaaaactaggagaagcatagtatgcaggcaagtctccttctgttagaagactaaacatacgtacccaccatgaatgtatgatacatgaaatttggccttcaattttaatagcagttttattttattttttctcctatgactggagctttgtgttctctttacagttgagtcatggaatgtaggtgtctgcttcacatcttttagtaggtatagcttgtcaaagatggtgatctggaacatgaaaataatttactaatgaaaatatgtttaaatttatactgtgatttgacacttgcatcatgtttagatagcttaagaacaatggaagtcacagtacttagtggatctataaataagaaagtccatagttttgataaatattctctttaattgagatgtacagagagtttcttgctgggtcaataggatagtatcattttggtgaaaaccatgtctctgaaattgatgttttagtttcagtgttccctatccctcattctccatctccttttgaagctcttttgaatgttgaattgttcataagctaaaatccaagaaatttcagctgacaacttcgaaaattataatatggtatattgccctcctggtgtgtggctgcacacattttatcagggaaagttttttgatctaggatttattgctaactaactgaaaagagaagaaaaaatatcttttatttatgattataaaatagctttttcttcgatataacagattttttaagtcattattttgtgccaatcagttttctgaagtttcccttacacaaaaggatagctttattttaaaatctaaagtttcttttaatagttaaaaatgtttcagaagaattataaaactttaaaactgcaagggatgttggagtttagtactactccctcaagatttaaaaagctaaatattttaagactgaacatttatgttaattattaccagtgtgtttgtcatattttccatggatatttgttcattacctttttccattgaaaagttacattaaacttttcatacacttgaattgatgagctacctaatataaaaatgagaaaaccaatatgcattttaaagttttaactttagagtttataaagttcatatataccctagttaaagcacttaagaaaatatggcatgtttgacttttagttcctagagagtttttgtttttgtttttgtttttttttgagacggagtcttgctatgtctcccaggctggagggcagtggcatgatctcggctcactacaacttccacctcccgggttcaagcaattctcctgcctcagcctccagagtagctgggattacaggcgcccaccaccacacccggcagatttttgtatttttggtagagacgcggtttcatcatgtttggccaggctggtctcgaactcctgacctcaggtgatccgcctgccttggcctcccaaagtgttgggattacaggcatgagccactgcgcctggccagctagagagtttttaaagcagagctgagcacacactggatgcgtttgaatgtgtttgtgtagtttgttgtgaaattgttacatttagcaggcagatccagaagcactagtgaactgtcatcttggtggggttggcttaaatttaattgactgtttagattccatttcttaattgattggccagtatgaaaagatgccagtgcaagtaaccatagtatcaaaaaagttaaaaattattcaaagctatagtttatacatcaggtactgccatttactgtaaaccacctgcaagaaagtcaggaacaactaaattcacaagaactgtcctgctaagaagtgtattaaagatttccattttgttttactaattgggaacatcttaatgtttaatatttaaactattggtatcatttttctaatgtataatttgtattactgggatcaagtatgtacagtggtgatgctagtagaagtttaagccttggaaataccactttcatattttcagatgtcatggatttaatgagtaatttatgtttttaaaattcagaatagttaatctctgatctaaaaccatcaatctatgttttttacggtaatcatgtaaatatttcagtaatataaactgtttgaaaaggctgctgcaggtaaactctatactaggatcttggccaaataatttacaattcacagaatattttatttaaggtggtgctttttttttttgtccttaaaacttgatttttcttaactttattcatgatgccaaagtaaatgaggaaaaaaactcaaaaccagttgagtatcattgcagacaaaactaccagtagtccatattgtttaatattaagttgaataaaataaattttatttcagtcagagcctaaatcacattttgattgtctgaatttttgatactatttttaaaatcatgctagtggcggctgggcgtggtagctcacgcctgtaatcccagcattttgggaggccgaagtgggtggatcacgaggtcgggagttcgagaccagcttggccaaaatggtgaaaccccatctgtactaaaaactacaaaaattagctgggcgcggtggcaggtgcctgtaatcccagctacctgggagtctgaggcaggagaattgcttgaaccctggcgacagaggatgcagtgagccaagatggtgccactgtactccagactgggcgacagagtgagactctgtctcaaaaaaaaaaaaaaaatcatgctagtgccaagagctactaaattcttaaaaccggcccattggacctgtacagataaaaaatagattcagtgcataatcaaaatatgataattttaaaatcttaagtagaaaaataaatcttgatgttttaaattcttacgaggattcaatagttaatattgatgatctcccggctgggtgcagtggctcacgcctgtaatcccagcagttctggaggctgaggtgggcgaatcacttcaggccaggagttcaagaccagtctgggcaacatggtgaaacctcgtttctactaaaaatacaaaaattagccgggcgtggttgcacacacttgtaatcccagctactcaggaggctaagaatcgcatgagcctaggaggcagaggttgcagagtgccaagggctcaccactgcattccagcctgcccaacagagtgagacactgtttctgaaaaaaaaaaatatatatatatatatatatatgtgtgtatatatatatgtatatatatatgacttcctattaaaaactttatcccagtcgggggcagtggctcacgcctgtaatcccaacactttgggaggctgaggcaggtggatcacctgaagtccggagtttgagaccagcctggccaacatggtgaaaccccatctctactaaaaatacaaaacttaagccaggtatggtggcgggcacctgtaatcccagttacttgggaggctgaggcaggagaatcgtttaaacccaggaggtggaggttgcagtgagctgagatcgtgccattgcactctagcctgggcaacaagagtaaaactccatcttaaaggtttgtttgtttttttttaatccggaaacgaagaggcgttgggccgctattttctttttctttctttctttctttctttttttttttttctgagacggagtctagctctgctgcccaggctggagtacaatgacacgatgttggctcactgcaacctccacctcctgggttcaagcgattctcctgcctcagcctcccaagtacctgggattacaggcacctgccactacacctggcgaatatttgttttttttagtagagacgggcttttaccatgttaggctggtctcaaactcctgacctcaggtgatctgcctgccttggcctcccaaagtgctgggattacaggtgcaggccaccacacccggccttgggccactgttttcaaagtgaattgtttgttgtatcgagtccttaagtatggatatatatgtgaccctaattaagaactaccagattggatcaactaatcatgtcagcaatgtaaataactttatttttcatattcaaaataaaaactttcttttatttctggcccctttataaccagcatctttttgctttaaaaaatgacctggctttgtatttttttagtcttaaacataataaaaatatttttgttctaatttgctttcatgagtgaagattattgacatcgttggtaaattctagaattttgattttgttttttaatttgaagaaaatctttgctattattattttttccaagtggtctggcattttaagaattagtgctaataacgtaacttctaaatttgtcgtaattggcatgtttaatagcatatcaaaaaacattttaagcctgtggattcatagacaaagcaatgagaaacattagtaaaatataaatggatattcctgatgcatttaggaagctctcaattgtctcttgcatagttcaaggaatgttttctgaatttttttaatgctttttttttttttgaaagaggaaaacatacatttttaaatgtgattatctaatttttacaacactgggctattaggaataactttttaaaaattactgttctgtataaatatttgaaattcaagtacagaaaatatctgaaacaaaaagcattgttgtttggccatgatacaagtgcactgtggcagtgccgcttgctcaggacccagccctgcagcccttctgtgtgtgctccctcgttaagttcatttgctgttattacacacacaggccttcctgtctggtcgttagaaaagccgggcttccaaagcactgttgaacacaggattctgttgttagtgtggatgttcaatgagttgtattttaaatatcaaagattattaaataaagataatgtttgcttttcta

SEQ ID NO: 109343 - DNA, 6713 bp, Homo sapiens
  Payload ID: 1477
  Gene Symbol: ATXN3
  Gene Name: ataxin 3
  ENST ID: ENST00000429774
  CDS Start-End: 70-945
gagaggggcagggggcggagctggagggggtggttcggcgtgggggccgttggctccagacaaataaacatggagtccatcttccacgagaaagttataagcaatgccttgaaagtttggggtttagaactaatcctgttcaacagtccagagtatcagaggctcaggatcgatcctataaatgaaagatcatttatatgcaattataaggaacactggtttacagttagaaaattaggaaaacagtggtttaacttgaattctctcttgacgggtccagaattaatatcagatacatatcttgcacttttcttggctcaattacaacaggaaggttattctatatttgtcgttaagggtgatctgccagattgcgaagctgaccaactcctgcagatgattagggtccaacagatgcatcgaccaaaacttattggagaagaattagcacaactaaaagagcaaagagtccataaaacagacctggaacgagtgttagaagcaaatgatggctcaggaatgttagacgaagatgaggaggatttgcagagggctctggcactaagtcgccaagaaattgacatggaagatgaggaagcagatctccgcagggctattcagctaagtatgcaaggtagttccagaaacatatctcaagatatgacacagacatcaggtacaaatcttacttcagaagagcttcggaagagacgagaagcctactttgaaaaacagcagcaaaagcagcaacagcagcagcagcagcagcagcagggggacctatcaggacagagttcacatccatgtgaaaggccagccaccagttcaggagcacttgggagtgatctaggtgatgctatgagtgaagaagacatgcttcaggcagctgtgaccatgtctttagaaactgtcagaaatgatttgaaaacagaaggaaaaaaataatacctttaaaaaataatttagatattcatactttccaacattatcctgtgtgattacagcatagggtccactttggtaatgtgtcaaagagatgaggaaataagacttttagcggtttgcaaacaaaatgatgggaaagtggaacaatgcgtcggttgtaggactaaataatgatcttccaaatattagccaaagaggcattcagcaattaaagacatttaaaatagttttctaaatgtttctttttcttttttgagtgtgcaatatgtaacatgtctaaagttagggcatttttcttggatctttttgcagactagctaattagctctcgcctcaggctttttccatatagtttgttttctttttctgtcttgtaggtaagttggctcacatcatgtaatagtggctttcatttcttattaaccaaattaacctttcaggaaagtatctctactttcctgatgttgataatagtaatggttctagaaggatgaacagttctcccttcaactgtataccgtgtgctccagtgttttcttgtgttgttttctctgatcacaacttttctgctacctggttttcattattttcccacaattcttttgaaagatggtaatcttttctgaggtttagcgttttaagccctacgatgggatcattatttcatgactggtgcgttcctaaactctgaaatcagccttgcacaagtacttgagaataaatgagcattttttaaaatgtgtgagcatgtgctttcccagatgctttatgaatgtcttttcacttatatcaaaaccttacagctttgttgcaaccccttcttcctgcgccttattttttcctttcttctccaattgagaaaactaggagaagcatagtatgcaggcaagtctccttctgttagaagactaaacatacgtacccaccatgaatgtatgatacatgaaatttggccttcaattttaatagcagttttattttattttttctcctatgactggagctttgtgttctctttacagttgagtcatggaatgtaggtgtctgcttcacatcttttagtaggtatagcttgtcaaagatggtgatctggaacatgaaaataatttactaatgaaaatatgtttaaatttatactgtgatttgacacttgcatcatgtttagatagcttaagaacaatggaagtcacagtacttagtggatctataaataagaaagtccatagttttgataaatattctctttaattgagatgtacagagagtttcttgctgggtcaataggatagtatcattttggtgaaaaccatgtctctgaaattgatgttttagtttcagtgttccctatccctcattctccatctccttttgaagctcttttgaatgttgaattgttcataagctaaaatccaagaaatttcagctgacaacttcgaaaattataatatggtatattgccctcctggtgtgtggctgcacacattttatcagggaaagttttttgatctaggatttattgctaactaactgaaaagagaagaaaaaatatcttttatttatgattataaaatagctttttcttcgatataacagattttttaagtcattattttgtgccaatcagttttctgaagtttcccttacacaaaaggatagctttattttaaaatctaaagtttcttttaatagttaaaaatgtttcagaagaattataaaactttaaaactgcaagggatgttggagtttagtactactccctcaagatttaaaaagctaaatattttaagactgaacatttatgttaattattaccagtgtgtttgtcatattttccatggatatttgttcattacctttttccattgaaaagttacattaaacttttcatacacttgaattgatgagctacctaatataaaaatgagaaaaccaatatgcattttaaagttttaactttagagtttataaagttcatatataccctagttaaagcacttaagaaaatatggcatgtttgacttttagttcctagagagtttttgtttttgtttttgtttttttttgagacggagtcttgctatgtctcccaggctggagggcagtggcatgatctcggctcactacaacttccacctcccgggttcaagcaattctcctgcctcagcctccagagtagctgggattacaggcgcccaccaccacacccggcagatttttgtatttttggtagagacgcggtttcatcatgtttggccaggctggtctcgaactcctgacctcaggtgatccgcctgccttggcctcccaaagtgttgggattacaggcatgagccactgcgcctggccagctagagagtttttaaagcagagctgagcacacactggatgcgtttgaatgtgtttgtgtagtttgttgtgaaattgttacatttagcaggcagatccagaagcactagtgaactgtcatcttggtggggttggcttaaatttaattgactgtttagattccatttcttaattgattggccagtatgaaaagatgccagtgcaagtaaccatagtatcaaaaaagttaaaaattattcaaagctatagtttatacatcaggtactgccatttactgtaaaccacctgcaagaaagtcaggaacaactaaattcacaagaactgtcctgctaagaagtgtattaaagatttccattttgttttactaattgggaacatcttaatgtttaatatttaaactattggtatcatttttctaatgtataatttgtattactgggatcaagtatgtacagtggtgatgctagtagaagtttaagccttggaaataccactttcatattttcagatgtcatggatttaatgagtaatttatgtttttaaaattcagaatagttaatctctgatctaaaaccatcaatctatgttttttacggtaatcatgtaaatatttcagtaatataaactgtttgaaaaggctgctgcaggtaaactctatactaggatcttggccaaataatttacaattcacagaatattttatttaaggtggtgctttttttttttgtccttaaaacttgatttttcttaactttattcatgatgccaaagtaaatgaggaaaaaaactcaaaaccagttgagtatcattgcagacaaaactaccagtagtccatattgtttaatattaagttgaataaaataaattttatttcagtcagagcctaaatcacattttgattgtctgaatttttgatactatttttaaaatcatgctagtggcggctgggcgtggtagctcacgcctgtaatcccagcattttgggaggccgaagtgggtggatcacgaggtcgggagttcgagaccagcttggccaaaatggtgaaaccccatctgtactaaaaactacaaaaattagctgggcgcggtggcaggtgcctgtaatcccagctacctgggagtctgaggcaggagaattgcttgaaccctggcgacagaggatgcagtgagccaagatggtgccactgtactccagactgggcgacagagtgagactctgtctcaaaaaaaaaaaaaaaatcatgctagtgccaagagctactaaattcttaaaaccggcccattggacctgtacagataaaaaatagattcagtgcataatcaaaatatgataattttaaaatcttaagtagaaaaataaatcttgatgttttaaattcttacgaggattcaatagttaatattgatgatctcccggctgggtgcagtggctcacgcctgtaatcccagcagttctggaggctgaggtgggcgaatcacttcaggccaggagttcaagaccagtctgggcaacatggtgaaacctcgtttctactaaaaatacaaaaattagccgggcgtggttgcacacacttgtaatcccagctactcaggaggctaagaatcgcatgagcctaggaggcagaggttgcagagtgccaagggctcaccactgcattccagcctgcccaacagagtgagacactgtttctgaaaaaaaaaaatatatatatatatatatatatgtgtgtatatatatatgtatatatatatgacttcctattaaaaactttatcccagtcgggggcagtggctcacgcctgtaatcccaacactttgggaggctgaggcaggtggatcacctgaagtccggagtttgagaccagcctggccaacatggtgaaaccccatctctactaaaaatacaaaacttaagccaggtatggtggcgggcacctgtaatcccagttacttgggaggctgaggcaggagaatcgtttaaacccaggaggtggaggttgcagtgagctgagatcgtgccattgcactctagcctgggcaacaagagtaaaactccatcttaaaggtttgtttgtttttttttaatccggaaacgaagaggcgttgggccgctattttctttttctttctttctttctttctttttttttttttctgagacggagtctagctctgctgcccaggctggagtacaatgacacgatgttggctcactgcaacctccacctcctgggttcaagcgattctcctgcctcagcctcccaagtacctgggattacaggcacctgccactacacctggcgaatatttgttttttttagtagagacgggcttttaccatgttaggctggtctcaaactcctgacctcaggtgatctgcctgccttggcctcccaaagtgctgggattacaggtgcaggccaccacacccggccttgggccactgttttcaaagtgaattgtttgttgtatcgagtccttaagtatggatatatatgtgaccctaattaagaactaccagattggatcaactaatcatgtcagcaatgtaaataactttatttttcatattcaaaataaaaactttcttttatttctggcccctttataaccagcatctttttgctttaaaaaatgacctggctttgtatttttttagtcttaaacataataaaaatatttttgttctaatttgctttcatgagtgaagattattgacatcgttggtaaattctagaattttgattttgttttttaatttgaagaaaatctttgctattattattttttccaagtggtctggcattttaagaattagtgctaataacgtaacttctaaatttgtcgtaattggcatgtttaatagcatatcaaaaaacattttaagcctgtggattcatagacaaagcaatgagaaacattagtaaaatataaatggatattcctgatgcatttaggaagctctcaattgtctcttgcatagttcaaggaatgttttctgaatttttttaatgctttttttttttttgaaagaggaaaacatacatttttaaatgtgattatctaatttttacaacactgggctattaggaataactttttaaaaattactgttctgtataaatatttgaaattcaagtacagaaaatatctgaaacaaaaagcattgttgtttggccatgatacaagtgcactgtggcagtgccgcttgctcaggacccagccctgcagcccttctgtgtgtgctccctcgttaagttcatttgctgttattacacacacaggccttcctgtctggtcgttagaaaagccgggcttccaaagcactgttgaacacaggattctgttgttagtgtggatgttcaatgagttgtattttaaatatcaaagattattaaataaagataatgtttgcttttcta

SEQ ID NO: 109344 - DNA, 619 bp, Homo sapiens
  Payload ID: 1477
  Gene Symbol: ATXN3
  Gene Name: ataxin 3
  ENST ID: ENST00000515746
  CDS Start-End: 12-311
gacaaataaacatggagtccatcttccacgagaaacaagaaggctcactttgtgctcaacattgcctgaataacttattgcaaggagaatattttagccctgtggaattatcctcaattgcacatcagctggatgaggaggagaggatgagaatggcagaaggaggagttactagtgaagattatcgcacgtttttacagcagccttctggaaatatggatgacagtggttttttctctattcaggttattctatatttgtcgttaagggtgatctgccagattgcgaagctgaccaactcctgcagatgattagggtccaacagatgcatcgaccaaaacttattggagaagaattagcacaactaaaagagcaaagagtccataaaacagacctggaacgagtgttagaagcaaatgatggctcaggaatgttagacgaagatgaggaggatttgcagagggctctggcactaagtcgccaagaaattgacatggaagatgaggaagcagatctccgcagggctattcagctaagtatgcaaggtagttccagaaacatatctcaagatatgacacagacatcaggtacaaatcttacttcagaagagcttcggaag

SEQ ID NO: 109345 - DNA, 1259 bp, Homo sapiens
  Payload ID: 1477
  Gene Symbol: ATXN3
  Gene Name: ataxin 3
  Uniprot ID: P54252
  ENST ID: ENST00000502250
  CDS Start-End: 272-820
gtgggggccgttggctccagacaaataaacatggagtccatcttccacgagaaaaaatgaaagatcatttatatgcaattataaggaacactggtttacagttagaaaattaggaaaacagtggtttaacttgaattctctcttgacgggtccagaattaatatcagatacatatcttgcacttttcttggctcaattacaacaggaaggttattctatatttgtcgttaagggtgatctgccagattgcgaagctgaccaactcctgcagatgattagggtccaacagatgcatcgaccaaaacttattggagaagaattagcacaactaaaagagcaaagagtccataaaacagacctggaacgagtgttagaagcaaatgatggctcaggaatgttagacgaagatgaggaggatttgcagagggctctggcactaagtcgccaagaaattgacatggaagatgaggaagcagatctccgcagggctattcagctaagtatgcaaggtagttccagaaacatatctcaagatatgacacagacatcaggtacaaatcttacttcagaagagcttcggaagagacgagaagcctactttgaaaaacagcagcaaaagcagcaacagcagcagcagcagcagcagcagggggacctatcaggacagagttcacatccatgtgaaaggccagccaccagttcaggagcacttgggagtgatctaggtgatgctatgagtgaagaagacatgcttcaggcagctgtgaccatgtctttagaaactgtcagaaatgatttgaaaacagaaggaaaaaaataatacctttaaaaaataatttagatattcatactttccaacattatcctgtgtgattacagcatagggtccactttggtaatgtgtcaaagagatgaggaaataagacttttagcggtttgcaaacaaaatgatgggaaagtggaacaatgcgtcggttgtaggactaaataatgatcttccaaatattagccaaagaggcattcagcaattaaagacatttaaaatagttttctaaatgtttctttttcttttttgagtgtgcaatatgtaacatgtctaaagttagggcatttttcttggatctttttgcagactagctaattagctctcgcctcaggctttttccatatagtttgttttctttttctgtcttgtaggtaagttggctcacatcatgtaatagtggctttcatttcttattaaccaaattaacctttca

SEQ ID NO: 109346 - DNA, 1315 bp, Homo sapiens
  Payload ID: 1477
  Gene Symbol: ATXN3
  Gene Name: ataxin 3
  Uniprot ID: P54252
  ENST ID: ENST00000503767
  CDS Start-End: 49-1089
tggagggggtggttcggcgtgggggccgttggctccagacaaataaacatggagtccatcttccacgagaaacaagaaggctcactttgtgctcaacattgcctgaataacttattgcaaggagaatattttagccctgtggaattatcctcaattgcacatcagctggatgaggaggagaggatgagaatggcagaaggaggagttactagtgaagattatcgcacgtttttacaggttataagcaatgccttgaaagtttggggtttagaactaatcctgttcaacagtccagagtatcagaggctcaggatcgatcctataaatgaaagatcatttatatgcaattataaggaacactggtttacagttagaaaattaggaaaacagtggtttaacttgaattctctcttgacgggtccagaattaatatcagatacatatcttgcacttttcttggctcaattacaacaggaaggttattctatatttgtcgttaagggtgatctgccagattgcgaagctgaccaactcctgcagatgattagggtccaacagatgcatcgaccaaaacttattggagaagaattagcacaactaaaagagcaaagagtccataaaacagacctggaacgagtgttagaagcaaatgatggctcaggaatgttagacgaagatgaggaggatttgcagagggctctggcactaagtcgccaagaaattgacatggaagatgaggaagcagatctccgcagggctattcagctaagtatgcaaggtagttccagaaacatatctcaagatatgacacagacatcaggtacaaatcttacttcagaagagcttcggaagagacgagaagcctactttgaaaaacagcagcaaaagcagcaacagcagcagcagcagcagcagcagggggacctatcaggacagagttcacatccatgtgaaaggccagccaccagttcaggagcacttgggagtgatctaggtgatgctatgagtgaagaagacatgcttcaggcagctgtgaccatgtctttagaaactgtcagaaatgatttgaaaacagaaggaaaaaaataatacctttaaaaaataatttagatattcatactttccaacattatcctgtgtgattacagcatagggtccactttggtaatgtgtcaaagagatgaggaaataagacttttagcggtttgcaaacaaaatgatgggaaagtggaacaatgcgtcggttgtaggactaaataatgatcttccaaatattagccaaagaggcattcagcaattaaagacatttaaaata

SEQ ID NO: 109347 - DNA, 637 bp, Homo sapiens
  Payload ID: 1477
  Gene Symbol: ATXN3
  Gene Name: ataxin 3
  ENST ID: ENST00000506466
  CDS Start-End: 22-637
gttggctccagacaaataaacatggagtccatcttccacgagaaacaagaaggctcactttgtgctcaacattgcctgaataacttattgcaaggagaatattttagccctgtggaattatcctcaattgcacatcagctggatgaggaggagaggatgagaatggcagaaggaggagttactagtgaagattatcgcacgtttttacagtggtttaacttgaattctctcttgacgggtccagaattaatatcagatacatatcttgcacttttcttggctcaattacaacaggaaggttattctatatttgtcgttaagggtgatctgccagattgcgaagctgaccaactcctgcagatgattagggtccaacagatgcatcgaccaaaacttattggagaagaattagcacaactaaaagagcaaagagtccataaaacagacctggaacgagtgttagaagcaaatgatggctcaggaatgttagacgaagatgaggaggatttgcagagggctctggcactaagtcgccaagaaattgacatggaagatgaggaagcagatctccgcagggctattcagctaagtatgcaaggtagttccagaaacatatctcaagatatgacacagacat

SEQ ID NO: 109348 - DNA, 1191 bp, Homo sapiens
  Payload ID: 1477
  Gene Symbol: ATXN3
  Gene Name: ataxin 3
  Uniprot ID: P54252
  ENST ID: ENST00000532032
  CDS Start-End: 11-1105
acaaataaacatggagtccatcttccacgagaaacaagaaggctcactttgtgctcaacattgcctgaataacttattgcaaggagaatattttagccctgtggaattatcctcaattgcacatcagctggatgaggaggagaggatgagaatggcagaaggaggagttactagtgaagattatcgcacgtttttacagcagccttctggaaatatggatgacagtggttttttctctattcaggttataagcaatgccttgaaagtttggggtttagaactaatcctgttcaacagtccagagtatcagaggctcaggatcgatcctataaatgaaagatcatttatatgcaattataaggaacactggtttacagttagaaaattaggaaaacagtggtttaacttgaattctctcttgacgggtccagaattaatatcagatacatatcttgcacttttcttggctcaattacaacaggaaggttattctatatttgtcgttaagggtgatctgccagattgcgaagctgaccaactcctgcagatgattagggtccaacagatgcatcgaccaaaacttattggagaagaattagcacaactaaaagagcaaagagtccataaaacagacctggaacgagtgttagaagcaaatgatggctcaggaatgttagacgaagatgaggaggatttgcagagggctctggcactaagtcgccaagaaattgacatggaagatgaggaagcagatctccgcagggctattcagctaagtatgcaaggtagttccagaaacatatctcaagatatgacacagacatcaggtacaaatcttacttcagaagagcttcggaagagacgagaagcctactttgaaaaacagcagcaaaagcagcaacagcagcagcagcagcagcagcagggggacctatcaggacagagttcacatccatgtgaaaggccagccaccagttcaggagcacttgggagtgatctaggtaaggcctgctcaccattcatcatgttcgctaccttcacactttatctgacatacgagctccatgtgatttttgctttacattattcttcattccctctttaatcatattaagaatcttaagtaaatttgtaatctactaaatttccctggattaaggagcagttaccaaaagaaaaaaaaaaaaaaaa

SEQ ID NO: 109349 - DNA, 6950 bp, Homo sapiens
  Payload ID: 1477
  Gene Symbol: ATXN3
  Gene Name: ataxin 3
  ENST ID: ENST00000545170
  CDS Start-End: 70-1182
gagaggggcagggggcggagctggagggggtggttcggcgtgggggccgttggctccagacaaataaacatggagtccatcttccacgagaaacaagaaggctcactttgtgctcaacattgcctgaataacttattgcaaggagaatattttagccctgtggaattatcctcaattgcacatcagctggatgaggaggagaggatgagaatggcagaaggaggagttactagtgaagattatcgcacgtttttacagcagccttctggaaatatggatgacagtggttttttctctattcaggttataagcaatgccttgaaagtttggggtttagaactaatcctgttcaacagtccagagtatcagaggctcaggatcgatcctataaatgaaagatcatttatatgcaattataaggaacactggtttacagttagaaaattaggaaaacagtggtttaacttgaattctctcttgacgggtccagaattaatatcagatacatatcttgcacttttcttggctcaattacaacaggaaggttattctatatttgtcgttaagggtgatctgccagattgcgaagctgaccaactcctgcagatgattagggtccaacagatgcatcgaccaaaacttattggagaagaattagcacaactaaaagagcaaagagtccataaaacagacctggaacgagtgttagaagcaaatgatggctcaggaatgttagacgaagatgaggaggatttgcagagggctctggcactaagtcgccaagaaattgacatggaagatgaggaagcagatctccgcagggctattcagctaagtatgcaaggtagttccagaaacatatctcaagatatgacacagacatcaggtacaaatcttacttcagaagagcttcggaagagacgagaagcctactttgaaaaagtgagactccgtctccaaaaatatatacagcagcaaaagcagcaacagcagcagcagcagcagcagcagggggacctatcaggacagagttcacatccatgtgaaaggccagccaccagttcaggagcacttgggagtgatctaggtgatgctatgagtgaagaagacatgcttcaggcagctgtgaccatgtctttagaaactgtcagaaatgatttgaaaacagaaggaaaaaaataatacctttaaaaaataatttagatattcatactttccaacattatcctgtgtgattacagcatagggtccactttggtaatgtgtcaaagagatgaggaaataagacttttagcggtttgcaaacaaaatgatgggaaagtggaacaatgcgtcggttgtaggactaaataatgatcttccaaatattagccaaagaggcattcagcaattaaagacatttaaaatagttttctaaatgtttctttttcttttttgagtgtgcaatatgtaacatgtctaaagttagggcatttttcttggatctttttgcagactagctaattagctctcgcctcaggctttttccatatagtttgttttctttttctgtcttgtaggtaagttggctcacatcatgtaatagtggctttcatttcttattaaccaaattaacctttcaggaaagtatctctactttcctgatgttgataatagtaatggttctagaaggatgaacagttctcccttcaactgtataccgtgtgctccagtgttttcttgtgttgttttctctgatcacaacttttctgctacctggttttcattattttcccacaattcttttgaaagatggtaatcttttctgaggtttagcgttttaagccctacgatgggatcattatttcatgactggtgcgttcctaaactctgaaatcagccttgcacaagtacttgagaataaatgagcattttttaaaatgtgtgagcatgtgctttcccagatgctttatgaatgtcttttcacttatatcaaaaccttacagctttgttgcaaccccttcttcctgcgccttattttttcctttcttctccaattgagaaaactaggagaagcatagtatgcaggcaagtctccttctgttagaagactaaacatacgtacccaccatgaatgtatgatacatgaaatttggccttcaattttaatagcagttttattttattttttctcctatgactggagctttgtgttctctttacagttgagtcatggaatgtaggtgtctgcttcacatcttttagtaggtatagcttgtcaaagatggtgatctggaacatgaaaataatttactaatgaaaatatgtttaaatttatactgtgatttgacacttgcatcatgtttagatagcttaagaacaatggaagtcacagtacttagtggatctataaataagaaagtccatagttttgataaatattctctttaattgagatgtacagagagtttcttgctgggtcaataggatagtatcattttggtgaaaaccatgtctctgaaattgatgttttagtttcagtgttccctatccctcattctccatctccttttgaagctcttttgaatgttgaattgttcataagctaaaatccaagaaatttcagctgacaacttcgaaaattataatatggtatattgccctcctggtgtgtggctgcacacattttatcagggaaagttttttgatctaggatttattgctaactaactgaaaagagaagaaaaaatatcttttatttatgattataaaatagctttttcttcgatataacagattttttaagtcattattttgtgccaatcagttttctgaagtttcccttacacaaaaggatagctttattttaaaatctaaagtttcttttaatagttaaaaatgtttcagaagaattataaaactttaaaactgcaagggatgttggagtttagtactactccctcaagatttaaaaagctaaatattttaagactgaacatttatgttaattattaccagtgtgtttgtcatattttccatggatatttgttcattacctttttccattgaaaagttacattaaacttttcatacacttgaattgatgagctacctaatataaaaatgagaaaaccaatatgcattttaaagttttaactttagagtttataaagttcatatataccctagttaaagcacttaagaaaatatggcatgtttgacttttagttcctagagagtttttgtttttgtttttgtttttttttgagacggagtcttgctatgtctcccaggctggagggcagtggcatgatctcggctcactacaacttccacctcccgggttcaagcaattctcctgcctcagcctccagagtagctgggattacaggcgcccaccaccacacccggcagatttttgtatttttggtagagacgcggtttcatcatgtttggccaggctggtctcgaactcctgacctcaggtgatccgcctgccttggcctcccaaagtgttgggattacaggcatgagccactgcgcctggccagctagagagtttttaaagcagagctgagcacacactggatgcgtttgaatgtgtttgtgtagtttgttgtgaaattgttacatttagcaggcagatccagaagcactagtgaactgtcatcttggtggggttggcttaaatttaattgactgtttagattccatttcttaattgattggccagtatgaaaagatgccagtgcaagtaaccatagtatcaaaaaagttaaaaattattcaaagctatagtttatacatcaggtactgccatttactgtaaaccacctgcaagaaagtcaggaacaactaaattcacaagaactgtcctgctaagaagtgtattaaagatttccattttgttttactaattgggaacatcttaatgtttaatatttaaactattggtatcatttttctaatgtataatttgtattactgggatcaagtatgtacagtggtgatgctagtagaagtttaagccttggaaataccactttcatattttcagatgtcatggatttaatgagtaatttatgtttttaaaattcagaatagttaatctctgatctaaaaccatcaatctatgttttttacggtaatcatgtaaatatttcagtaatataaactgtttgaaaaggctgctgcaggtaaactctatactaggatcttggccaaataatttacaattcacagaatattttatttaaggtggtgctttttttttttgtccttaaaacttgatttttcttaactttattcatgatgccaaagtaaatgaggaaaaaaactcaaaaccagttgagtatcattgcagacaaaactaccagtagtccatattgtttaatattaagttgaataaaataaattttatttcagtcagagcctaaatcacattttgattgtctgaatttttgatactatttttaaaatcatgctagtggcggctgggcgtggtagctcacgcctgtaatcccagcattttgggaggccgaagtgggtggatcacgaggtcgggagttcgagaccagcttggccaaaatggtgaaaccccatctgtactaaaaactacaaaaattagctgggcgcggtggcaggtgcctgtaatcccagctacctgggagtctgaggcaggagaattgcttgaaccctggcgacagaggatgcagtgagccaagatggtgccactgtactccagactgggcgacagagtgagactctgtctcaaaaaaaaaaaaaaaatcatgctagtgccaagagctactaaattcttaaaaccggcccattggacctgtacagataaaaaatagattcagtgcataatcaaaatatgataattttaaaatcttaagtagaaaaataaatcttgatgttttaaattcttacgaggattcaatagttaatattgatgatctcccggctgggtgcagtggctcacgcctgtaatcccagcagttctggaggctgaggtgggcgaatcacttcaggccaggagttcaagaccagtctgggcaacatggtgaaacctcgtttctactaaaaatacaaaaattagccgggcgtggttgcacacacttgtaatcccagctactcaggaggctaagaatcgcatgagcctaggaggcagaggttgcagagtgccaagggctcaccactgcattccagcctgcccaacagagtgagacactgtttctgaaaaaaaaaaatatatatatatatatatatatgtgtgtatatatatatgtatatatatatgacttcctattaaaaactttatcccagtcgggggcagtggctcacgcctgtaatcccaacactttgggaggctgaggcaggtggatcacctgaagtccggagtttgagaccagcctggccaacatggtgaaaccccatctctactaaaaatacaaaacttaagccaggtatggtggcgggcacctgtaatcccagttacttgggaggctgaggcaggagaatcgtttaaacccaggaggtggaggttgcagtgagctgagatcgtgccattgcactctagcctgggcaacaagagtaaaactccatcttaaaggtttgtttgtttttttttaatccggaaacgaagaggcgttgggccgctattttctttttctttctttctttctttctttttttttttttctgagacggagtctagctctgctgcccaggctggagtacaatgacacgatgttggctcactgcaacctccacctcctgggttcaagcgattctcctgcctcagcctcccaagtacctgggattacaggcacctgccactacacctggcgaatatttgttttttttagtagagacgggcttttaccatgttaggctggtctcaaactcctgacctcaggtgatctgcctgccttggcctcccaaagtgctgggattacaggtgcaggccaccacacccggccttgggccactgttttcaaagtgaattgtttgttgtatcgagtccttaagtatggatatatatgtgaccctaattaagaactaccagattggatcaactaatcatgtcagcaatgtaaataactttatttttcatattcaaaataaaaactttcttttatttctggcccctttataaccagcatctttttgctttaaaaaatgacctggctttgtatttttttagtcttaaacataataaaaatatttttgttctaatttgctttcatgagtgaagattattgacatcgttggtaaattctagaattttgattttgttttttaatttgaagaaaatctttgctattattattttttccaagtggtctggcattttaagaattagtgctaataacgtaacttctaaatttgtcgtaattggcatgtttaatagcatatcaaaaaacattttaagcctgtggattcatagacaaagcaatgagaaacattagtaaaatataaatggatattcctgatgcatttaggaagctctcaattgtctcttgcatagttcaaggaatgttttctgaatttttttaatgctttttttttttttgaaagaggaaaacatacatttttaaatgtgattatctaatttttacaacactgggctattaggaataactttttaaaaattactgttctgtataaatatttgaaattcaagtacagaaaatatctgaaacaaaaagcattgttgtttggccatgatacaagtgcactgtggcagtgccgcttgctcaggacccagccctgcagcccttctgtgtgtgctccctcgttaagttcatttgctgttattacacacacaggccttcctgtctggtcgttagaaaagccgggcttccaaagcactgttgaacacaggattctgttgttagtgtggatgttcaatgagttgtattttaaatatcaaagattattaaataaagataatgtttgcttttcta

SEQ ID NO: 109350 - DNA, 660 bp, Homo sapiens
  Payload ID: 1477
  Gene Symbol: ATXN3
  Gene Name: ataxin 3
  ENST ID: ENST00000556082
  CDS Start-End: 23-262
cgttggctccagacaaataaacatggagtccatcttccacgagaaacaagaaggctcactttgtgctcaacattgcctgaataacttattgcaaggagaatattttagccctgtggaattatcctcaattgcacatcagctggatgaggaggagaggatgagaatggcagaaggaggagttactagtgaagattatcgcacgtttttacagcagccttctggaaatatggatgacagtggttttttctctattcagaaatgaaagatcatttatatgcaattataaggaacactggtttacagttagaaaattaggaaaacagtggtttaacttgaattctctcttgacgggtccagaattaatatcagatacatatcttgcacttttcttggctcaattacaacaggaaggttattctatatttgtcgttaagggtgatctgccagattgcgaagctgaccaactcctgcagatgattagggtccaacagatgcatcgaccaaaacttattggagaagaattagcacaactaaaagagcaaagacagcagcaaaagcagcaacagcagcagcagcagcagcagcagggggacctatcaggacagagttcacatccatgtgaaaggccagccaccagttcaggagcacttgggagtgatc

SEQ ID NO: 109351 - DNA, 901 bp, Homo sapiens
  Payload ID: 1477
  Gene Symbol: ATXN3
  Gene Name: ataxin 3
  ENST ID: ENST00000556288
  CDS Start-End: 23-262
cgttggctccagacaaataaacatggagtccatcttccacgagaaacaagaaggctcactttgtgctcaacattgcctgaataacttattgcaaggagaatattttagccctgtggaattatcctcaattgcacatcagctggatgaggaggagaggatgagaatggcagaaggaggagttactagtgaagattatcgcacgtttttacagcagccttctggaaatatggatgacagtggttttttctctattcagaaatgaaagatcatttatatgcaattataaggaacactggtttacagttagaaaattaggaaaacagtggtttaacttgaattctctcttgacgggtccagaattaatatcagatacatatcttgcacttttcttggctcaattacaacaggaagggtgatctgccagattgcgaagctgaccaactcctgcagatgattagggtccaacagatgcatcgaccaaaacttattggagaagaattagcacaactaaaagagcaaagagtccataaaacagacctggaacgagtgttagaagcaaatgatggctcaggaatgttagacgaagatgaggaggatttgcagagggctctggcactaagtcgccaagaaattgacatggaagatgaggaagcagatctccgcagggctattcagctaagtatgcaaggtagttccagaaacatatctcaagatatgacacagacatcaggtacaaatcttacttcagaagagcttcggaagagacgagaagcctactttgaaaaacagcagcaaaagcagcaacagcagcagcagcagcagcagcagggggacctatcaggacagagttcacatccatgtgaaaggccagccaccagttcaggagcacttgggagtgatc

SEQ ID NO: 109352 - DNA, 692 bp, Homo sapiens
  Payload ID: 1477
  Gene Symbol: ATXN3
  Gene Name: ataxin 3
  ENST ID: ENST00000556220
  CDS Start-End: 23-692
cgttggctccagacaaataaacatggagtccatcttccacgagaaacagccttctggaaatatggatgacagtggttttttctctattcagtggtttaacttgaattctctcttgacgggtccagaattaatatcagatacatatcttgcacttttcttggctcaattacaacaggaaggttattctatatttgtcgttaagggtgatctgccagattgcgaagctgaccaactcctgcagatgattagggtccaacagatgcatcgaccaaaacttattggagaagaattagcacaactaaaagagcaaagagtccataaaacagacctggaacgagtgttagaagcaaatgatggctcaggaatgttagacgaagatgaggaggatttgcagagggctctggcactaagtcgccaagaaattgacatggaagatgaggaagcagatctccgcagggctattcagctaagtatgcaaggtagttccagaaacatatctcaagatatgacacagacatcaggtacaaatcttacttcagaagagcttcggaagagacgagaagcctactttgaaaaacagcagcaaaagcagcaacagcagcagcagcagcagcagcagggggacctatcaggacagagttcacatccatgtgaaaggccagccaccagttcaggagcacttgggagtgatc

SEQ ID NO: 109353 - DNA, 562 bp, Homo sapiens
  Payload ID: 1477
  Gene Symbol: ATXN3
  Gene Name: ataxin 3
  ENST ID: ENST00000557311
  CDS Start-End: 109-562
cgttggctccagacaaataaacatggagtccatcttccacgagaaagttattctatatttgtcgttaagggtgatctgccagattgcgaagctgaccaactcctgcagatgattagggtccaacagatgcatcgaccaaaacttattggagaagaattagcacaactaaaagagcaaagagtccataaaacagacctggaacgagtgttagaagcaaatgatggctcaggaatgttagacgaagatgaggaggatttgcagagggctctggcactaagtcgccaagaaattgacatggaagatgaggaagcagatctccgcagggctattcagctaagtatgcaaggtagttccagaaacatatctcaagatatgacacagacatcaggtacaaatcttacttcagaagagcttcggaagagacgagaagcctactttgaaaaacagcagcaaaagcagcaacagcagcagcagcagcagcagcagggggacctatcaggacagagttcacatccatgtgaaaggccagccaccagttcaggagcacttgggagtgatctag

SEQ ID NO: 109354 - DNA, 803 bp, Homo sapiens
  Payload ID: 1477
  Gene Symbol: ATXN3
  Gene Name: ataxin 3
  ENST ID: ENST00000555381
  CDS Start-End: 23-803
cgttggctccagacaaataaacatggagtccatcttccacgagaaagttataagcaatgccttgaaagtttggggtttagaactaatcctgttcaacagtccagagtatcagaggctcaggatcgatcctataaatgaaagatcatttatatgcaattataaggaacactggtttacagttagaaaattaggaaaacagtggtttaacttgaattctctcttgacgggtccagaattaatatcagatacatatcttgcacttttcttggctcaattacaacaggaaggttattctatatttgtcgttaagggtgatctgccagattgcgaagctgaccaactcctgcagatgattagggtccaacagatgcatcgaccaaaacttattggagaagaattagcacaactaaaagagcaaagagtccataaaacagacctggaacgagtgttagaagcaaatgatggctcaggaatgttagacgaagatgaggaggatttgcagagggctctggcactaagtcgccaagaaattgacatggaagatgaggaagcagatctccgcagggctattcagctaagtatgcaaggtagttccagaaacatatctcaagatatgacacagacatcaggtacaaatcttacttcagaagagcttcggaagagacgagaagcctactttgaaaaacagcagcaaaagcagcaacagcagcagcagcagcagcagcagggggacctatcaggacagagttcacatccatgtgaaaggccagccaccagttcaggagcacttgggagtgatctag

SEQ ID NO: 109355 - DNA, 943 bp, Homo sapiens
  Payload ID: 1477
  Gene Symbol: ATXN3
  Gene Name: ataxin 3
  ENST ID: ENST00000554350
  CDS Start-End: 23-355
cgttggctccagacaaataaacatggagtccatcttccacgagaaacaagaaggctcactttgtgctcaacattgcctgaataacttattgcaaggagaatattttagccctgtggaattatcctcaattgcacatcagctggatgaggaggagaggatgagaatggcagaaggaggagttactagtgaagattatcgcacgtttttacagcagccttctggaaatatggatgacagtggttttttctctattcaggttataagcaatgccttgaaagtttggggtttagaactaatcctgttcaacagtccagagtatcagaggctcaggatcgatcctattggtttaacttgaattctctcttgacgggtccagaattaatatcagatacatatcttgcacttttcttggctcaattacaacaggaaggttattctatatttgtcgttaagggtgatctgccagattgcgaagctgaccaactcctgcagatgattagggtccaacagatgcatcgaccaaaacttattggagaagaattagcacaactaaaagagcaaagagtccataaaacagacctggaacgagtgttagaagcaaatgatggctcaggaatgttagacgaagatgaggaggatttgcagagggctctggcactaagtcgccaagaaattgacatggaagatgaggaagcagatctccgcagggctattcagctaagtatgcaaggtagttccagaaacatatctcaagatatgacacagacatcaggtacaaatcttacttcagaagagcttcggaagagacgagaagcctactttgaaaaacagcagcaaaagcagcaacagcagcagcagcagcagcagcagggggacctatcaggacagagttcacatccatgtgaaaggccagccaccagttcaggagcacttgggagtgatc

SEQ ID NO: 109356 - DNA, 924 bp, Homo sapiens
  Payload ID: 1477
  Gene Symbol: ATXN3
  Gene Name: ataxin 3
  ENST ID: ENST00000556315
  CDS Start-End: 23-259
cgttggctccagacaaataaacatggagtccatcttccacgagaaacaagaaggctcactttgtgctcaacattgcctgaataacttattgcaaggagaatattttagccctgtggaattatcctcaattgcacatcagctggatgaggaggagaggatgagaatggcagaaggaggagttactagtgaagattatcgcacgtttttacagccttctggaaatatggatgacagtggttttttctctattcagaaatgaaagatcatttatatgcaattataaggaacactggtttacagttagaaaattaggaaaacagtggtttaacttgaattctctcttgacgggtccagaattaatatcagatacatatcttgcacttttcttggctcaattacaacaggaaggttattctatatttgtcgttaagggtgatctgccagattgcgaagctgaccaactcctgcagatgattagggtccaacagatgcatcgaccaaaacttattggagaagaattagcacaactaaaagagcaaagagtccataaaacagacctggaacgagtgttagaagcaaatgatggctcaggaatgttagacgaagatgaggaggatttgcagagggctctggcactaagtcgccaagaaattgacatggaagatgaggaagcagatctccgcagggctattcagctaagtatgcaaggtagttccagaaacatatctcaagatatgacacagacatcaggtacaaatcttacttcagaagagcttcggaagagacgagaagcctactttgaaaaacagcagcaaaagcagcaacagcagcagcagcagcagcagcagggggacctatcaggacagagttcacatccatgtgaaaggccagccaccagttcaggagcacttgggagtgatctag

SEQ ID NO: 109357 - DNA, 1010 bp, Homo sapiens
  Payload ID: 1477
  Gene Symbol: ATXN3
  Gene Name: ataxin 3
  ENST ID: ENST00000554592
  CDS Start-End: 23-1010
cgttggctccagacaaataaacatggagtccatcttccacgagaaacaagaaggctcactttgtgctcaacattgcctgaataacttattgcaaggagaatattttagccctgtggaattatcctcaattgcacatcagctggatgaggaggagaggatgagaatggcagaaggaggagttactagtgaagattatcgcacgtttttacagccttctggaaatatggatgacagtggttttttctctattcaggttataagcaatgccttgaaagtttggggtttagaactaatcctgttcaacagtccagagtatcagaggctcaggatcgatcctataaatgaaagatcatttatatgcaattataaggaacactggtttacagttagaaaattaggaaaacagtggtttaacttgaattctctcttgacgggtccagaattaatatcagatacatatcttgcacttttcttggctcaattacaacaggaaggttattctatatttgtcgttaagggtgatctgccagattgcgaagctgaccaactcctgcagatgattagggtccaacagatgcatcgaccaaaacttattggagaagaattagcacaactaaaagagcaaagagtccataaaacagacctggaacgagtgttagaagcaaatgatggctcaggaatgttagacgaagatgaggaggatttgcagagggctctggcactaagtcgccaagaaattgacatggaagatgaggaagcagatctccgcagggctattcagctaagtatgcaaggtagttccagaaacatatctcaagatatgacacagacatcaggtacaaatcttacttcagaagagcttcggaagagacgagaagcctactttgaaaaacagcagcaaaagcagcaacagcagcagcagcagcagcagcagggggacctatcaggacagagttcacatccatgtgaaaggccagccaccagttcaggagcacttgggagtgatctag

SEQ ID NO: 109358 - DNA, 1083 bp, Homo sapiens
  Payload ID: 1477
  Gene Symbol: ATXN3
  Gene Name: ataxin 3
  ENST ID: ENST00000556374
  CDS Start-End: 23-367
cgttggctccagacaaataaacatggagtccatcttccacgagaaacaagaaggctcactttgtgctcaacattgcctgaataacttattgcaaggagaatattttagccctgtggaattatcctcaattgcacatcagctggatgaggaggagaggatgagaatggcagaaggaggagttactagtgaagattatcgcacgtttttacagcagccttctggaaatatggatgacagtggttttttctctattcagttgctatttttcttaacaggttataagcaatgccttgaaagtttggggtttagaactaatcctgttcaacagtccagagtatcagaggctcaggatcgatcctataaatgaaagatcatttatatgcaattataaggaacactggtttacagttagaaaattaggaaaacagtggtttaacttgaattctctcttgacgggtccagaattaatatcagatacatatcttgcacttttcttggctcaattacaacaggaaggttattctatatttgtcgttaagggtgatctgccagattgcgaagctgaccaactcctgcagatgattagggtccaacagatgcatcgaccaaaacttattggagaagaattagcacaactaaaagagcaaagagtccataaaacagacctggaacgagtgttagaagcaaatgatggctcaggaatgttagacgaagatgaggaggatttgcagagggctctggcactaagtcgccaagaaattgacatggaagatgaggaagcagatctccgcagggctattcagctaagtatgcaaggtagttccagaaacatatctcaagatatgacacagacatcaggtacaaatcttacttcagaagagcttcggaagagacgagaagcctactttgaaaatcacaactcagaagtagatgaaggaaaattctgatcagctgacatcctcttaatacagcagcaaaagcagcaacagcagcagcagcagcagcagcagggggacctatcaggacagagttcacatccatgtgaaaggccagccaccagttcaggagcacttgggagtgatc

SEQ ID NO: 109359 - DNA, 757 bp, Homo sapiens
  Payload ID: 1477
  Gene Symbol: ATXN3
  Gene Name: ataxin 3
  ENST ID: ENST00000553570
  CDS Start-End: 23-310
cgttggctccagacaaataaacatggagtccatcttccacgagaaacagccttctggaaatatggatgacagtggttttttctctattcaggttataagcaatgccttgaaagtttggggtttagaactaatcctgttcaacagtccagagtatcagaggctcaggatcgatcctataaatgaaagatcatttatatgcaattataaggaacactggtttacagttagaaaattaggaaaacaggttattctatatttgtcgttaagggtgatctgccagattgcgaagctgaccaactcctgcagatgattagggtccaacagatgcatcgaccaaaacttattggagaagaattagcacaactaaaagagcaaagagtccataaaacagacctggaacgagtgttagaagcaaatgatggctcaggaatgttagacgaagatgaggaggatttgcagagggctctggcactaagtcgccaagaaattgacatggaagatgaggaagcagatctccgcagggctattcagctaagtatgcaaggtagttccagaaacatatctcaagatatgacacagacatcaggtacaaatcttacttcagaagagcttcggaagagacgagaagcctactttgaaaaacagcagcaaaagcagcaacagcagcagcagcagcagcagcagggggacctatcaggacagagttcacatccatgtgaaaggccagccaccagttcaggagcacttgggagtgatc

SEQ ID NO: 109360 - DNA, 759 bp, Homo sapiens
  Payload ID: 1477
  Gene Symbol: ATXN3
  Gene Name: ataxin 3
  ENST ID: ENST00000554672
  CDS Start-End: 63-759
cgttggctccagacaaataaacatggagtccatcttccacgagaaaccttctggaaatatggatgacagtggttttttctctattcagaaatgaaagatcatttatatgcaattataaggaacactggtttacagttagaaaattaggaaaacagtggtttaacttgaattctctcttgacgggtccagaattaatatcagatacatatcttgcacttttcttggctcaattacaacaggaaggttattctatatttgtcgttaagggtgatctgccagattgcgaagctgaccaactcctgcagatgattagggtccaacagatgcatcgaccaaaacttattggagaagaattagcacaactaaaagagcaaagagtccataaaacagacctggaacgagtgttagaagcaaatgatggctcaggaatgttagacgaagatgaggaggatttgcagagggctctggcactaagtcgccaagaaattgacatggaagatgaggaagcagatctccgcagggctattcagctaagtatgcaaggtagttccagaaacatatctcaagatatgacacagacatcaggtacaaatcttacttcagaagagcttcggaagagacgagaagcctactttgaaaaacagcagcaaaagcagcaacagcagcagcagcagcagcagcagggggacctatcaggacagagttcacatccatgtgaaaggccagccaccagttcaggagcacttgggagtgatctag

SEQ ID NO: 109361 - DNA, 921 bp, Homo sapiens
  Payload ID: 1477
  Gene Symbol: ATXN3
  Gene Name: ataxin 3
  ENST ID: ENST00000556671
  CDS Start-End: 23-355
cgttggctccagacaaataaacatggagtccatcttccacgagaaacaagaaggctcactttgtgctcaacattgcctgaataacttattgcaaggagaatattttagccctgtggaattatcctcaattgcacatcagctggatgaggaggagaggatgagaatggcagaaggaggagttactagtgaagattatcgcacgtttttacagcagccttctggaaatatggatgacagtggttttttctctattcagtggtttaacttgaattctctcttgacgggtccagaattaatatcagatacatatcttgcacttttcttggctcaattacaacaggaagtcactcaatgagacggctcttccagtcttacaatggagaaagtgaggctcagagactttaagtaacttaccttagacgactttactaggtgatctgccagattgcgaagctgaccaactcctgcagatgattagggtccaacagatgcatcgaccaaaacttattggagaagaattagcacaactaaaagagcaaagagtccataaaacagacctggaacgagtgttagaagcaaatgatggctcaggaatgttagacgaagatgaggaggatttgcagagggctctggcactaagtcgccaagaaattgacatggaagatgaggaagcagatctccgcagggctattcagctaagtatgcaaggtagttccagaaacatatctcaagatatgacacagacatcaggtacaaatcttacttcagaagagcttcggaagagacgagaagcctactttgaaaaacagcagcaaaagcagcaacagcagcagcagcagcagcagcagggggacctatcaggacagagttcacatccatgtgaaaggccagccaccagttcaggagcacttgggagtgatc

SEQ ID NO: 109362 - DNA, 913 bp, Homo sapiens
  Payload ID: 1477
  Gene Symbol: ATXN3
  Gene Name: ataxin 3
  ENST ID: ENST00000556274
  CDS Start-End: 23-262
cgttggctccagacaaataaacatggagtccatcttccacgagaaacaagaaggctcactttgtgctcaacattgcctgaataacttattgcaaggagaatattttagccctgtggaattatcctcaattgcacatcagctggatgaggaggagaggatgagaatggcagaaggaggagttactagtgaagattatcgcacgtttttacagcagccttctggaaatatggatgacagtggttttttctctattcagaaatgaaagatcatttatatgcaattataaggaacactggtttacagttagaaaattaggaaaacagtggtttaacttgaattctctcttgacgggtccagaattaatatcagatacatatcttgcacttttcttggctcaattacaacaggaagggtgatctgccagattgcgaagctgaccaactcctgcagatgattagggtccaacagatgcatcgaccaaaacttattggagaagaattagcacaactaaaagagcaaagagtccataaaacagacctggaacgagtgttagaagcaaatgatggctcaggaatgttagacgaagatgaggaggatttgcagagggctctggcactaagtcgccaagaaattgacatggaagatgaggaagcagatctccgcagggctattcagctaagtatgcaaggtagttccagaaacatatctcaagatatgacacagacatcaggtacaaatcttacttcagaagagcttcggaagagacgagaagcctactttgaaaagtaaagtagttgacagcagcaaaagcagcaacagcagcagcagcagcagcagcagggggacctatcaggacagagttcacatccatgtgaaaggccagccaccagttcaggagcacttgggagtgatc

SEQ ID NO: 109363 - DNA, 990 bp, Homo sapiens
  Payload ID: 1477
  Gene Symbol: ATXN3
  Gene Name: ataxin 3
  ENST ID: ENST00000556898
  CDS Start-End: 23-502
cgttggctccagacaaataaacatggagtccatcttccacgagaaacaagaaggctcactttgtgctcaacattgcctgaataacttattgcaaggagaatattttagccctgtggaattatcctcaattgcacatcagctggatgaggaggagaggatgagaatggcagaaggaggagttactagtgaagattatcgcacgtttttacagcagccttctggaaatatggatgacagtggttttttctctattcaggttataagcaatgccttgaaagtttggggtttagaactaatcctgttcaacagtccagagtatcagaggctcaggatcgatcctataaatgaaagatcatttatatgcaattataaggaacactggtttacagttagaaaattaggaaaacagtggtttaacttgaattctctcttgacgggtccagaattaatatcagatacatatcttgcacttttcttggctcaattacaacaggaagggtgatctgccagattgcgaagctgaccaactcctgcagatgattagggtccaacagatgcatcgaccaaaacttattggagaagaattagcacaactaaaagagcaaagagtccataaaacagacctggaacgagtgttagaagcaaatgatggctcaggaatgttagacgaagatgaggaggatttgcagagggctctggcactaagtcgccaagaaattgacatggaagatgaggaagcagatctccgcagggctattcagctaagtatgcaaggtagttccagaaacatatctcaagatatgacacagacatcaggtacaaatcttacttcagaagagcttcggaagagacgagaagcctactttgaaaaacagcagcaaaagcagcaacagcagcagcagcagcagcagcagggggacctatcaggacagagttcacatccatgtgaaaggccagccaccagttcaggagcacttgggagtgatctag

SEQ ID NO: 109364 - DNA, 922 bp, Homo sapiens
  Payload ID: 1477
  Gene Symbol: ATXN3
  Gene Name: ataxin 3
  ENST ID: ENST00000554994
  CDS Start-End: 23-475
cgttggctccagacaaataaacatggagtccatcttccacgagaaacaagaaggctcactttgtgctcaacattgcctgaataacttattgcaaggagaatattttagccctgtggaattatcctcaattgcacatcagctggatgaggaggagaggatgagaatggcagaaggaggagttactagtgaagattatcgcacgtttttacagcagccttctggaaatatggatgacagtggttttttctctattcaggttataagcaatgccttgaaagtttggggtttagaactaatcctgttcaacagtccagagtatcagaggctcaggatcgatcctataaatgaaagatcatttatatgcaattataaggaacactggtttacagttagaaaattaggaaaacaggttattctatatttgtcgttaagggtgatctgccagattgcgaagctgaccaactcctgcagatgattagggtccaacagatgcatcgaccaaaacttattggagaagaattagcacaactaaaagagcaaagagtccataaaacagacctggaacgagtgttagaagcaaatgatggctcaggaatgttagacgaagatgaggaggatttgcagagggctctggcactaagtcgccaagaaattgacatggaagatgaggaagcagatctccgcagggctattcagctaagtatgcaaggtagttccagaaacatatctcaagatatgacacagacatcaggtacaaatcttacttcagaagagcttcggaagagacgagaagcctactttgaaaaacagcagcaaaagcagcaacagcagcagcagcagcagcagcagggggacctatcaggacagagttcacatccatgtgaaaggccagccaccagttcaggagcacttgggagtgatc

SEQ ID NO: 109365 - DNA, 760 bp, Homo sapiens
  Payload ID: 1477
  Gene Symbol: ATXN3
  Gene Name: ataxin 3
  ENST ID: ENST00000555816
  CDS Start-End: 23-262
cgttggctccagacaaataaacatggagtccatcttccacgagaaacaagaaggctcactttgtgctcaacattgcctgaataacttattgcaaggagaatattttagccctgtggaattatcctcaattgcacatcagctggatgaggaggagaggatgagaatggcagaaggaggagttactagtgaagattatcgcacgtttttacagcagccttctggaaatatggatgacagtggttttttctctattcagaaatgaaagatcatttatatgcaattataaggaacactggtttacagttagaaaattaggaaaacagtggtttaacttgaattctctcttgacgggtccagaattaatatcagatacatatcttgcacttttcttggctcaattacaacaggaaggttattctatatttgtcgttaagggtgatctgccagattgcgaagctgaccaactcctgcagatgattagggtccaacagatgcatcgaccaaaacttattggagaagaattagcacaactaaaagagcaaaggtagttccagaaacatatctcaagatatgacacagacatcaggtacaaatcttacttcagaagagcttcggaagagacgagaagcctactttgaaaaacagcagcaaaagcagcaacagcagcagcagcagcagcagcagggggacctatcaggacagagttcacatccatgtgaaaggccagccaccagttcaggagcacttgggagtgatctag

SEQ ID NO: 109366 - DNA, 857 bp, Homo sapiens
  Payload ID: 1477
  Gene Symbol: ATXN3
  Gene Name: ataxin 3
  ENST ID: ENST00000553491
  CDS Start-End: 23-857
cgttggctccagacaaataaacatggagtccatcttccacgagaaacaagaaggctcactttgtgctcaacattgcctgaataacttattgcaaggagaatattttagccctgtggaattatcctcaattgcacatcagctggatgaggaggagaggatgagaatggcagaaggaggagttactagtgaagattatcgcacgtttttacagcagccttctggaaatatggatgacagtggttttttctctattcagtggtttaacttgaattctctcttgacgggtccagaattaatatcagatacatatcttgcacttttcttggctcaattacaacaggaaggttattctatatttgtcgttaagggtgatctgccagattgcgaagctgaccaactcctgcagatgattagggtccaacagatgcatcgaccaaaacttattggagaagaattagcacaactaaaagagcaaagagtccataaaacagacctggaacgagtgttagaagcaaatgatggctcaggaatgttagacgaagatgaggaggatttgcagagggctctggcactaagtcgccaagaaattgacatggaagatgaggaagcagatctccgcagggctattcagctaagtatgcaaggtagttccagaaacatatctcaagatatgacacagacatcaggtacaaatcttacttcagaagagcttcggaagagacgagaagcctactttgaaaaacagcagcaaaagcagcaacagcagcagcagcagcagcagcagggggacctatcaggacagagttcacatccatgtgaaaggccagccaccagttcaggagcacttgggagtgatc

SEQ ID NO: 109367 - DNA, 807 bp, Homo sapiens
  Payload ID: 1477
  Gene Symbol: ATXN3
  Gene Name: ataxin 3
  ENST ID: ENST00000557030
  CDS Start-End: 22-624
gttggctccagacaaataaacatggagtccatcttccacgagaaacaagaaggctcactttgtgctcaacattgcctgaataacttattgcaaggagaatattttagccctgtggaattatcctcaattgcacatcagctggatgaggaggagaggatgagaatggcagaaggaggagttactagtgaagattatcgcacgtttttacagtggtttaacttgaattctctcttgacgggtccagaattaatatcagatacatatcttgcacttttcttggctcaattacaacaggaaggttattctatatttgtcgttaagggtgatctgccagattgcgaagctgaccaactcctgcagatgattagggtccaacagatgcatcgaccaaaacttattggagaagaattagcacaactaaaagagcaaagagtccataaaacagacctggaacgagtgttagaagcaaatgatggctcaggaatgttagacgaagatgaggaggatttgcagagggctctggcactaagtcgccaagaaattgacatggaagatgaggaagcagatctccgcagggctattcagctaagtatgcaagttccagaaacatatctcaagatatgacacagacatcaggtacaaatcttacttcagaagagcttcggaagagacgagaagcctactttgaaaaacagcagcaaaagcagcaacagcagcagcagcagcagcagcagggggacctatcaggacagagttcacatccatgtgaaaggccagccaccagttcaggagcacttgggagtgatc

SEQ ID NO: 109368 - DNA, 981 bp, Homo sapiens
  Payload ID: 1477
  Gene Symbol: ATXN3
  Gene Name: ataxin 3
  ENST ID: ENST00000554673
  CDS Start-End: 23-508
cgttggctccagacaaataaacatggagtccatcttccacgagaaacaagaaggctcactttgtgctcaacattgcctgaataacttattgcaaggagaatattttagccctgtggaattatcctcaattgcacatcagctggatgaggaggagaggatgagaatggcagaaggaggagttactagtgaagattatcgcacgtttttacagcagccttctggaaatatggatgacagtggttttttctctattcaggttataagcaatgccttgaaagtttggggtttagaactaatcctgttcaacagtccagagtatcagaggctcaggatcgatcctataaatgaaagatcatttatatgcaattataaggaacactggtttacagttagaaaattaggaaaacagtggtttaacttgaattctctcttgacgggtccagaattaatatcagatacatatcttgcacttttcttggctcaattacaacaggaagtcactcaatgagacggctcttccagtcttacaatggagaaagtgaggctcagagactttaagtaacttaccttagacgactttactagttattctatatttgtcgttaagggtgatctgccagattgcgaagctgaccaactcctgcagatgattagggtccaacagatgcatcgaccaaaacttattggagaagaattagcacaactaaaagagcaaagagtccataaaacagacctggaacgagtgttagaagcaaatgatggctcaggaatgttagacgaagatgaggaggatttgcagagggctctggcactaagtcgccaagaaattgacatggaagatgaggaagcagatctccgcagggctattcagctaagtatgcaaggtagttccagaaacatatctcaagatatgacacagacatcaggtacaaatcttacttcagaagagcttcggaagagacgagaagcctactttgaaaa

SEQ ID NO: 109369 - DNA, 1065 bp, Homo sapiens
  Payload ID: 1477
  Gene Symbol: ATXN3
  Gene Name: ataxin 3
  ENST ID: ENST00000553488
  CDS Start-End: 23-262
cgttggctccagacaaataaacatggagtccatcttccacgagaaacaagaaggctcactttgtgctcaacattgcctgaataacttattgcaaggagaatattttagccctgtggaattatcctcaattgcacatcagctggatgaggaggagaggatgagaatggcagaaggaggagttactagtgaagattatcgcacgtttttacagcagccttctggaaatatggatgacagtggttttttctctattcagaaatgaaagatcatttatatgcaattataaggaacactggtttacagttagaaaattaggaaaacagtggtttaacttgaattctctcttgacgggtccagaattaatatcagatacatatcttgcacttttcttggctcaattacaacaggaagtcactcaatgagacggctcttccagtcttacaatggagaaagtgaggctcagagactttaagtaacttaccttagacgactttactagttattctatatttgtcgttaagggtgatctgccagattgcgaagctgaccaactcctgcagatgattagggtccaacagatgcatcgaccaaaacttattggagaagaattagcacaactaaaagagcaaagagtccataaaacagacctggaacgagtgttagaagcaaatgatggctcaggaatgttagacgaagatgaggaggatttgcagagggctctggcactaagtcgccaagaaattgacatggaagatgaggaagcagatctccgcagggctattcagctaagtatgcaaggtagttccagaaacatatctcaagatatgacacagacatcaggtacaaatcttacttcagaagagcttcggaagagacgagaagcctactttgaaaatcacaactcagaagtagatgaaggaaaattctgatcagctgacatcctcttaatacagcagcaaaagcagcaacagcagcagcagcagcagcagcagggggacctatcaggacagagttcacatccatgtgaaaggccagccaccagttcaggagcacttgggagtgatc

SEQ ID NO: 109370 - DNA, 769 bp, Homo sapiens
  Payload ID: 1477
  Gene Symbol: ATXN3
  Gene Name: ataxin 3
  ENST ID: ENST00000556958
  CDS Start-End: 23-322
cgttggctccagacaaataaacatggagtccatcttccacgagaaacaagaaggctcactttgtgctcaacattgcctgaataacttattgcaaggagaatattttagccctgtggaattatcctcaattgcacatcagctggatgaggaggagaggatgagaatggcagaaggaggagttactagtgaagattatcgcacgtttttacagcagccttctggaaatatggatgacagtggttttttctctattcaggttattctatatttgtcgttaagggtgatctgccagattgcgaagctgaccaactcctgcagatgattagggtccaacagatgcatcgaccaaaacttattggagaagaattagcacaactaaaagagcaaagagtccataaaacagacctggaacgagtgttagaagcaaatgatggctcaggaatgttagacgaagatgaggaggatttgcagagggctctggcactaagtcgccaagaaattgacatggaagatgaggaagcagatctccgcagggctattcagctaagtatgcaaggtagttccagaaacatatctcaagatatgacacagacatcaggtacaaatcttacttcagaagagcttcggaagagacgagaagcctactttgaaaaacagcagcaaaagcagcaacagcagcagcagcagcagcagcagggggacctatcaggacagagttcacatccatgtgaaaggccagccaccagttcaggagcacttgggagtgatc

SEQ ID NO: 109371 - DNA, 597 bp, Homo sapiens
  Payload ID: 1477
  Gene Symbol: ATXN3
  Gene Name: ataxin 3
  ENST ID: ENST00000526872
  CDS Start-End: 1-597
caagaaggctcactttgtgctcaacattgcctgaataacttattgcaaggagaatattttagccctgtggaattatcctcaattgcacatcagctggatgaggaggagaggatgagaatggcagaaggaggagttactagtgaagattatcgcacgtttttacagcagccttctggaaatatggatgacagtggttttttctctattcaggttataagcaatgccttgaaagtttggggtttagaactaatcctgttcaacagtccagagtatcagaggctcaggatcgatcctataaatgaaagatcatttatatgcaattataaggaacactggtttacagttagaaaattaggaaaacagggtgatctgccagattgcgaagctgaccaactcctgcagatgattagggtccaacagatgcatcgaccaaaacttattggagaagaattagcacaactaaaagagcaaagagtccataaaacagacctggaacgagtgttagaagcaaatgatggctcaggaatgttagacgaagatgaggaggatttgcagagggctctggcactaagtcgccaagaaattgacatggaagat

SEQ ID NO: 109372 - DNA, 26812 bp, Homo sapiens
  Payload ID: 1477
  Gene Symbol: ATXN3
  Gene Name: ataxin 3
  Uniprot ID: P54252
  ENST ID: ENST00000558190
  CDS Start-End: 59-1144
ggggcggagctggagggggtggttcggcgtgggggccgttggctccagacaaataaacatggagtccatcttccacgagaaacaagaaggctcactttgtgctcaacattgcctgaataacttattgcaaggagaatattttagccctgtggaattatcctcaattgcacatcagctggatgaggaggagaggatgagaatggcagaaggaggagttactagtgaagattatcgcacgtttttacagcagccttctggaaatatggatgacagtggttttttctctattcaggttataagcaatgccttgaaagtttggggtttagaactaatcctgttcaacagtccagagtatcagaggctcaggatcgatcctataaatgaaagatcatttatatgcaattataaggaacactggtttacagttagaaaattaggaaaacagtggtttaacttgaattctctcttgacgggtccagaattaatatcagatacatatcttgcacttttcttggctcaattacaacaggaaggttattctatatttgtcgttaagggtgatctgccagattgcgaagctgaccaactcctgcagatgattagggtccaacagatgcatcgaccaaaacttattggagaagaattagcacaactaaaagagcaaagagtccataaaacagacctggaacgagtgttagaagcaaatgatggctcaggaatgttagacgaagatgaggaggatttgcagagggctctggcactaagtcgccaagaaattgacatggaagatgaggaagcagatctccgcagggctattcagctaagtatgcaaggtagttccagaaacatatctcaagatatgacacagacatcaggtacaaatcttacttcagaagagcttcggaagagacgagaagcctactttgaaaaacagcagcaaaagcagcaacagcagcagcagcagcagcagcagggggacctatcaggacagagttcacatccatgtgaaaggccagccaccagttcaggagcacttgggagtgatctaggtgatgctatgagtgaagaagacatgcttcaggcagctgtgaccatgtctttagaaactgtcagaaatgatttgaaaacagaaggaaaaaaataatacctttaaaaaataatttagatattcatactttccaacattatcctgtgtgattacagcatagggtccactttggtaatgtgtcaaagagatgaggaaataagacttttagcggtttgcaaacaaaatgatgggaaagtggaacaatgcgtcggttgtaggactaaataatgatcttccaaatattagccaaagaggcattcagcaattaaagacatttaaaatagttttctaaatgtttctttttcttttttgagtgtgcaatatgtaacatgtctaaagttagggcatttttcttggatctttttgcagactagctaattagctctcgcctcaggctttttccatatagtttgttttctttttctgtcttgtaggtaagttggctcacatcatgtaatagtggctttcatttcttattaaccaaattaacctttcaggaaagtatctctactttcctgatgttgataatagtaatggttctagaaggatgaacagttctcccttcaactgtataccgtgtgctccagtgttttcttgtgttgttttctctgatcacaacttttctgctacctggttttcattattttcccacaattcttttgaaagatggtaatcttttctgaggtttagcgttttaagccctacgatgggatcattatttcatgactggtgcgttcctaaactctgaaatcagccttgcacaagtacttgagaataaatgagcattttttaaaatgtgtgagcatgtgctttcccagatgctttatgaatgtcttttcacttatatcaaaaccttacagctttgttgcaaccccttcttcctgcgccttattttttcctttcttctccaattgagaaaactaggagaagcatagtatgcaggcaagtctccttctgttagaagactaaacatacgtacccaccatgaatgtatgatacatgaaatttggccttcaattttaatagcagttttattttattttttctcctatgactggagctttgtgttctctttacagttgagtcatggaatgtaggtgtctgcttcacatcttttagtaggtatagcttgtcaaagatggtgatctggaacatgaaaataatttactaatgaaaatatgtttaaatttatactgtgatttgacacttgcatcatgtttagatagcttaagaacaatggaagtcacagtacttagtggatctataaataagaaagtccatagttttgataaatattctctttaattgagatgtacagagagtttcttgctgggtcaataggatagtatcattttggtgaaaaccatgtctctgaaattgatgttttagtttcagtgttccctatccctcattctccatctccttttgaagctcttttgaatgttgaattgttcataagctaaaatccaagaaatttcagctgacaacttcgaaaattataatatggtatattgccctcctggtgtgtggctgcacacattttatcagggaaagttttttgatctaggatttattgctaactaactgaaaagagaagaaaaaatatcttttatttatgattataaaatagctttttcttcgatataacagattttttaagtcattattttgtgccaatcagttttctgaagtttcccttacacaaaaggatagctttattttaaaatctaaagtttcttttaatagttaaaaatgtttcagaagaattataaaactttaaaactgcaagggatgttggagtttagtactactccctcaagatttaaaaagctaaatattttaagactgaacatttatgttaattattaccagtgtgtttgtcatattttccatggatatttgttcattacctttttccattgaaaagttacattaaacttttcatacacttgaattgatgagctacctaatataaaaatgagaaaaccaatatgcattttaaagttttaactttagagtttataaagttcatatataccctagttaaagcacttaagaaaatatggcatgtttgacttttagttcctagagagtttttgtttttgtttttgtttttttttgagacggagtcttgctatgtctcccaggctggagggcagtggcatgatctcggctcactacaacttccacctcccgggttcaagcaattctcctgcctcagcctccagagtagctgggattacaggcgcccaccaccacacccggcagatttttgtatttttggtagagacgcggtttcatcatgtttggccaggctggtctcgaactcctgacctcaggtgatccgcctgccttggcctcccaaagtgttgggattacaggcatgagccactgcgcctggccagctagagagtttttaaagcagagctgagcacacactggatgcgtttgaatgtgtttgtgtagtttgttgtgaaattgttacatttagcaggcagatccagaagcactagtgaactgtcatcttggtggggttggcttaaatttaattgactgtttagattccatttcttaattgattggccagtatgaaaagatgccagtgcaagtaaccatagtatcaaaaaagttaaaaattattcaaagctatagtttatacatcaggtactgccatttactgtaaaccacctgcaagaaagtcaggaacaactaaattcacaagaactgtcctgctaagaagtgtattaaagatttccattttgttttactaattgggaacatcttaatgtttaatatttaaactattggtatcatttttctaatgtataatttgtattactgggatcaagtatgtacagtggtgatgctagtagaagtttaagccttggaaataccactttcatattttcagatgtcatggatttaatgagtaatttatgtttttaaaattcagaatagttaatctctgatctaaaaccatcaatctatgttttttacggtaatcatgtaaatatttcagtaatataaactgtttgaaaaggctgctgcaggtaaactctatactaggatcttggccaaataatttacaattcacagaatattttatttaaggtggtgctttttttttttgtccttaaaacttgatttttcttaactttattcatgatgccaaagtaaatgaggaaaaaaactcaaaaccagttgagtatcattgcagacaaaactaccagtagtccatattgtttaatattaagttgaataaaataaattttatttcagtcagagcctaaatcacattttgattgtctgaatttttgatactatttttaaaatcatgctagtggcggctgggcgtggtagctcacgcctgtaatcccagcattttgggaggccgaagtgggtggatcacgaggtcgggagttcgagaccagcttggccaaaatggtgaaaccccatctgtactaaaaactacaaaaattagctgggcgcggtggcaggtgcctgtaatcccagctacctgggagtctgaggcaggagaattgcttgaaccctggcgacagaggatgcagtgagccaagatggtgccactgtactccagactgggcgacagagtgagactctgtctcaaaaaaaaaaaaaaaatcatgctagtgccaagagctactaaattcttaaaaccggcccattggacctgtacagataaaaaatagattcagtgcataatcaaaatatgataattttaaaatcttaagtagaaaaataaatcttgatgttttaaattcttacgaggattcaatagttaatattgatgatctcccggctgggtgcagtggctcacgcctgtaatcccagcagttctggaggctgaggtgggcgaatcacttcaggccaggagttcaagaccagtctgggcaacatggtgaaacctcgtttctactaaaaatacaaaaattagccgggcgtggttgcacacacttgtaatcccagctactcaggaggctaagaatcgcatgagcctaggaggcagaggttgcagagtgccaagggctcaccactgcattccagcctgcccaacagagtgagacactgtttctgaaaaaaaaaaatatatatatatatatatatatgtgtgtatatatatatgtatatatatatgacttcctattaaaaactttatcccagtcgggggcagtggctcacgcctgtaatcccaacactttgggaggctgaggcaggtggatcacctgaagtccggagtttgagaccagcctggccaacatggtgaaaccccatctctactaaaaatacaaaacttaagccaggtatggtggcgggcacctgtaatcccagttacttgggaggctgaggcaggagaatcgtttaaacccaggaggtggaggttgcagtgagctgagatcgtgccattgcactctagcctgggcaacaagagtaaaactccatcttaaaggtttgtttgtttttttttaatccggaaacgaagaggcgttgggccgctattttctttttctttctttctttctttctttttttttttttctgagacggagtctagctctgctgcccaggctggagtacaatgacacgatgttggctcactgcaacctccacctcctgggttcaagcgattctcctgcctcagcctcccaagtacctgggattacaggcacctgccactacacctggcgaatatttgttttttttagtagagacgggcttttaccatgttaggctggtctcaaactcctgacctcaggtgatctgcctgccttggcctcccaaagtgctgggattacaggtgcaggccaccacacccggccttgggccactgttttcaaagtgaattgtttgttgtatcgagtccttaagtatggatatatatgtgaccctaattaagaactaccagattggatcaactaatcatgtcagcaatgtaaataactttatttttcatattcaaaataaaaactttcttttatttctggcccctttataaccagcatctttttgctttaaaaaatgacctggctttgtatttttttagtcttaaacataataaaaatatttttgttctaatttgctttcatgagtgaagattattgacatcgttggtaaattctagaattttgattttgttttttaatttgaagaaaatctttgctattattattttttccaagtggtctggcattttaagaattagtgctaataacgtaacttctaaatttgtcgtaattggcatgtttaatagcatatcaaaaaacattttaagcctgtggattcatagacaaagcaatgagaaacattagtaaaatataaatggatattcctgatgcatttaggaagctctcaattgtctcttgcatagttcaaggaatgttttctgaatttttttaatgctttttttttttttgaaagaggaaaacatacatttttaaatgtgattatctaatttttacaacactgggctattaggaataactttttaaaaattactgttctgtataaatatttgaaattcaagtacagaaaatatctgaaacaaaaagcattgttgtttggccatgatacaagtgcactgtggcagtgccgcttgctcaggacccagccctgcagcccttctgtgtgtgctccctcgttaagttcatttgctgttattacacacacaggccttcctgtctggtcgttagaaaagccgggcttccaaagcactgttgaacacaggattctgttgttagtgtggatgttcaatgagttgtattttaaatatcaaagattattaaataaagataatgtttgcttttctatttccttttgaatttgtgtttattgttaattcatagctattcaaagtgtgattagagctgggcttggtggcttgcatctacagttccagctacccaggaggcagaagcaggaggattgcttgagcctaggagttcgaggctgcagtgagctatgatcctgccactgaattctagcctgggcgacaaaacaggaaaaaagtatggatggaggaccagcagcatctgtatcacctgtgagtctttcagaaatgcagagtttcaggctacactcggacctactgaatcagaacttgcactttttacaagatccccaggacactaaagtatagagtgaagcttgagaagcgctgttgtgtggattgttcttaaccagctgcagtgatgaatatgaataacgcaggccagcacagtccattgatattctattccagcttactgcctgccaaaaggtccattattactggatcctcagtcttttccaagagaagctaagaattccaaatttttatttgaaatatattttttaaatgtttgttcaactggcccagtgccagtggctcatgcctttaatcctagcactttgagaggccgaggtggaaggatcacttgaccccaggagtttgagaccagcctgggcaacataaagagaccccatctctattaaaaaaaaatagagacaatgctgccttaaaaaagtcaaataaatgtttgctcaactgatttttaatactgagggccaaacaaagcacatcaaatttttaagtgctgcttttcctcattttatccaactctggacaccagaatccaaatgtagtgattggaatccacctagactgattgaggaatatattgtcctcaaattttatgagggttgactattcattttaactttaattaggattgggcacaaattttgaaacataataacattacaggaccggggcccgatccagaccccaagagagggttcttggatcttgtgcaagaatgaattcagggcaagtccataaattgaaagctagttcattaagaaagtagaggaataaaagaatggctaccccataggtagagcagccctgagggctgctggttgccatgtccacccccgcgccccctccccccgctttgttgttgttgtttaagacagagcttcgctgtgtcatcaggctggagtgcagtggcatgatagctcactgcaacctctgcctcccgcgttcaagcaattctcctgcctcagcctcctgagtagctgggactacaggcgtgcaccaccacgcccagctaatttttgtatttttagtagagatgcggtttcaccatgttggccaggaaggtctcaatctcttgacttcgtgatccacccgccttggcctcccaaagtgctgggatgagccacctcgcctggctggttatttcttgatgatatgctaaacaaggggtggattattcatgcctgccctttttagaccatttagggtaacttcccggcattgccatggcatttgtcaactgtcatggtgccaatgggagtgtagcagtgaggaggaccagaggtcactttcatcaccattttggctttttcagccggcttctttactgcaacctgttttatcagcaaggtttttatgatctgtatcttgtgcagaccttctatctcatcctgtgacttagaatgccttaaccatctgggaatgcagcctagtaggtcttggcctcattttaccaaccccctattcaagatggagttgctctggttcaaatgcctctgatatttccctactcccttttataagaaaacccttaatcctaagggttgcagagggatgaagatccatcttctgtattcttcaggctgaataggggtgatgatattcctgcctatgagagtctcttgtattagggtagagaggagctcagtcagtcagtatggctccctatccttcctcccttccccagcccctgacaactaccattctactttgtctctatgattctaagtatctcctataagtggaatcattcagtatttgtagggtttttttgtgactagtgtatttcacttagcatgtcaaggttcatccatgttgtagcatacgtccaaattttcttctttttaaaaactgaataatattccattgtatgatatatgcacattttgcttattcatttatccatcaaagaaaaccagtagcttttttacataccggcagtaacctggttaaaaaaataagatggaaaataccaagcccgaaaatgtcaaattcttgaataccagacaggtactataatccaagctgagcagagaggaatggcccttgtctcagccctgagccacatgtcactacatgggccccaaggagctcttgtgcccagagtcctgctaaggctcgttcttcacccctctaaagtggctcaaactagcgtaggaggccaggagggagcagattctatgccacctccattgcttccgtgccttctccagatccattttttccaaaagctgtgtttgaattctgcacaggggcatctctgtctccaacactgaaaccccttttgccagacccagagaagatttaactgcctttttttttgagacagggcctcgttctgtcacctaagctggagtgcagtggcacgatcttggctcacggcaacctctgcctcctgggctcaagcaattctcctgcctcagccacccgaatagctgggattataggcgcaggccaccacatccagctaagttttgtatttttagtagagacgcagttttgccatgttgcccaggctggtctagaacttctgagctcaggtgatccacccgcctcggcctcccaaagttctgggatgacaggcatgagccacctaacctggccagatttaactgctttgagccaccgtctcacacatcttccaggagcttctagtcaaatgcagaggattaatagtgtataattccatttacataagatctttggaatagtcaaactcatagagacagaaagtagaatggtggttgccgggggatggttgaggggaaaattaggagttgtttaacgagtatggagtttcagtttgggaagatgaaaaaagttctggagatggacagttgtaatggctgcacaacaacgtgaatgtacttaatgccggtgaaccgtataaccatttaacaactgaaaatggttacaaaattttgtgttatatatatcttatcacaataaaaaatatagaggattgatcactatatttgctcccttccaaaatctcacctaggttaaagtaaagaaaaatatataaacccacaagaacacagggaccaggagaggagatgcattcattggattacgtttggttgtaaaaaaaacaaaaaatcctccccggcacggtggctcacaccttgtaatcccagcactttgggaggctgaggcaggcggatcacgaggtcacgagtttgagaccagcctgaccaacatggtgaaacctcatctctactaaaaatacaaaaattagccgggtgtggtggcgtacgcctgtaatcccagctactgaagtggctgagacaggagaattgcttgaacccgggaggcggaggttgcagtgagccgagatcacgccactgcactccagattaggtgacagaacaagactccatctcaaacaaaaacaaaaacaaaaacaaactaatataacagtgactttacatgctatgggttttttttctcctctcatcttcaagaaatgtggagactgccagtccggggatgatacagcatcacagtgtcaggaatctgctctttctgtataattgttacaggaaaggggtccggatccagaccccaagagagggttcttgaattcagggcaagtccacagtgcaaagtgaaagcaagtttactaagaaagtaaaggaataaaaaaatcgctactccatagacagagcagccctgagggctgctggttgcccatttttatggttatttcttgatgatatgctaaacaaggggtggattattcatgcctcccctttttagaccatatagggtaacttcctgatgttgccatggcatttgcaaactgtcatggtgctggtgggggcgtagcaccaaggaggaccagaggtcactcttgtggcctttgtggttttggtgggttttggccagctcctttactgcaacctgttttatcggcaaggactttatgacctgtattttgtgttgaccttgtatctcatcctgtgacttagaatgccttaaccatctgggaatgcagcccagtaggtttcagcctcattttacccagctcctattcaagatggagttgcagccgggcacggtggttcatgcctgtaatcccagcactttgggaggttgaggcgggtggatcacaaggtcaagagttcaagaccagcctggccaacatggcaaaaccccatctctactaaaaatacaaaaattagccaggcgtggttggtgtgcgcctattatgccagctacttgggaggctgatgcaggagaatcacttggatctgggaggcggaggttgcagtaagcagatatcgcgccatgcactccagcctggatgacagagcaagactccgtctcgggggaaaaaaaaaccaaaatggagttgctctggtttacaggcctctgacataatggctttatgtacatggcttccatggctagggtcagctcatagatctaatatggctgtgttggtgctcatgttgcagcccagcaatcagaaagagaaaggaggctgggtttggtggcttacacctgtcatcccagcatttcgggaggccaaggcgggaggatcacatgagcccatgagtttgagaccagcttgagcaacacagggagacctcatctctacaagaaataaaaataaattagttgggtatggtggcatgcacctgtggtcccagctattcgggaggctgaggtgagaggataccttgagcctggaggtttgaggctgcagtgagctatgatcgcaccactgcactccagcctgggcaacagagtgagaccccatctcaaataattaaaaaaaaaaaaaagaaagaaagaaaaaaaaaaggagagcagaaaaaggctatgtaccttttctttcgggttaccttctcaaagttgtgcatactacttccgtttacattacattggccagaacttaacatgacaactactagctacaaggtggtttttattctgggttgccatgcatcttagcttaagtaccctacaggtcctgagataatgattcctatgaaaatgattatttacttatttaattaatttattttgagatggagtctcactctgtcacccaggctggagatcagtggcgtgatctcggctcactgcaacctctgcctcccaggttcaagcaattctcctgcttcagtctcccgagtagctgggactacaggcatgcgccaccatgcccagcttttttgtatttttagtagagacggggtttcactatgttggccaggctgatctcgaactcctgacctcaggtgatctgcctgcctcggcctcccaaagtgctgggattacaggcgtgagccactgtgcctggctgaaaatgattttttaaaagtgttccaggaggaaatggaaagggcataggggagtaagaaagtggaaataggaaaagaaggaagccaagcaagaggagcctatcaagcaaagcctcagtcctgcagacagtctggaggcaggatattcacatcttagagttgtccaaaacagaacaggcaagctgcataattttcaactctggctgaataaggttgcatttcagctctctgggcacctggaaagtatgggctccagtaacctggaggcagtctgctgactgctggctggtgtgcacaaaagtggtaaagggatgagggagtgcaatatgggcactggcatcttggctgtcatgcatccaggtaaaaagtggaggctcaattactatatatgaaggggagaacagactttggggaacaattagcagtcatttccaggtgagacaacaacagaagagaaatgctaatttttttttttttctttgagatggagtttcgctcttgttgcccaggctggagtgcaatggcgctatatccagctcaccgcaacctccgcctcctgggttcaagtgattctcctgcctcagcctcccgagcagctgagattacaggccaccacacccagctaattttgtatttttagtagagacggggtttctccatgttggtcagggtggtctcaaactcccaacctcaggtgatccgcccgcctcagcctcccaaagtgctgggattacaggcgtgaaccaccgcacccggcgagagatgcgaacattttttttgttttttggaggatgacaagttgatgcaggaatgagcagaaccaggaggctgaatactgagtgttaaagagttcctagcaatatgcaggaaaggaaagcaacaagtatcctgagaggtgggggttagatgtagactgaaatcaggaggtgtggttaaaactctttgaaagaggctgggtgcggtggctcacataatcccagcactttgggaggccaaggcgggtgcatcatgaggtcaggagttcgagaccagcctgaccaacatgtgaaaccccgtctctactaaaaatacaaaaattagccgggcatggtggcgcatgcctgtaatcccagctactaaggaggctaaggcaggagaaccgcttgaacctgggaggcgaaggttgcagtgagccgagatcatgccattggactccagcccaggcgacagagagagatcccatctcaaaaaaaaaaaaaaaaaaaaaaaaaaagaaaggaaaagaagaaaagaaaaaagaaacagcagattccctagagaggagacattcatcactaaaaaaaaaaaaaaaaattaaaataaatcgcagaagtaaaagccctttttgaaagggctcagggtacccagcttaatgtatgaaacaaaagcaaacccacatcaaagcacaccattattaatttcagagcatcagaaataaagagaagatctgacaagcttcttggaagaaaacaaggcatagagaataatcagagtagagtagagcaggaaaacagagtcctgggtagagcgaactgagcctagccaatcgatagaattcttgatgttttgttgaaaacagaagcactttacaattctcttggtaagttttagaaagattctgtagtaatggaaaattgtacaaatttaaaaaatggaatctgttaacttcaggaagaacaaaaggtagaaaaatcaaggcaatataatcttggtacaacatttgacttagctgcaatgaataagacttacatagtcatagaaggtaaacactgattacttactttaccaaaaattatgatatcatcatattgaaagcccagaaggaagggaaataaagggaaatacaagagtgctaaatcttttatttttcaataagttggtaatgtctaaaattaataagaaaatggcaaccataagcctaatgcttagaaattcagaaaagtatcagactaaattttaaagtctactttaaactgagtctttgctttatagttgcataaataaattcattttgatggttttctcagaacagatgaactggctgggtgcggtggttcatgcctgtaatcttagcactttgggaggccaaggccgatggctcacttcaagtcaggagtttgagaccagccaaaaaattagccgggtgtggtggtgcacgtttgtaataccagctactcaggaggctgaggcaggagaatcgcttgaacctgggaggcggaggttgcagtgagccaagatggaacgactgcactccagcctgggtgacacagtgagactccgtctcaaaaaaacacaaagaacagatgaactgttttcctttgaggaatattgatgatcccactgcttgagtaatggaaaccagcttgcagctgatagttattttttgtcttttttcctgttctatccactgtcctaggtttggaatttcagctgggcagcttcgatcccaccacctgtagccactgaggttcacaggctctgtttgaggtgttgtgttagattgtgctgggttggttttgctgcttattgagtgatgaagagcaacatattagctactgagatattttgcagaaaaaggaagagatgtcttcagctcaaatgctatcaaacttgtatgtcttttaactttttattataaaaaatttcaaacatatgcaaaagcaaaagactagtttaatgaaccttatgtacccaccacccagtttcaacaattatcagttcctgacaattcttgtttcacctatcccacctctattatacacacatacaaacacacagacaccacacacacacacacacacacacacacgagagcaaagtcaacttccattattttgaagcacatccaagacatcacatcacattatttatcacattatttattaagtttcttcagtcacagtccatctcacagaaagaaatcccccatgagaaacttttaggacatagcttttatgttaattacttaatttctgcactagccatccttgcctgccttctaattttctgcactagctatccttaccttccttctaattttctaacctgccaaggattctgctgcctcaaggtatttgtttctttctgcctggattgctctttcgcagatacttacatgtctcattctttttcacccaggtgaaataaacagcgttgttgctcacacaaagcctgtttggtagtctcttcacatggacgcgtgtgacatttggtgctgaagacccgggacaggaggactccttcaggagacgggtcccctgtccttgccctcactccgtgaggagatccacctacgacctcgggtcctcagaccaaccagcccaaggaacatctcatgaatttcaaatcgggtaagcggtcttttccatcctctcttgctacccttcaatctccctctctcgctacccttcaatctccctgtccttccaattccagttctttttcctctctagtagagacaaaggagacacattttatccgtggacccaaaattccggcgctggtcacggactcaagaagacagtcttctcttggtgtttaatcactgcagggacgactgcctgattattcacccacactccattggtgtctgatcaccgtgggggtgcctgtcttggtcattcacccacattcccttggtggcaagtcaattgcggggacgcctgctttggctgctcacccacccccttctccgtgtctctacctttctctttaaacttacttccttcactatgggcaacattccgtcctccattcccccttctactcccttagcctgtgttctcaagaacttaaaacctcttcaactcacacctgacctaaaacctaaaagccttattttcttctgcaataccgcttggccccaatacaaactcaacagtagttccaagtggccagagaatagcactttggatttgtctgtcctacaggatctagataatttttgttgaaaaatgggcaaatggtctgaggtgcctcagatccaggcattcttttacacactggtccctccctagtctctgctcccagtgcgactcatcccaaatctttcttctttctctcctgtctgttccttcagtctccaccccaagctccgagtcctttgaatcctccttttctatggactcatctgacctctcccctcttccccaggctgctcctcaccaggctgagccaggtcccaattcttcctcagcctccggtcccccaccctataatccttttatcaccccctcctcacaccgtgtctggcttacagtttctttctgtgactagccctcccctacctgcccaacaatttcttcttaaagaggtggctggagctgaaggcatagccaagggtaatgctcctttttctttatctgacctctcccaaatcagttagcgtttaggctctttttcatcaaatataaaaactcaacccagttcatggcctgtttggcaacaacccttggacactttaccgccctagacccagaatggccagaaggccgtcttattctcaacatgcattttattacccaacccactcccgacattagaaaaagctccaaaaattagattccggccctcaaaccccacaacaggacttaattaacatcaccttcaaggtgtacaataatagagtagaggcagccaagtagtaacgtatttctgagttgcaattccttgcctccactgtgagacaaaccccagccacatctccagcacacaagaccttccaaatgcctgaactgcagcggccaggcattcctccaggactgcctaccccaggatcttgcttcaagtgccggaaatctggccactgggccaaggaatgcccccagcccaggattcctcctaagccatgtcccatctgtgcaggaccccactggaaatcggactgtccaacccggcagccactcccagggcccctagaactctggccaaaggctctctgactgactccttcccagatcttctcagcttagcagctgaagactgatgctgcctgatcgccttggaagccccctggaccattacggatgctgagctttggataactcttacagtagagggtaggtccatcccctgtttaatcgatatgggagctacccactccacattaccttcttttcaagggcctgtttcctttgcccctataactgttgtgggtattgatggccaggattctaaaccccttaaaactcccccactctggcaccaacttggacaacattcttttatgtactcttttttagttatccccacctgcccagttcccttattaggccaagacattttaaccaaattatctgcttccctgattattcctggactacagccacatctcattgccacccttcttcccaacccaaagcctccttcgcctcttcctctcgtatcccccaaccttaacccacaagtatgggacacctccactccctccctggcaaccgatcaaacacccattactatcccattaaaacctaatcacccttacctggctcaatgccactattccatcccacaactggctttaagaggactgaagcctgttatcactcgcctgctacagcatgggcttctaaaacctataaactcttcttacaattctcccattttacctgttcaaaaaccggacaagtcttacaggttacctcaggatctggatcttatcaaccaaattgttttgcctatccaccctgtggtgcccaacccatacacttgtttgtcctcaataccttcctccacaactcactattccgttcttgatctcacagatgcttttttcactattccctacaccactcatcccagcctcttttgcttttacctggactgaccctgacacccatcagtcccagcagcttacctgggctgtactgccgcaaggcttcagggacagccctcattacttcagccaagctctttctcatgatatactttctttccatcccttcgcttctcaccttattcaatatattgatgaccttctactttgtagcccctcctttgaatcttctcaacaagatacttttcaacatttattctccaagggatatcggatgtccccctccaaagctcaaatttcttctccatccgttacctacctcagtataattcttcataaaaacacatgtgctctccctgctgatcatgtctgactgatctctcaaaccccaacaccttctacaaaacaacaactcctttccttcctgggcatggttggatacctttgcctttggatacctggttttgccatcctaacaaaaccattatataaactcacaaaagcaaacctagctgacctcataaatcctaaatcctttccccactcccctttccattccttaaaaaacagccctaaaagctgctcccacactagctctccctaactcatcccaacccttttttcattacacacagctgaaatgcagggctgtgcagttggaattcttacacaagagccaggaccatgccctgtagcctttctgtccaaacaacttgaccttactgttttaggctagcccccacattattcctgataccacacctgacccccatgactgtatctctctaatccacctggcattcactccatttccccatacttccttctttcctattcctcaccctgatcacacttggtttattgatggcagttccacctggcctaatcgccattcaccagcaaaggtgggctatgctatagtagtatcttccacatctatccttgaagctaccgctctgcccccctccactacctctcagcaagctgaactcattgccttaactcgagccctcgctcttgcaaaaggactacatgtcaatatttatactgactctaaatatgccttccatatcctgcaccacaatgctgttatatgggcagaaagaggtttcctcagtacgcaaaggtcctccatcattattgcctccttaataaaaactcttctcaaggccgctttacttccaaaggaagctggagtcattcactgcaagggccatcaaaaggcatcagatcccatcgctcagggcaatgcttatgctgataaggtagctaaagaagctgctagctttctaacttctgtccctcacggccagtttttcttcttctcatcagtcactcccacctattcaccgactgaaacttccacctatcaatctcttctcacacaaggcaaatggttcttagaccaaggaaaatatctccttccagcctcacaggcccattctattctgttgtcatttcataacctcttccatgtaggttacaagccactagcccacctcttagaacctctcatttcctttccatcatggaaatctatcctcaaggaaatcacttctcagtgttccatctgctattctactacccctcagggattattcaggccccctccctaccctatacatcaagttcagggatttgcccccacccaggactagcaaattgactctattcacatgccctgagttaggaaactaaaatacctcttggtctgggaagacactttcactggatgggtagaggcctttcccacagggtctgagaaggccaccacagtcatttcttcccttctgtcagaaataatttctcggtttggccttcccacctttatacagtccgataacggactggcctttactagtcaaatcacccaagcagtttctcaggctcttggtattcagtggaaccttcataccccttaccgtcctcaatcttcaggaaaggtagaacggactaatggtcttttaaagacatctcaccaagctcagcctccaacttaaaaaggactggacagtatttttacctcttgcccttcacagaattagagcccgtcctcgagaagctacagggtacagtccatttgaacttttatatggacgcactttcttgctcagccccaacctcgttccagacaccagccctctaggcgactatcttccagtcctctggcaggctagacaggaaatccaccaggctgctaatcttctcttgtctactccagattcccaactatatgaagacaccctagctggacgatcagttcttattaagaacctgacccctcaaactctacaacctcgatggactggaccctacttagtcatctatagtaccccaactgccgtccgcctgcaggatcctccccactgggttcaccgttccagaataaagctgtgcccatcggacaaccagcctaatctctcttcttcctcctggaagtcacaagtactccccactacttcccttaaagtcactctcatttctgaagaacagtaataacccttatgagcctaatacatcccttcattctattagctctattcatccttaccctactttttgcaacagggctttacacagtcaccccccctacttggactgaaccccaaaaacttgtcatccctactatcttctgtttactcatactcccattcactattctcaactactcataaatgccctaatcttgtttacattgcctgtttacactgtttctctaagccatcacagctggtatctcctggtgctatccccaaaccgccactcttaactccctcttagagtggatagatgatatttgctggcagggcaacctccaatattttcactctgatgaagttctattctttacttttatactcactcttattctcattcccattcttatgccaccctctacctctccccagctatctccaccacactatcaatcttactctctcctagccgtttctaatccctccttagcgaataattgctggctttgcatttccctttcttcctgcacctacacagctgcccccgccttatatacagactgggcaacatctcctgtctccctacacctccaaatttcctttaacagccctcatctttaccctcctgaagaacttcttcactttctagacaggtccagcaaggcctccccagacatttcacatcagcaagctgccgccctcctccacacttacttaaaaaacctttctccttatatcaactctactccccccacatttggatccctcacaacacaaactacttttcctgtggctgctcctttatgtatctctcagcaaagacccactggaattcccctgggtaacctttcaccttcttgatgttcattcactcttcatctccaaagcccaactacacacatcactgaaacaactggagccttccagctccgtattacagataagccttttatcaatacaggcaaacttaaaaacattagaagtaattattgcttaggaagacaccctgtatttcactccatccttggctaccttccccttgctcgtcagaccctcctcccaggccttcttgttatacccagccccgtaaataacagtgaaaggttgctcatagacactcgacgttttctcatacaccatgaaaattgaacctctccctctacacagttaccccatcagtccccattacaacctctgacggctgccgccctagctggatccctaggagtctgggtacaagacacccctttcagcactccttctcatctttttactttgcatttccagttttgcctggcacaagctctcttcttcctctgtggatcctctacctacatgtgtctacctgctaactggacaggcacatgcacactcattttccttaatcccaaaattcaatttgcaaatgggaccaaagagcttcctgttcctctcatgacaccgacatgacaaaaaagggttattccactaattcccttgcttgtcggtttaggactttctgcctcctctattgctctcggtactggaatagaaggcatttcaacctctgtcacaaccttccatagcctctctaatgacttctccactagcatcacagacatatcttaaactttatcagtacttcaggcccaagttgactctctggctgcagttgtcctccaaaactgccaaggccttgacttactcactgctgaaaaaggaaggcgctgtgtgtatgtgtgtgtgtatatatatatatatatatatatatatatattttttttttttttttttttttttttttttgagacggagtcttgctctgtcacccaggcagtggcgcatctcggctcactgctcactgcaagctccacctcctgggttcatgccattctcctgcctcagcctcccaagtagctgggactataggcgcctgccaccacgcccggctaattttttgtatttttttagtacagacagggtttcaccatgttagccaggatggtctcgatctcctgacctcatgatccgcctgcctcggcctcccaaagtgctggggttataggcgtgggccactgcgcccggccgggctctgtatatttttaaatgaagagtgttctttttacctaaatcaatctggcctggtgtatgacaatataaaaaaactcaaggacagagtccaaaaacttgccaaccaagcaagtaattatgctgaacccccttgggcactctctaatcggatgtcctgggtcctcccaattcttagtcctttaatacctgtttttctccttctcttatttggaccttgtgtcttccgtttggtttctcagttcatccaaaaccatatccaggccatcaccaatcattctatatgacaaatgctccttctaacaaccccacagtatcactccttaccacaaaatcttccttcagcttaatctctcccactctaggttcccacaccacccctaataccgctcgaagcagccctgaggaacatcgcccattatctctccatactaccccccaaaattttcaccactccaacacttcaacactattttgttttatttttcttattaatataagaagacaggaatgtctggcctctgagccaaggcctgcatgtatacatccagatggcctgaaggaactgaagaatcacaaaagaagtgaaaatggctgattcctgccttaactgatgacattaccctgtgaaattccttctcctggctcagaagctcccccaccaagcaccttgtgacccccccgcccctgcctgccagagaacaaccccctttgactgtagttttccactacccacccaaatcctataaaactgccccacccctaacaccctttgctgactctcttttgggactcagcccacctgcacccaggtgaaataaacagctttattgctcacacaaagcctgtttggaggtctcttcacacggatgcccgtgacaagtgcctgccaccacatcccactaatttttgtatttttagtagagatggggtttcaccatgttggccaggctggtcttgaacgcctgacctcaggtgatccacctgcctcggccttccaaagtgctgagattacaggcgtaagcccctgcacccggccctgttttttttttttttttttttttttacatcccggagtcacactggatatctgaatgtgcttaaaataaaattcacatctcattctggaagtgtttattaaatgctgtccctgcattcatgtgaacatcacagcccagcggttagatgtgcagactccaacgcctgactgcctgggtctgtcacttactagctgtatgaccttggatgggttacttaacatttctgggcactggtttctcattagtaaaatgaagaatgggcgcctgtagtcccagctacttgggagcctgaggcaggagaatcgctttaacccgggagacgaggttgcagtgagcctaggtcccgccattgcactccagcctgggccacagagcgaggctccatctcaaaaaataaaatttaaaaaaaaaaaattcagctttcacggagaattactactgcctggtgccatcagatcccaaatactggaggcattcccaatgttctgttcacaaactgtgcaatctgtgatagcccctcttgtgaatataatcaaagtgaaagatgccagtatacttattgctatgcttaaaagaactgcagatctatcatatccttttgaaaccaaaaaatgtggaagtctccctggctagatgctgtgtgtccacgtatcctgcaccaattgcttgaaagtcacatgacaacctttcttcctttagggaaggaagcaagcaaggtaggactctgtgtgttacagccagtgtgggtaactaaggactgagggaggtgtgggcacttgcatagctagtgccgccaataccataggagcgttgacactaaacggcacttctctattaagttgccctgctgtcttctaacgagtcattttgaaaaacggttgtccgtttttcaactacttgggtgagggcagcttcatgaaaaaagctcatcgtatgttaaagaaggtagggtttcaattgtgagctataaagccaccagaggagatttctcctatagaaggaaggtgtgtttcctgcttggacacctgaatttgcaacccatcctttcttttttcctttttccttttttttttttgcaacccatccgttctatctttgtagcctcagctcctaccatagtgcctgtcacggagcagctaatcgacacagtgacgcgtgtaagttatttgaagccacttcctgcgcagtggaacgtccccgccaagtctcccggcactgctgggtgtagtcccaattaaaacactaggtttcaacaacacaaggagggtccgcagggtccccggactacccaccaagggtcggctctgctttgaaacgcagctgcaggaggccgaggagcgccgcgatgccccagttatccaggccattccttccccggccgaagctggccgcctgcatgcacctaaccttgcgctaggcactggctgcggttaatccagcccgcgctcggtcctccgcgatcccagcctcccttgcgccaaggacacgtccggcggcttcgcggggcctgtctacgccaccgcggcgcttttctatgatccgctgccgctttccgagcgagtgtcatggcggccggcgtcgagttggcaggagtaacccacggaactgaggaaagtcattagagctgagaaagaagtggcccaatctggacggtgggaattcgtgggaatgagcagaaggccctccgtaggtgactgtgtcactagaggcgggcccctggtaaaattccaggccaggcctctgcgtttctaggcagaacctggagtcggccttgcctgagaacccagctttgtgttatcgtatcctgtctcgcgaaggcaggcgttcaaggatatttggtcggatcgcccggcggcgctaaacgttttcttttttccgagcggaccgggtcgttctctaaactcgccgcgatgtcgtcctggcttgggggcctcggctccggattgggccagtctctgggtcaagtcgggggcagcctggcttccctcactggccagatatcaaactttacaaaggatatgctgatggagggcacggaggaagtggaaggtaacagctggagcgagggaagggagggcttttctaagaccctgggaacgtccgtttggtccctacttccatcagtcaggagacgcggacaggtcgcaaaggaatgctgctcctcccttttttcttcacacacctcctcttgcctcttctcaacagattttctatgatgaaagaccactgggggccaggggaagagtcctggttctcctctctttaaatattctggatatctcaaagtacagtagagtgaaactgctcctacgttaagtcgagtttattttcgtttggttgatccacgcccaccactttgccctcagtttgggggctgatctcattcttaacatcttcctgtattctgacccagtttaaagaattgtatatctgttttctatttttgtaacagttgaaataactcataatttaaacacttggtgagttttgctcttttctgtcttgagtatgttatgaaacacggccatgtttttctatttaattattttttacttttccttattgtgatgatacattatagcgttccagctgagaatgtatttttgtgtataatcgcccatttcgcccatatttcgacagtagaatagggaagacaaccctattcttaaggtacccttagcaatcttcactcatttttgaagtcctcaatctcgttttactaatgaatagtgacccagagttacatggtaatcaatggctacattagttactatccattaattactattttgatttcttggcattttagtaagcaatgtttggatcaaaacagtttttaagtttcaatctaagtctgctccagggagataatgggctgttcttttgggtgagagctgctgctttgacaattgtatttcttataaataaatttaataaattagta

SEQ ID NO: 109373 - DNA, 936 bp, Homo sapiens
  Payload ID: 1477
  Gene Symbol: ATXN3
  Gene Name: ataxin 3
  ENST ID: ENST00000621269
  CDS Start-End: 70-936
gagaggggcagggggcggagctggagggggtggttcggcgtgggggccgttggctccagacaaataaacatggagtccatcttccacgagaaacaagaaggctcactttgtgctcaacattgcctgaataacttattgcaaggagaatattttagccctgtggaattatcctcaattgcacatcagctggatgaggaggagaggatgagaatggcagaaggaggagttactagtgaagattatcgcacgtttttacagcagccttctggaaatatggatgacagtggttttttctctattcaggttataagcaatgccttgaaagtttggggtttagaactaatcctgttcaacagtccagagtatcagaggctcaggatcgatcctataaatgaaagatcatttatatgcaattataaggaacactggtttacagttagaaaattaggaaaacagtggtttaacttgaattctctcttgacgggtccagaattaatatcagatacatatcttgcacttttcttggctcaattacaacaggaaggttattctatatttgtcgttaagggtgatctgccagattgcgaagctgaccaactcctgcagatgattagggtccaacagatgcatcgaccaaaacttattggagaagaattagcacaactaaaagagcaaagagtccataaaacagacctggaacgagtgttagaagcaaatgatggctcaggaatgttagacgaagatgaggaggatttgcagagggctctggcactaagtcgccaagaaattgacatggaagatgaggaagcagatctccgcagggctattcagctaagtatgcaaggtagttccagaaacatatctcaagatatgacacagacatcaggtacaaatcttacttcagaagagtcggaagagacgagaagcctactttga

SEQ ID NO: 109374 - DNA, 1074 bp, Homo sapiens
  Payload ID: 1477
  Gene Symbol: ATXN3
  Gene Name: ataxin 3
  ENST ID: ENST00000617719
  CDS Start-End: 23-928
cgttggctccagacaaataaacatggagtccatcttccacgagaaacaagaaggctcactttgtgctcaacattgcctgaataacttattgcaaggagaatattttagccctgtggaattatcctcaattgcacatcagctggatgaggaggagaggatgagaatggcagaaggaggagttactagtgaagattatcgcacgtttttacagcagccttctggaaatatggatgacagtggttttttctctattcaggttataagcaatgccttgaaagtttggggtttagaactaatcctgttcaacagtccagagtatcagaggctcaggatcgatcctataaatgaaagatcatttatatgcaattataaggaacactggtttacagttagaaaattaggaaaacagtggtttaacttgaattctctcttgacgggtccagaattaatatcagatacatatcttgcacttttcttggctcaattacaacaggaaggttattctatatttgtcgttaagggtgatctgccagattgcgaagctgaccaactcctgcagatgattagggtccaacagatgcatcgaccaaaacttattggagaagaattagcacaactaaaagagcaaagagtccataaaacagacctggaacgagtgttagaagcaaatgatggctcaggaatgttagacgaagatgaggaggatttgcagagggctctggcactaagtcgccaagaaattgacatggaagatgaggaagcagatctccgcagggctattcagctaagtatgcaaggtagttccagaaacatatctcaagatatgacacagacatcaggtacaaatcttacttcagaagagcttcggaagagacgagaagcctactttgaaaatcacaactcagaagtagatgaaggaaaattctgatcagctgacatcctcttaataatgtttcagacagcagcaaaagcagcaacagcagcagcagcagcagcagcagggggacctatcaggacagagttcacatccatgtgaaaggccagccaccagttcaggagcacttgggagtgatc

SEQ ID NO: 109375 - DNA, 1044 bp, Homo sapiens
  Payload ID: 1477
  Gene Symbol: ATXN3
  Gene Name: ataxin 3
  ENST ID: ENST00000620536
  CDS Start-End: 70-1044
gagaggggcagggggcggagctggagggggtggttcggcgtgggggccgttggctccagacaaataaacatggagtccatcttccacgagaaacaagaaggctcactttgtgctcaacattgcctgaataacttattgcaaggagaatattttagccctgtggaattatcctcaattgcacatcagctggatgaggaggagaggatgagaatggcagaaggaggagttactagtgaagattatcgcacgtttttacagcagccttctggaaatatggatgacagtggttttttctctattcaggttataagcaatgccttgaaagtttggggtttagaactaatcctgttcaacagtccagagtatcagaggctcaggatcgatcctataaatgaaagatcatttatatgcaattataaggaacactggtttacagttagaaaattaggaaaacagtggtttaacttgaattctctcttgacgggtccagaattaatatcagatacatatcttgcacttttcttggctcaattacaacaggaaggttattctatatttgtcgttaagggtgatctgccagattgcgaagctgaccaactcctgcagatgattagggtccaacagatgcatcgaccaaaacttattggagaagaattagcacaactaaaagagcaaagagtccataaaacagacctggaacgagtgttagaagcaaatgatggctcaggaatgttagacgaagatgaggaggatttgcagagggctctggcactaagtcgccaagaaattgacatggaagatgaggaagcagatctccgcagggctattcagctaagtatgcaaggtagttccagaaacatatctcaagatatgacacagacatcaggtacaaatcttacttcagaagagcttcggaagagacgagaagcctactttgaaaagccgaggcaggcagattacgaaagacaacagcagcaaaagcagcaacagcagcagcagcagcagcagcaggggcctatcaggacagagttcacatccatgtga

SEQ ID NO: 109376 - DNA, 1717 bp, Homo sapiens
  Payload ID: 1478
  Gene Symbol: ATXN3L
  Gene Name: ataxin 3-like
  Uniprot ID: Q9H3M9
  ENST ID: ENST00000380622
  CDS Start-End: 19-1086
ctcacggatacaattaacatggatttcatctttcatgagaaacaggaaggtttcctgtgtgctcagcactgtctgaacaatctattgcaaggagaatattttagccctgtggaattagcctcaattgcacatcagctagatgaagaagagaggatgagaatggcagaaggaggagtcaccagtgaagagtatcttgcatttttacagcagccttcagaaaacatggatgataccggtttcttctccattcaggtaataagcaatgccttgaagttctggggtttagagatcatccatttcaataatcctgaatatcagaagctcggcattgatcctataaatgaaagatcttttatatgtaattataaacaacactggtttactattagaaaatttggaaaacactggtttaacttgaattctctcttggcgggtccagaattaatatcagatacatgccttgcaaatttcttggctcgattacaacaacaagcatattctgtatttgttgtcaagggtgatctgccagactgtgaagctgaccaactcctgcagatcatcagtgtcgaagagatggatacaccaaaacttaatggaaaaaaattagtaaaacaaaaagagcatagagtctataaaacagtccttgaaaaagtatcagaagaaagtgatgagtctggaacatcagaccaagatgaggaggattttcagagggcccttgaactaagccgccaagaaaccaatagagaagatgaacatctccgcagtactattgagttaagcatgcaaggtagttccggaaacacatcgcaagatcttccaaagacatcatgtgtaactcctgcttcagaacagccgaagaaaataaaagaagactattttgaaaagcatcagcaggaacagaagcagcagcaacaacagtcagatctgccgggccacagttcatacctacacgaaaggccaacaacaagttcgagagcaattgagagtgatctcagtgatgacatcagtgaaggcacagtacaggccgctgtcgacaccattttagaaattatgagaaagaatttgaaaatcaaaggggaaaaataatgcctttaaaaataatttagatagtcatactttccaacattatcctgtgtgattatactgtaggatccattttggtcatctgtcaaagagatgaggaaataaggcttttagacagtttgcaaacaaaatgacgagagagatgtgggactaaataatgatcgttcaactactagccaaggagacattcagcaattaattaaatttaaattagctttcaaaatgttcctttgatttttgagcctgcaatatctaatgtgtctaaaattgggtcatttttcatggatctttttgtataccaacgaattagctcttgccatagaactttttccatatagtctcttctattgtagataatgtggctcattttggttgcttttatttctcatgaaacaatttaacctttcagggaagtgtctcttgtctgtgttgatcatagtaacggttttagaaggataaacagttctccctccaactatgtactgtgcgcttaagtatattcttatgttatttcctctgatcacaatttctgctacctggtccttaattattttccacaagtctttcgaaatatggtaatattttctgaggttttgttttttacgccctctgtggtaagatcattatttcatga

SEQ ID NO: 109377 - DNA, 837 bp, Homo sapiens
  Payload ID: 1478
  Gene Symbol: ATXN3L
  Gene Name: ataxin 3-like
  ENST ID: ENST00000622204
  CDS Start-End: 19-504
ctcacggatacaattaacatggatttcatctttcatgagaaacaggaaggtttcctgtgtgctcagcactgtctgaacaatctattgcaaggagaatattttagccctgtggaattagcctcaattgcacatcagctagatgaagaagagaggatgagaatggcagaaggaggagtcaccagtgaagagtatcttgcatttttacagcagccttcagaaaacatggatgataccggtttcttctccattcagtggtttaacttgaattctctcttggcgggtccagaattaatatcagatacatgccttgcaaatttcttggctcgattacaacaacaagcatattctgtatttgttgtcaagggtgatctgccagactgtgaagctgaccaactcctgcagatcatcagtgtcgaagagatggatacaccaaaacttaatggaaaaaaattagtaaaacaaaaagagcatagagtctataaacagtccttgaaaaagtatcagaagaaagtgatgagtctggaacatcagaccaagatgaggaggattttcagagggcccttgaactaagccgccaagaaaccaatagagaagatgaacatctccgcagtactattgagttaagcatgcaaggtagttccggaaacacatcgcaagatcttccaaagacatcatgtgtaactcctgcttcagaacagccgaagaaaataaaagaagactattttgaaaagcatcagcaggaacagaagcagcagcaacaacagtcagatctgccgggccacagttcatacctacacgaaaggccaacaacaagttcgagagcaattgagagtgatc

SEQ ID NO: 109378 - DNA, 7224 bp, Homo sapiens
  Payload ID: 1479
  Gene Symbol: ATXN7
  Gene Name: ataxin 7
  Uniprot ID: O15265
  ENST ID: ENST00000295900
  CDS Start-End: 551-3229
aaagggtgaaagagaaacttggcgacctcccggaggagttcgcgaagcgaccaggagcgtgttgccatcgtcctcacccggcacccaattccaccacagagtcgggatttcgtcggtgatcgtgatggggtgcttttatttttctctttgattttcaaaaaatgtctatgtgactgtccctatcttaaggggaagttgaaagtgggggcgggggtgctcaatgagaaacgttgccttgtgtgtagttgtttggagcacactgcaaattatattggcatctctttccaaaagtcactttgattcaacttcgatagctttctcgtaaatggcacgtttaggtggtgagaggtggatgaggaaacaggcaccagtgcagctgatttgacctccagtgggatagatacgattagcaccaggatcgtgtctcattttgaacccagatctgaacagaattaagacgaacgagctttcacaattgcagcagatgaagatccattggtaaattgatcaggatttttggcctaccctccaaagaaaaggagcggaaagaatgtcggagcgggccgcggatgacgtcaggggggagccgcgccgcgcggcggcggcggcgggcggagcagcggccgcggccgcccggcagcagcagcagcagcagcagcagcagcagccgccgcctccgcagccccagcggcagcagcacccgccaccgccgccacggcgcacacggccggaggacggcgggcccggcgccgcctccacctcggccgccgcaatggcgacggtcggggagcgcaggcctctgcccagtcctgaagtgatgctgggacagtcgtggaatctgtgggttgaggcttccaaacttcctgggaaggacgggacagaattggacgaaagtttcaaggagtttgggaaaaaccgcgaagtcatggggctctgtcgggaagacatgccaatatttggtttctgtccagcccatgatgatttctacttggtggtgtgtaacgactgtaatcaggttgtcaaaccgcaggcatttcaatcacattatgaaagaagacatagctcatccagcaagccgcctttggccgttcctcccacttcagtattttccttcttcccttctctgtccaaaagcaaaggaggcagtgcaagtggaagcaaccgttcttccagtggaggtgttcttagcgcatcctcatcaagttccaagttgttgaaatcacccaaagagaaactgcagctcagggggaacaccaggccaatgcatcccattcagcaaagtagagttccccatggtagaatcatgacaccctctgtgaaagtggaaaagattcatccgaaaatggatggcacactactgaaatctgcggtggggccaacctgtcctgctactgtgagttccttagtcaagcctggccttaactgcccctcaataccaaagccaaccttgccttcacctggacagattctgaatggcaaagggcttcctgcaccgcccactctggaaaagaaacctgaagacaattccaataataggaaatttttaaataagagattatcagaaagagagtttgatcctgacatccactgtggggttattgatctcgacaccaagaagccctgcacccggtctttgacatgcaagacacattccttaacccagcgcagggctgtccagggtagaagaaaacgatttgatgtgttattagccgagcacaaaaacaaaaccagggaaaaggaattgattcgccatccggactctcagcaaccaccgcagcctctcagggacccgcatcccgcccctcctagaacgtcacaggagccgcaccaaaaccctcacggagtgattccttccgaatcaaagccttttgtagctagtaaacctaaacctcacacccccagtcttccaaggcctccaggctgccctgctcagcaaggtgggagtgcccccattgaccctcctccagtccatgaatctccacaccctcccctgcctgccactgagccagcttctcggttatccagtgaggagggcgaaggcgatgacaaagaagagtctgttgaaaaactggactgtcattattcaggtcatcatcctcagccagcatctttttgcacatttgggagccggcagataggaagaggctattacgtgtttgactccaggtggaatcgacttcgctgcgccctcaacctcatggtggagaagcatctgaatgcacagctatggaagaaaatcccaccagtgcccagtaccacctcacccatctccacacgtattcctcaccggacaaactctgtgccgacatcacaatgtggagtcagctatctggcagcagccaccgtctctacatccccagtcctgctctcatctacctgcatctccccaaatagcaaatcggtaccagctcatggaaccacactaaatgcacagcctgctgcttcaggggcgatggatcctgtgtgcagtatgcaatccagacaagtgtcctcttcatcctcatccccttccacgccctctggcctttcctcggttccttcctcccccatgtccaggaaacctcagaaattgaaatccagcaaatctttgaggcccaaggagtcttctggtaacagcactaactgtcaaaatgccagtagcagtaccagtggcggctcaggaaagaaacgcaaaaacagttccccactgttggttcactcttcctcctcctcttcctcctcctcctcttcttctcattccatggagtcttttaggaaaaactgtgtggctcactctgggcctccctacccctcaacggtaacatcttcccatagcatcggcctcaactgtgtgacgaataaagcaaatgcggtgaacgtccggcatgaccagtcagggaggggcccccccaccgggagccctgctgaatccatcaagaggatgagtgtgatggtgaacagcagtgattctactctttctcttgggccattcattcaccagtccaatgaactgcctgtcaactcccacggcagtttttcccactcacacactcctctagacaaactcataggaaagaaaagaaagtgctcacccagctcgagcagcatcaacaacagcagcagcaaacccacaaaggttgccaaagtgccagccgtgaacaatgtccacatgaaacacacaggcaccatcccaggggcacaaggactgatgaacagttccctccttcatcagccaaaggcacgtccctgacagctgaaaatagcacggggaggaataatgcggacacttttgaggacaagttacacctccactcagcactctggactccacgatgcctttgagtctgttttcccaacctcctgtgggcctcaagggtagaaacctgccgggctgttgttttaacgaggatttccctgaagctatgtctctagcagtgagtactcataaaggacactggatcaagttcagccaccgaattgcttttatcagtgttaaagtggtctgaactgcttgctaccaatctgtgagaagtttttgtttttgttttgttttttaacttgcagtatatcacagagccactcttcaagtagattggctgggcaaaagaatgttttggcaagagcgttactgtagacctttctccctccttccttttactaccatttttttttaacactgtcatctgtaggtcactctccagcagttaggcaccttaactggagaccagaaaccttccagagaacacagggctgcatcccgagcaaccctctgaagaagggaattaggctttagattttgatagcaatgttccaggaatgaaatatagatgttagcccaagacaccatgacaaaatagcccagccttttgagagtaatttgggaaaagaagctgtcagaagtttctaacttacaaactggtttgaaatttttgatgcccagacagcaagtataaatcattttggaggcttacttttcatgatacaaaagcaattctgtgtgatttttttttttaagaagaaagaaaatgcaagctagttttgagaaaggaaggccaaattgggtcgggggagggtgggagtgaggaagttaaaatcactatagggagaaaaaacttttttcaagatttccaaagagatgaaattttcttaatccttttaagttttcatagtaaacagtatggcagattgggttggttgtcctacctggtctatttttaaaagtcaccttttaaagtgacattattagatacacttaaatgtttccaaggcactctctacattacccttgtttttctctttggatactgtcctgggactaagtgtagatttctgcttcaagcacttctggcattgtgtgtttttgtatgcactccccttcatgccacttcagatgtttatttggatgtggttggggacgagagcagacaccaaggaaagggagttggagagaatgtaagtcctgacctgaaggtcttttgtgatgcatgtataggattgccctgacacacaccctcctttcttgggattataccagccatcttcctgagagttttggagccctctaggatattttttctagtaccccaccccccacccctaaagaaagaccttaatatgttaaaacagcattgcttggagaaggtgtcattgaattccgggacgagccggagcctttaaatgggtgcttccaccactacaggctcctgacacgagtaacaggcactgttgcttagaagaacacacgaagttgccgaacacagggtaaaatttccaaggcgctgatcgttgccctggccagggcctgatgagagccagtcagtacattctttttttcctacagttcttgggtttcaaacttcagtttcagggaatttcaagtcaacaacaggtagaatgaataaacttggttaccagcctaataatgtgaattgctacagaattattcttattatgtaagaaaacaaaaactttatgcagatactttagctataaattgatgtaaaatactgatttttttaaaggaaggagagaacagtatcttgttcaattattatgcaatcaatcagtaaatgtttttaaaatgatactacaggagagcttagtaaggagagggcatggatgggccagtttggcatagttgggagaaatcagtctggtttccatcccagtcggggaagagagaggtgagagggaatcagaacgtacctagttgattccttggtgacaagtgcaatggggtatgggtagaatttattttcagagccaagaggacttgatggttataaataaagttgcctttagcaatggaatttacagatcgatcatgttgttccgaaagatgtgaataggatccacaataacaagttgattcagactaatgtagatatttagattagcaagtattgaacatttgatttcttagactgaggttttaaatgaatttcattatttctcccggtaatacacagagcatcgggattaggaaattagccattttggattctgtctgccacaaacagacctattctaaacagtgctattaaattttagactgttgttcaaatattttattttctcctaaactactttttatggtgatgaataattaagaccatttaaaacacgggagtacaagtatttttttgaattaaattaacttgcaaaaaccaaatttgcagtggttgggttgtttctagacagactttggtatcaatttaaaaccaagataatttttatattctttccaatagaatttcatgacaactcctgcagttttcttaacctacaaaaaaaaaaaaaaagtgctgcaatgatgaacaaagaattatacaaaacctacttttgtatctttattttggaatttcttgttctattataaatatggaagtatccctatttcagaagacatattttgttaaaaatgaattgtacatatttaaatatgtatttttgcacaggtctttttttctgatatcctgttttggtacaattgagatcatctagtatttatttattaattaataaaagtaaatacctttttataatttgaagtggttcactgccaagccaatagttctagaacctgcctcctttacagttttaagggatgcctctgttctgtgaaaagtctttgtcccttttagtgtctcgggagtggattcatacagatgaagtgggcattgcttcttcctggttgcctggtttcccgatagactacatgtaactaagtgacacactgcttttcttttgttagtattttatgtgtgggagtatgtgactgcgtgtgtgtgtgcctgtgcgtgtgtgtgtatactcagcacatgtatgttactatgtgatgtggtttaaaactaatggaaaaaactgaaagtgcctgaaactagttttaagcttagacagaatctctttaaaaagacttgaatgttcagttgaacttttggagtttgctttttccacctaaatattgtttctaaaattttaggggcggagttgaaaaccaccaatgctggtaattttataaggtattttaaaattaagacctcttggttcatagtaattcaattggtgatggattgcctggtggcaccaagggttacagatctttttgtcagccagcaacttacacgatgtgtccgttttgttattcactcatgaaatacaatttaaaatatttaaaatattttgtattccaaaaatataatacaaagaagtacctctgagaacattgaaaaaaatgtataatttgaaaaatgtaacttataagggcagctgtcttcctgcaagagttctgttgccaaggaatttcttaatgtcgctcattctgtccagggggtttggggcgattgggctttgaaaaaatattcttaaaagtttgtttagcagaaaataatcacttttacattttgtgcaaaacattttacattttcagataatttaaatgagcactacatactgtcagtgtgaatgtagggccttgaaagcattttgcttttttttttttttttttttttttgagcttggttataaaagcaatctcctgtgttaaaaacgtgtgaatagtttgataatttgtacacataatcaagagcatctcagctggactttgtgttggctgctgtatagaacatgaacaaatgtcaagggatagaaaattactttggatatttaaaagagaagaaatatatagtctatttgttttgtaacaagtttctgtaaataaaataatttatactatttataagaaaa

SEQ ID NO: 109379 - DNA, 728 bp, Homo sapiens
  Payload ID: 1479
  Gene Symbol: ATXN7
  Gene Name: ataxin 7
  ENST ID: ENST00000474513
  CDS Start-End: 652-728
gaaaaagggtgaaagagaaacttggcgacctcccggaggagttcgcgaagcgaccaggagcgtgttgccatcgtcctcacccggcacccaattccaccacagagtcgggatttcgtcggtgatcgtgatggggtgcttttatttttctctttgattttcaaaaaatgtctatgtgactgtccctatcttaaggggaagttgaaagtgggggcgggggtgctcaatgagaaacgttgccttgtgtgtagttgtttggagcacactgcaaattatattggcatctctttccaaaagtcactttgattcaacttcgatagctttctcgtaaatggcacgtttaggtggtgagaggtggatgaggaaacaggcaccagtgcagctgatttgacctccagtgggatagatacgattagcaccaggatcgtgtctcattttgaacccaggctggagcgcagtggcacaatcgtggcttactgcagcgttgacctcctggcctcaagcagtcctcccactgcagcttctcaagaagccggggatacagatctgaacagaattaagacgaacgagctttcacaattgcagcagatgaagatccattggtaaattgatcaggatttttggcctaccctccaaagaaaaggagcggaaagaatgtcggagcgggccgcggatgacgtcaggggggagccgcgccgcgcggcggcggcggcgggcggagcagcggccgc

SEQ ID NO: 109380 - DNA, 3683 bp, Homo sapiens
  Payload ID: 1479
  Gene Symbol: ATXN7
  Gene Name: ataxin 7
  Uniprot ID: O15265
  ENST ID: ENST00000487717
  CDS Start-End: 265-2943
ctgccctggggccggccggccggctcctccataggtggctgcatttccgacttcgccctggctccagtccgggggcttgacgtgcaaacttcgccggagcgagctgagagggagggaccggcaagtgggaggaggcggcgggaggcgtctccgcttaagggagccggccgggtgccgccgctcggacggacgcgcggacggaaggaaggagcggggcagccgggccgggcccggggatgcaagcggccgaagggagcggaaagaatgtcggagcgggccgcggatgacgtcaggggggagccgcgccgcgcggcggcggcggcgggcggagcagcggccgcggccgcccggcagcagcagcagcagcagcagcagcagcagccgccgcctccgcagccccagcggcagcagcacccgccaccgccgccacggcgcacacggccggaggacggcgggcccggcgccgcctccacctcggccgccgcaatggcgacggtcggggagcgcaggcctctgcccagtcctgaagtgatgctgggacagtcgtggaatctgtgggttgaggcttccaaacttcctgggaaggacgggacagaattggacgaaagtttcaaggagtttgggaaaaaccgcgaagtcatggggctctgtcgggaagacatgccaatatttggtttctgtccagcccatgatgatttctacttggtggtgtgtaacgactgtaatcaggttgtcaaaccgcaggcatttcaatcacattatgaaagaagacatagctcatccagcaagccgcctttggccgttcctcccacttcagtattttccttcttcccttctctgtccaaaagcaaaggaggcagtgcaagtggaagcaaccgttcttccagtggaggtgttcttagcgcatcctcatcaagttccaagttgttgaaatcacccaaagagaaactgcagctcagggggaacaccaggccaatgcatcccattcagcaaagtagagttccccatggtagaatcatgacaccctctgtgaaagtggaaaagattcatccgaaaatggatggcacactactgaaatctgcggtggggccaacctgtcctgctactgtgagttccttagtcaagcctggccttaactgcccctcaataccaaagccaaccttgccttcacctggacagattctgaatggcaaagggcttcctgcaccgcccactctggaaaagaaacctgaagacaattccaataataggaaatttttaaataagagattatcagaaagagagtttgatcctgacatccactgtggggttattgatctcgacaccaagaagccctgcacccggtctttgacatgcaagacacattccttaacccagcgcagggctgtccagggtagaagaaaacgatttgatgtgttattagccgagcacaaaaacaaaaccagggaaaaggaattgattcgccatccggactctcagcaaccaccgcagcctctcagggacccgcatcccgcccctcctagaacgtcacaggagccgcaccaaaaccctcacggagtgattccttccgaatcaaagccttttgtagctagtaaacctaaacctcacacccccagtcttccaaggcctccaggctgccctgctcagcaaggtgggagtgcccccattgaccctcctccagtccatgaatctccacaccctcccctgcctgccactgagccagcttctcggttatccagtgaggagggcgaaggcgatgacaaagaagagtctgttgaaaaactggactgtcattattcaggtcatcatcctcagccagcatctttttgcacatttgggagccggcagataggaagaggctattacgtgtttgactccaggtggaatcgacttcgctgcgccctcaacctcatggtggagaagcatctgaatgcacagctatggaagaaaatcccaccagtgcccagtaccacctcacccatctccacacgtattcctcaccggacaaactctgtgccgacatcacaatgtggagtcagctatctggcagcagccaccgtctctacatccccagtcctgctctcatctacctgcatctccccaaatagcaaatcggtaccagctcatggaaccacactaaatgcacagcctgctgcttcaggggcgatggatcctgtgtgcagtatgcaatccagacaagtgtcctcttcatcctcatccccttccacgccctctggcctttcctcggttccttcctcccccatgtccaggaaacctcagaaattgaaatccagcaaatctttgaggcccaaggagtcttctggtaacagcactaactgtcaaaatgccagtagcagtaccagtggcggctcaggaaagaaacgcaaaaacagttccccactgttggttcactcttcctcctcctcttcctcctcctcctcttcttctcattccatggagtcttttaggaaaaactgtgtggctcactctgggcctccctacccctcaacggtaacatcttcccatagcatcggcctcaactgtgtgacgaataaagcaaatgcggtgaacgtccggcatgaccagtcagggaggggcccccccaccgggagccctgctgaatccatcaagaggatgagtgtgatggtgaacagcagtgattctactctttctcttgggccattcattcaccagtccaatgaactgcctgtcaactcccacggcagtttttcccactcacacactcctctagacaaactcataggaaagaaaagaaagtgctcacccagctcgagcagcatcaacaacagcagcagcaaacccacaaaggttgccaaagtgccagccgtgaacaatgtccacatgaaacacacaggcaccatcccaggggcacaaggactgatgaacagttccctccttcatcagccaaaggcacgtccctgacagctgaaaatagcacggggaggaataatgcggacacttttgaggacaagttacacctccactcagcactctggactccacgatgcctttgagtctgttttcccaacctcctgtgggcctcaagggtagaaacctgccgggctgttgttttaacgaggatttccctgaagctatgtctctagcagtgagtactcataaaggacactggatcaagttcagccaccgaattgcttttatcagtgttaaagtggtctgaactgcttgctaccaatctgtgagaagtttttgtttttgttttgttttttaacttgcagtatatcacagagccactcttcaagtagattggctgggcaaaagaatgttttggcaagagcgttactgtagacctttctccctccttccttttactaccatttttttttaacactgtcatctgtaggtcactctccagcagttaggcaccttaactggagaccagaaaccttccagagaacacagggctgcatcccgagcaaccctctgaagaagggaattaggctttagattttgatagcaatgttccaggaatgaaatatagatgttagcccaagacaccatgacaaaatagcccagccttttgagagtaatttgggaaaagaagctgtcagaagtttctaacttacaaactggtttgaaatttttgatgcccagacagcaagtataaatcattttggaggcttacttttcatgatacaaaagca

SEQ ID NO: 109381 - DNA, 346 bp, Homo sapiens
  Payload ID: 1479
  Gene Symbol: ATXN7
  Gene Name: ataxin 7
  ENST ID: ENST00000522345
  CDS Start-End: 1-346
gacaaactcataggaaagaaaagaaagtgctcacccagctcgagcagcatcaacaacagcagcagcaaacccacaaaggttgccaaagtgccagccgtgaacaatgtccacatgaaacacacaggcaccatcccaggggcacaaggactgatgaacagttccctccttcatcaggatatctcctcaccttgcttacgaacaggaatttcagcaacatcaccccagagccctgacttaaaatccaaaggcacgtccctgacagctgaaaatagcacggggaggaataatgcggacacttttgaggacaagttacacctccactcagcactctggactccacgatgcc

SEQ ID NO: 109382 - DNA, 2741 bp, Homo sapiens
  Payload ID: 1479
  Gene Symbol: ATXN7
  Gene Name: ataxin 7
  Uniprot ID: O15265
  ENST ID: ENST00000484332
  CDS Start-End: 169-2412
gttttctgttgatctgccaggacctttgtaattcaagtgctttttacagtagtagcaaatgttacataagcccaaacatggagcatatttggagttggtgggcagacccaaatcatgatgcaagcctgcagtagcaagtgtgcaatgaagcacaaccaaattctgtgaatggaaggtagcaagacgcctctccaaagcagcccttctgcgcaggagctgaaagctccactggaaagaagacatagctcatccagcaagccgcctttggccgttcctcccacttcagtattttccttcttcccttctctgtccaaaagcaaaggaggcagtgcaagtggaagcaaccgttcttccagtggaggtgttcttagcgcatcctcatcaagttccaagttgttgaaatcacccaaagagaaactgcagctcagggggaacaccaggccaatgcatcccattcagcaaagtagagttccccatggtagaatcatgacaccctctgtgaaagtggaaaagattcatccgaaaatggatggcacactactgaaatctgcggtggggccaacctgtcctgctactgtgagttccttagtcaagcctggccttaactgcccctcaataccaaagccaaccttgccttcacctggacagattctgaatggcaaagggcttcctgcaccgcccactctggaaaagaaacctgaagacaattccaataataggaaatttttaaataagagattatcagaaagagagtttgatcctgacatccactgtggggttattgatctcgacaccaagaagccctgcacccggtctttgacatgcaagacacattccttaacccagcgcagggctgtccagggtagaagaaaacgatttgatgtgttattagccgagcacaaaaacaaaaccagggaaaaggaattgattcgccatccggactctcagcaaccaccgcagcctctcagggacccgcatcccgcccctcctagaacgtcacaggagccgcaccaaaaccctcacggagtgattccttccgaatcaaagccttttgtagctagtaaacctaaacctcacacccccagtcttccaaggcctccaggctgccctgctcagcaaggtgggagtgcccccattgaccctcctccagtccatgaatctccacaccctcccctgcctgccactgagccagcttctcggttatccagtgaggagggcgaaggcgatgacaaagaagagtctgttgaaaaactggactgtcattattcaggtcatcatcctcagccagcatctttttgcacatttgggagccggcagataggaagaggctattacgtgtttgactccaggtggaatcgacttcgctgcgccctcaacctcatggtggagaagcatctgaatgcacagctatggaagaaaatcccaccagtgcccagtaccacctcacccatctccacacgtattcctcaccggacaaactctgtgccgacatcacaatgtggagtcagctatctggcagcagccaccgtctctacatccccagtcctgctctcatctacctgcatctccccaaatagcaaatcggtaccagctcatggaaccacactaaatgcacagcctgctgcttcaggggcgatggatcctgtgtgcagtatgcaatccagacaagtgtcctcttcatcctcatccccttccacgccctctggcctttcctcggttccttcctcccccatgtccaggaaacctcagaaattgaaatccagcaaatctttgaggcccaaggagtcttctggtaacagcactaactgtcaaaatgccagtagcagtaccagtggcggctcaggaaagaaacgcaaaaacagttccccactgttggttcactcttcctcctcctcttcctcctcctcctcttcttctcattccatggagtcttttaggaaaaactgtgtggctcactctgggcctccctacccctcaacggtaacatcttcccatagcatcggcctcaactgtgtgacgaataaagcaaatgcggtgaacgtccggcatgaccagtcagggaggggcccccccaccgggagccctgctgaatccatcaagaggatgagtgtgatggtgaacagcagtgattctactctttctcttgggccattcattcaccagtccaatgaactgcctgtcaactcccacggcagtttttcccactcacacactcctctagacaaactcataggaaagaaaagaaagtgctcacccagctcgagcagcatcaacaacagcagcagcaaacccacaaaggttgccaaagtgccagccgtgaacaatgtccacatgaaacacacaggcaccatcccaggggcacaaggactgatgaacagttccctccttcatcagccaaaggcacgtccctgacagctgaaaatagcacggggaggaataatgcggacacttttgaggacaagttacacctccactcagcactctggactccacgatgcctttgagtctgttttcccaacctcctgtgggcctcaagggtagaaacctgccgggctgttgttttaacgaggatttccctgaagctatgtctctagcagtgagtactcataaaggacactggatcaagttcagccaccgaattgcttttatcagtgttaaagtggtctgaactgcttgctaccaatctgtgagaagtttttgtttttgttttgttttttaacttgcagtatatcacagagcca

SEQ ID NO: 109383 - DNA, 6842 bp, Homo sapiens
  Payload ID: 1479
  Gene Symbol: ATXN7
  Gene Name: ataxin 7
  Uniprot ID: O15265
  ENST ID: ENST00000538065
  CDS Start-End: 111-2948
atctgaacagaattaagacgaacgagctttcacaattgcagcagatgaagatccattggtaaattgatcaggatttttggcctaccctccaaagaaaaggagcggaaagaatgtcggagcgggccgcggatgacgtcaggggggagccgcgccgcgcggcggcggcggcgggcggagcagcggccgcggccgcccggcagcagcagcagcagcagcagcagcagcagccgccgcctccgcagccccagcggcagcagcacccgccaccgccgccacggcgcacacggccggaggacggcgggcccggcgccgcctccacctcggccgccgcaatggcgacggtcggggagcgcaggcctctgcccagtcctgaagtgatgctgggacagtcgtggaatctgtgggttgaggcttccaaacttcctgggaaggacgggacagaattggacgaaagtttcaaggagtttgggaaaaaccgcgaagtcatggggctctgtcgggaagacatgccaatatttggtttctgtccagcccatgatgatttctacttggtggtgtgtaacgactgtaatcaggttgtcaaaccgcaggcatttcaatcacattatgaaagaagacatagctcatccagcaagccgcctttggccgttcctcccacttcagtattttccttcttcccttctctgtccaaaagcaaaggaggcagtgcaagtggaagcaaccgttcttccagtggaggtgttcttagcgcatcctcatcaagttccaagttgttgaaatcacccaaagagaaactgcagctcagggggaacaccaggccaatgcatcccattcagcaaagtagagttccccatggtagaatcatgacaccctctgtgaaagtggaaaagattcatccgaaaatggatggcacactactgaaatctgcggtggggccaacctgtcctgctactgtgagttccttagtcaagcctggccttaactgcccctcaataccaaagccaaccttgccttcacctggacagattctgaatggcaaagggcttcctgcaccgcccactctggaaaagaaacctgaagacaattccaataataggaaatttttaaataagagattatcagaaagagagtttgatcctgacatccactgtggggttattgatctcgacaccaagaagccctgcacccggtctttgacatgcaagacacattccttaacccagcgcagggctgtccagggtagaagaaaacgatttgatgtgttattagccgagcacaaaaacaaaaccagggaaaaggaattgattcgccatccggactctcagcaaccaccgcagcctctcagggacccgcatcccgcccctcctagaacgtcacaggagccgcaccaaaaccctcacggagtgattccttccgaatcaaagccttttgtagctagtaaacctaaacctcacacccccagtcttccaaggcctccaggctgccctgctcagcaaggtgggagtgcccccattgaccctcctccagtccatgaatctccacaccctcccctgcctgccactgagccagcttctcggttatccagtgaggagggcgaaggcgatgacaaagaagagtctgttgaaaaactggactgtcattattcaggtcatcatcctcagccagcatctttttgcacatttgggagccggcagataggaagaggctattacgtgtttgactccaggtggaatcgacttcgctgcgccctcaacctcatggtggagaagcatctgaatgcacagctatggaagaaaatcccaccagtgcccagtaccacctcacccatctccacacgtattcctcaccggacaaactctgtgccgacatcacaatgtggagtcagctatctggcagcagccaccgtctctacatccccagtcctgctctcatctacctgcatctccccaaatagcaaatcggtaccagctcatggaaccacactaaatgcacagcctgctgcttcaggggcgatggatcctgtgtgcagtatgcaatccagacaagtgtcctcttcatcctcatccccttccacgccctctggcctttcctcggttccttcctcccccatgtccaggaaacctcagaaattgaaatccagcaaatctttgaggcccaaggagtcttctggtaacagcactaactgtcaaaatgccagtagcagtaccagtggcggctcaggaaagaaacgcaaaaacagttccccactgttggttcactcttcctcctcctcttcctcctcctcctcttcttctcattccatggagtcttttaggaaaaactgtgtggctcactctgggcctccctacccctcaacggtaacatcttcccatagcatcggcctcaactgtgtgacgaataaagcaaatgcggtgaacgtccggcatgaccagtcagggaggggcccccccaccgggagccctgctgaatccatcaagaggatgagtgtgatggtgaacagcagtgattctactctttctcttgggccattcattcaccagtccaatgaactgcctgtcaactcccacggcagtttttcccactcacacactcctctagacaaactcataggaaagaaaagaaagtgctcacccagctcgagcagcatcaacaacagcagcagcaaacccacaaaggttgccaaagtgccagccgtgaacaatgtccacatgaaacacacaggcaccatcccaggggcacaaggactgatgaacagttccctccttcatcaggatatctcctcaccttgcttacgaacaggaatttcagcaacatcaccccagagccctgacttaaaatccaaaggcacgtccctgacagctgaaaatagcacggggaggaataatgcggacacttttgaggacaagttacacctccactcagcactctggactccacgatgcctttgagtctgttttcccaacctcctgtgggcctcaagggtagaaacctgccgggctgttgttttaacgaggatttccctgaagctatgtctctagcagtgagtactcataaaggacactggatcaagttcagccaccgaattgcttttatcagtgttaaagtggtctgaactgcttgctaccaatctgtgagaagtttttgtttttgttttgttttttaacttgcagtatatcacagagccactcttcaagtagattggctgggcaaaagaatgttttggcaagagcgttactgtagacctttctccctccttccttttactaccatttttttttaacactgtcatctgtaggtcactctccagcagttaggcaccttaactggagaccagaaaccttccagagaacacagggctgcatcccgagcaaccctctgaagaagggaattaggctttagattttgatagcaatgttccaggaatgaaatatagatgttagcccaagacaccatgacaaaatagcccagccttttgagagtaatttgggaaaagaagctgtcagaagtttctaacttacaaactggtttgaaatttttgatgcccagacagcaagtataaatcattttggaggcttacttttcatgatacaaaagcaattctgtgtgatttttttttttaagaagaaagaaaatgcaagctagttttgagaaaggaaggccaaattgggtcgggggagggtgggagtgaggaagttaaaatcactatagggagaaaaaacttttttcaagatttccaaagagatgaaattttcttaatccttttaagttttcatagtaaacagtatggcagattgggttggttgtcctacctggtctatttttaaaagtcaccttttaaagtgacattattagatacacttaaatgtttccaaggcactctctacattacccttgtttttctctttggatactgtcctgggactaagtgtagatttctgcttcaagcacttctggcattgtgtgtttttgtatgcactccccttcatgccacttcagatgtttatttggatgtggttggggacgagagcagacaccaaggaaagggagttggagagaatgtaagtcctgacctgaaggtcttttgtgatgcatgtataggattgccctgacacacaccctcctttcttgggattataccagccatcttcctgagagttttggagccctctaggatattttttctagtaccccaccccccacccctaaagaaagaccttaatatgttaaaacagcattgcttggagaaggtgtcattgaattccgggacgagccggagcctttaaatgggtgcttccaccactacaggctcctgacacgagtaacaggcactgttgcttagaagaacacacgaagttgccgaacacagggtaaaatttccaaggcgctgatcgttgccctggccagggcctgatgagagccagtcagtacattctttttttcctacagttcttgggtttcaaacttcagtttcagggaatttcaagtcaacaacaggtagaatgaataaacttggttaccagcctaataatgtgaattgctacagaattattcttattatgtaagaaaacaaaaactttatgcagatactttagctataaattgatgtaaaatactgatttttttaaaggaaggagagaacagtatcttgttcaattattatgcaatcaatcagtaaatgtttttaaaatgatactacaggagagcttagtaaggagagggcatggatgggccagtttggcatagttgggagaaatcagtctggtttccatcccagtcggggaagagagaggtgagagggaatcagaacgtacctagttgattccttggtgacaagtgcaatggggtatgggtagaatttattttcagagccaagaggacttgatggttataaataaagttgcctttagcaatggaatttacagatcgatcatgttgttccgaaagatgtgaataggatccacaataacaagttgattcagactaatgtagatatttagattagcaagtattgaacatttgatttcttagactgaggttttaaatgaatttcattatttctcccggtaatacacagagcatcgggattaggaaattagccattttggattctgtctgccacaaacagacctattctaaacagtgctattaaattttagactgttgttcaaatattttattttctcctaaactactttttatggtgatgaataattaagaccatttaaaacacgggagtacaagtatttttttgaattaaattaacttgcaaaaaccaaatttgcagtggttgggttgtttctagacagactttggtatcaatttaaaaccaagataatttttatattctttccaatagaatttcatgacaactcctgcagttttcttaacctacaaaaaaaaaaaaaaagtgctgcaatgatgaacaaagaattatacaaaacctacttttgtatctttattttggaatttcttgttctattataaatatggaagtatccctatttcagaagacatattttgttaaaaatgaattgtacatatttaaatatgtatttttgcacaggtctttttttctgatatcctgttttggtacaattgagatcatctagtatttatttattaattaataaaagtaaatacctttttataatttgaagtggttcactgccaagccaatagttctagaacctgcctcctttacagttttaagggatgcctctgttctgtgaaaagtctttgtcccttttagtgtctcgggagtggattcatacagatgaagtgggcattgcttcttcctggttgcctggtttcccgatagactacatgtaactaagtgacacactgcttttcttttgttagtattttatgtgtgggagtatgtgactgcgtgtgtgtgtgcctgtgcgtgtgtgtgtatactcagcacatgtatgttactatgtgatgtggtttaaaactaatggaaaaaactgaaagtgcctgaaactagttttaagcttagacagaatctctttaaaaagacttgaatgttcagttgaacttttggagtttgctttttccacctaaatattgtttctaaaattttaggggcggagttgaaaaccaccaatgctggtaattttataaggtattttaaaattaagacctcttggttcatagtaattcaattggtgatggattgcctggtggcaccaagggttacagatctttttgtcagccagcaacttacacgatgtgtccgttttgttattcactcatgaaatacaatttaaaatatttaaaatattttgtattccaaaaatataatacaaagaagtacctctgagaacattgaaaaaaatgtataatttgaaaaatgtaacttataagggcagctgtcttcctgcaagagttctgttgccaaggaatttcttaatgtcgctcattctgtccagggggtttggggcgattgggctttgaaaaaatattcttaaaagtttgtttagcagaaaataatcacttttacattttgtgcaaaacattttacattttcagataatttaaatgagcactacatactgtcagtgtgaatgtagggccttgaaagcattttgcttttttttttttttttttttttttgagcttggttataaaagcaatctcctgtgttaaaaacgtgtgaatagtttgataatttgtacacataatcaagagcatctcagctggactttgtgttggctgctgtatagaacatgaacaaatgtcaagggatagaaaattactttggatatttaaaagagaagaaatatatagtctatttgttttgtaacaagtttctgtaaataaaataatttatactattt

SEQ ID NO: 109384 - DNA, 1470 bp, Homo sapiens
  Payload ID: 1480
  Gene Symbol: ATXN7L1
  Gene Name: ataxin 7-like 1
  Uniprot ID: Q9ULK2
  ENST ID: ENST00000318724
  CDS Start-End: 25-465
actcaatgtcggaacgttccgaagatgacgtcggagcgttctcgaatcccgtgtctctcggctgctgctgccgaaggaacagggaaaaagcaacaagaaggaagagcaatggcgacactggatcgcaaagtgcccagtccggaggcgtttctgggcaaaccctggtcctcctggatcgacgccgccaaattacactgctccgacaatgtagatttagaagaggctggaaaagagggtggaaaaagcagggaggttatgaggcttaataaagaagatatgcacttatttggccattacccagcacatgacgacttctatctcgtagtgtgcagtgcctgtaaccaggtcgtcaagccacaggttttccagtcgcactgcgggagaaagcaagacaacaggagaaatgaaggcatctccaggagtggaccagagagcagccaagccatagagaagcatcaggtgtgagaatggaaaacgcagaagagacgtacaacttctgaaagatctcagaggactggcattgtctggagacggcttcctggaagaggagactccagcagagccctgaagtgtggacaagcttccattcactgcaaattcgtgagcacactctggtgtcaggatctagtaaggaaatgggcttgagcagagcagggggtacctgtggggttcttctcttcattttcaccaccacaaagctggtctaagctgccatcaattcccacctggacaactgcaaaagccttccagctgttcctgcttccactcttgctcctctacaattcattctgcacgcagaagtcagaatcaaaatcaaagttcatcatgtcattctcttgacttgtggcttccctttgctcttaagctaaaagtaaaaatcattatcatggctacaaagtcttgtgtggtctgggccacatcctgtgccaggctccctttcattgtctatattccagtcaagctggccttcaaaatttcagcacattgggtctttctgccacaggcccttgcacatacatgcttttccctctgtacatgtgattttctttcatccccgctttccaaagctaactctgactcatccttcagactgcatcttaatgattacttccttctggaagactcccctaattttcacaactagatgagctctcccttatatgttgaaaacaagtatttcttgtgtgaacagaaatgtttaatgtctgccttcccaactcagccacaagctctgtgaggatggggactcagtctttgcatccctcagagcctaacatagtctcagttaatacgtgatagctggagcgtgacatttcattaggaacagtgaggctagttgagaaattatacctcaccagtatataggagagtaccattaggaattcttaatgggatgaaaacctgaattcatgtctagaccctgccacctgctggctgtgctgttttaaataaattgcagatcctctcaga

SEQ ID NO: 109385 - DNA, 5417 bp, Homo sapiens
  Payload ID: 1480
  Gene Symbol: ATXN7L1
  Gene Name: ataxin 7-like 1
  Uniprot ID: Q9ULK2
  ENST ID: ENST00000419735
  CDS Start-End: 47-2632
ccctccctccccctttcagaacactcaatgtcggaacgttccgaagatgacgtcggagcgttctcgaatcccgtgtctctcggctgctgctgccgaaggaacagggaaaaagcaacaagaaggaagagcaatggcgacactggatcgcaaagtgcccagtccggaggcgtttctgggcaaaccctggtcctcctggatcgacgccgccaaattacactgctccgacaatgtagatttagaagaggctggaaaagagggtggaaaaagcagggaggttatgaggcttaataaagaagatatgcacttatttggccattacccagcacatgacgacttctatctcgtagtgtgcagtgcctgtaaccaggtcgtcaagccacaggttttccagtcgcactgcgagagaagacacggttcaatgtgtagaccttctccctctccagtgtctccagcctccaatcccaggacatcactagtacaggtgaaaacaaaagcctgtctcagcggccatcactctgccagcagcacctcaaagccattcaaaacgcccaaagacaatctacttacctccagcagcaaacagcacacagtctttcctgcgaaaggatcaagggataaaccatgtgttccagttcctgtagtcagtttagagaaaattcctaacctagtgaaggcagatggtgccaatgtcaaaatgaactccacaaccactactgcagtttctgcctcctccacctcgtcctctgccgtctccacccctcctttaattaagcctgtcctgatgtccaagtcagtgccaccttcaccagagaagatcttaaatggcaaaggaattctgccaaccaccatagacaagaaacaccaaaatggcaccaaaaacagcaacaagccttacaggagactttcagagagagaatttgacccaaataaacactgtggagtattggatcccgagacaaagaaaccttgcacaagatccctcacctgcaagacacattcgctaagccatcggagggcagtcccaggccggaaaaagcaatttgacctcctcctggcagaacacaaagcaaagtcccgggaaaaagaagttaaagataaagagcatctcctgacttccacgagggaaatacttccaagccaatccgggccggcacaggattctctgctagggtcttcagggagctctgggccagaaccaaaagttgcatcccctgcaaaatccagaccacccaactctgtacttcctagaccatcatctgcaaatagcataagcagcagcacatcttcaaatcatagcggccacactccagagcccccactcccaccggttggaggtgacctcgccagccgactgtccagtgatgaaggggagatggacggagccgacgaatccgagaagctagactgtcagttctccacgcaccaccccagacctctggcgttttgctcatttgggagtcgcctcatgggacgagggtactatgtgtttgatagaagatgggatcgttttcgattcgcactaaactccatggtagaaaaacacctgaattcacagatgtggaagaagatccctcctgcggcagatagccccctgccctcgccagcagcccacatcaccacccccgttccagcatccgttttgcagcctttcagcaaccccagtgctgtgtatcttccttcagctcccatcagctcgaggctcacctcttcttacataatgacatcagccatgctctcaaacgcagctttcgtgacatcgccggacccgagcgccctcatgtcccacaccacagctttccctcatgtggccgcaaccctcagcatcatggactcaaccttcaaggccccatccgccgtgtccccgataccagccgtcatcccttccccatcccacaagccatccaaaaccaaaaccagcaaatcctcaaaagtcaaagacctgtccacccgtagcgacgagtctccaagtaacaaaaaaaggaagccacagtcttcgacttcctcctcctcctcctcctcctcctcttccttgcagacatccctctcgtctccactgtcagggcctcacaaaaagaactgtgttttgaatgccagttctgctttgaactcctatcaggcggcccctccctataacagcctgtctgtgcacaactcaaacaatggggtgagcccactcagtgccaaactggagccctcaggacggacctcgctgcccggcggccccgcggacatagtgagacaggtgggcgcggtgggaggcagcagtgactcctgtcccctctctgtgccctcccttgcgctccacgcaggggacctctctctggcctcacacaatgctgtgtcttctctgcccctctcttttgacaaatcagaaggaaaaaagcgtaagaactcgagttctagtagcaaagcctgtaaaatcactaaaatgcctggtatgaatagcgttcacaaaaagaacccgcccagccttctcgcaccggtgcccgatcccgttaacagcacctcctctcggcaggttgggaaaaatagcagcctagctttgtcacaatccagtccttcaagtatatccagcccaggacacagccgacagaacacaaacagaacgggcaggataaggactcttccataacaagactatgaagccacttccacatcaattccaggccacctaatcccatccgaggaggccatggggaggaggagggaggggagtgggctggggggagagtctgttttctgtgcactccctgtgactctggcctttcttcttctttttttaattgaccaatttttagttaaaaaggcaaaagaaggtgaatttgagatttacagaaaacagttccagtgtttggtttccgctgtctttcctttcatttgccatgtttttacattcttccaaatttggggtcactcccctagctcctgatgctgctactgtaccatccttttgctccagccatgagagcagacattgcagaatgttggttccaggttggcatgctctgaagctcttgaactgtagcacaggcagagccctttttcttcctgtcatctccacccgattccttccatccctacgtctaccactctctgggtcctcactggtcttcaaaggacctggctctcataggatcccctcaggattgtgtgcagggagagggggctttgctggggaggagctgggagtggagagttggagggtgggtggggttccctcatccagtttccacagcccaccatggctggagccaaatgctagaagcgagattgagaacagtggccgtttagtgatgtggtttacctaataccactgtccagctgtgcagctcagaaaggataaaccagtcagggacaggggccagaacaggtttgggaaggtggcagcaagcagagcatggtgggtaggagatgatccctaaaaaaactggagactgtggtggtctgagctggtcaggaatctgcagaatcccttccaggaatcagtgtgccagtgcccacagcagggtgagctaggagggagaaatcccaggaaaaaggtcgtgagaacccagaaagccactccatgaggaggcacggtgaccacagctgctaaaggttcttaggctgccttcctgggctaggaagagccccccagggagagcttccacaaaagggtatgtgtcaaaccttttgtcagaataaataatagcatttcccacccacccccatgccctgggccacagggacttggtgggatcagcacacccatggatcagcttttgctgtcttagagacagccatccccatgaaggaatggtaaggacagccactgctcagtgaagaacagccatttggaagagccacgctggagccctgcagccatagaactattcacactggagttttaaaagaaacagcaataccataagctctagtagggaatcataatcaggaaaggaattcacaacataaaataggtgttctgtgctattaatcatgtaactttgtatatgatgtatagcaaagatactgggaggttttgtttcatccttaaatcagaaatgaatgctagtttcatagctgggcagaaccctcatccccaccccaaagttttccttttctttcccgttcccccaacccaaagatcagactactgttaagtttcaccacacaattggaattgcaaagacgggaggcaaatggagtgattttcatcaatggaattgcactgacagtgagtgtttcttataggattactaaattttttaatataaaatgatttgtttaaaaatcaggagttgatattaagtaccaggacattagttcggatgatttcatttttatttctacagtgttaaaagtgcacttatatgctggtttatttacgtcttgggaaaagagactgcaaattgaagggatgattgttactttttctttttttaaaaaaaaaaggttaaggagattttaagacttataaatgtttaagaaattataaacaaggttagaccctttgaaaaaaagtttagaagatattcttaaagtaaatttttatagtgttaattttgtaataatttatgttttactatattacagagctaactgaccagaatagtttcagaaacaatatgaaacttaggaaagtttaagcaatgtttatatttttaaaatgttctttgaattatgtttttattgtacatttcttcagactgaaaagtatgtacatatctttgttatttttgcacaattttgtcttgttcggtttcagaggtctgttgttttttataatttattttgagttgtaaaacttgcaggagtaaaaacaaaaaacaaaatctccacaacaaaataaccctctgatttataaactcttatagtcaaagagggaaaacaaaggttgagagattaagtggctgcttctgagaaataatgtctcaaggactaaaggagcaattcaataggtttagacattgtagctctctacatcttgaattggaagctggaataaagagcccccacccccccccccaccctcatcgaatgctgcttactttgtcaaaagactggctatgaccaaggtgaggatatttctggaaaactgggcaaaaagggaaagcccacagtattcttccttggcagtcaaccacaggtttactttacaatgatgtattaaaaacttgcagcttgaaaaatggaatgcaaataaaaggttctctttgggtttgtcttaatggagttaaactggagcagcctataaaacatttttagggtgatgtcctctgggtccttctgttctgcacacccactcagtcttctctcccagccccttgactgcacacacccctctttgcctgaagatctcctgacttgtcgccagccatagaggctcgaaagctctggttgtgaagcataacgcaatgcatagacctgtcagccat

SEQ ID NO: 109386 - DNA, 2426 bp, Homo sapiens
  Payload ID: 1480
  Gene Symbol: ATXN7L1
  Gene Name: ataxin 7-like 1
  Uniprot ID: Q9ULK2
  ENST ID: ENST00000477775
  CDS Start-End: 129-2345
actggccagggccctcatccaggagccaggaaacatctactaccacgagtcgcgttgcccagcgtgtgtcagcctccttatccaaacggcaaggcagcctccccgggatgtagagaagacacggttcaatgtgtagaccttctccctctccagtgtctccagcctccaatcccaggacatcactagtacaggtgaaaacaaaagcctgtctcagcggccatcactctgccagcagcacctcaaagccattcaaaacgcccaaagacaatctacttacctccagcagcaaacagcacacagtctttcctgcgaaaggatcaagggataaaccatgtgttccagttcctgtagtcagtttagagaaaattcctaacctagtgaaggcagatggtgccaatgtcaaaatgaactccacaaccactactgcagtttctgcctcctccacctcgtcctctgccgtctccacccctcctttaattaagcctgtcctgatgtccaagtcagtgccaccttcaccagagaagatcttaaatggcaaaggaattctgccaaccaccatagacaagaaacaccaaaatggcaccaaaaacagcaacaagccttacaggagactttcagagagagaatttgacccaaataaacactgtggagtattggatcccgagacaaagaaaccttgcacaagatccctcacctgcaagacacattcgctaagccatcggagggcagtcccaggccggaaaaagcaatttgacctcctcctggcagaacacaaagcaaagtcccgggaaaaagaagttaaagataaagagcatctcctgacttccacgagggaaatacttccaagccaatccgggccggcacaggattctctgctagggtcttcagggagctctgggccagaaccaaaagttgcatcccctgcaaaatccagaccacccaactctgtacttcctagaccatcatctgcaaatagcataagcagcagcacatcttcaaatcatagcggccacactccagagcccccactcccaccggttggaggtgacctcgccagccgactgtccagtgatgaaggggagatggacggagccgacgaatccgagaagctagactgtcagttctccacgcaccaccccagacctctggcgttttgctcatttgggagtcgcctcatgggacgagggtactatgtgtttgatagaagatgggatcgttttcgattcgcactaaactccatggtagaaaaacacctgaattcacagatgtggaagaagatccctcctgcggcagatagccccctgccctcgccagcagcccacatcaccacccccgttccagcatccgttttgcagcctttcagcaaccccagtgctgtgtatcttccttcagctcccatcagctcgaggctcacctcttcttacataatgacatcagccatgctctcaaacgcagctttcgtgacatcgccggacccgagcgccctcatgtcccacaccacagctttccctcatgtggccgcaaccctcagcatcatggactcaaccttcaaggccccatccgccgtgtccccgataccagccgtcatcccttccccatcccacaagccatccaaaaccaaaaccagcaaatcctcaaaagtcaaagacctgtccacccgtagcgacgagtctccaagtaacaaaaaaaggaagccacagtcttcgacttcctcctcctcctcctcctcctcctcttccttgcagacatccctctcgtctccactgtcagggcctcacaaaaagaactgtgttttgaatgccagttctgctttgaactcctatcaggcggcccctccctataacagcctgtctgtgcacaactcaaacaatggggtgagcccactcagtgccaaactggagccctcaggacggacctcgctgcccggcggccccgcggacatagtgagacaggtgggcgcggtgggaggcagcagtgactcctgtcccctctctgtgccctcccttgcgctccacgcaggggacctctctctggcctcacacaatgctgtgtcttctctgcccctctcttttgacaaatcagaaggaaaaaagcgtaagaactcgagttctagtagcaaagcctgtaaaatcactaaaatgcctggtatgaatagcgttcacaaaaagaacccgcccagccttctcgcaccggtgcccgatcccgttaacagcacctcctctcggcaggttgggaaaaatagcagcctagctttgtcacaatccagtccttcaagtatatccagcccaggacacagccgacagaagaacacaaacagaacgggcaggataaggactcttccataacaagactatgaagccacttccacatcaattccaggccacctaatcccatccgaggaggccatggggaggaggagggagggg

SEQ ID NO: 109387 - DNA, 1115 bp, Homo sapiens
  Payload ID: 1480
  Gene Symbol: ATXN7L1
  Gene Name: ataxin 7-like 1
  ENST ID: ENST00000478915
  CDS Start-End: 4-291
gcaatggcgacactggatcgcaaagtgcccagtccggaggcgtttctgggcaaaccctggtcctcctggatcgacgccgccaaattacactgctccgacaatatgcacttatttggccattacccagcacatgacgacttctatctcgtagtgtgcagtgcctgtaaccaggtcgtcaagccacaggttttccagtcgcactgcgggagaaagcaagacaacaggagaaatgaaggcatctccaggagtggaccagagagcagccaagccatagagaagcatcaggtgtgagaatggaaaacgcagaagagacgtacaacttctgaaagatctcagaggactggcattgtctggagacggcttcctggaagaggagactccagcagagccctgaagtgtggacaagcttccattcactgcaaattcgtgagcacactctggtgtcaggatctagtaaggaaatgggcttgagcagagcagggggtacctgtggggttcttctcttcattttcaccaccacaaagctggtctaagctgccatcaattcccacctggacaactgcaaaagccttccagctgttcctgcttccactcttgctcctctacaattcattctgcacgcagaagtcagaatcaaaatcaaagttcatcatgtcattctcttgacttgtggcttccctttgctcttaagctaaaagtaaaaatcattatcatggctacaaagtcttgtgtggtctgggccacatcctgtgccaggctccctttcattgtctatattccagtcaagctggccttcaaaatttcagcacattgggtctttctgccacaggcccttgcacatacatgcttttccctctgtacatgtgattttctttcatccccgctttccaaagctaactctgactcatccttcagactgcatcttaatgattacttccttctggaagactcccctaattttcacaactagatgagctctcccttatatgttgaaaacaagtatttcttgtgtgaacagaaatgtttaatgtctgccttcccaactcagccacaagctctgtgaggatggggactcagtctttgcatccctcagagcctaacatagtctcagttaa

SEQ ID NO: 109388 - DNA, 1963 bp, Homo sapiens
  Payload ID: 1480
  Gene Symbol: ATXN7L1
  Gene Name: ataxin 7-like 1
  ENST ID: ENST00000484475
  CDS Start-End: 1-1725
ccatcatctgcaaatagcataagcagcagcacatcttcaaatcatagcggccacactccagagcccccactcccaccggttggaggtgacctcgccagccgactgtccagtgatgaaggggagatggacggagccgacgaatccgagaagctagactgtcagttctccacgcaccaccccagacctctggcgttttgctcatttgggagtcgcctcatgggacgagggtactatgtgtttgatagaagatgggatcgttttcgattcgcactaaactccatggtagaaaaacacctgaattcacagatgtggaagcacagaaacccgagccacagggcatcaggtccctcccccctgttcaggacttgcctaaccaatctgctgtcactgagcaacattggggctgcctgggtgtcaactctggagagcgtagcaccccgctaccctctcaacctcgctgcccaaaccccaggccccggcgggcccgaacctggagggatggcagccgatgggggcgtggaagacattaggaagaaaaggaacggccaagactcttttttctttaacaagcatttaactctgcatcaggagccgccaacacagtattctctttcagccaggaagatccctcctgcggcagatagccccctgccctcgccagcagcccacatcaccacccccgttccagcatccgttttgcagcctttcagcaaccccagtgctgtgtatcttccttcagctcccatcagctcgaggctcacctcttcttacataatgacatcagccatgctctcaaacgcagctttcgtgacatcgccggacccgagcgccctcatgtcccacaccacagctttccctcatgtggccgcaaccctcagcatcatggactcaaccttcaaggccccatccgccgtgtccccgataccagccgtcatcccttccccatcccacaagccatccaaaaccaaaaccagcaaatcctcaaaagtcaaagacctgtccacccgtagcgacgagtctccaagtaacaaaaaaaggaagccacagtcttcgacttcctcctcctcctcctcctcctcctcttccttgcagacatccctctcgtctccactgtcagggcctcacaaaaagaactgtgttttgaatgccagttctgctttgaactcctatcaggcggcccctccctataacagcctgtctgtgcacaactcaaacaatggggtgagcccactcagtgccaaactggagccctcaggacggacctcgctgcccggcggccccgcggacatagtgagacaggtgggcgcggtgggaggcagcagtgactcctgtcccctctctgtgccctcccttgcgctccacgcaggggacctctctctggcctcacacaatgctgtgtcttctctgcccctctcttttgacaaatcagaaggaaaaaagcgtaagaactcgagttctagtagcaaagcctgtaaaatcactaaaatgcctggtatgaatagcgttcacaaaaagaacccgcccagccttctcgcaccggtgcccgatcccgttaacagcacctcctctcggcaggtaagggacctcctggcaccgccttcaccggctctggggggcagggggagctgggcagcgcccctgcttagccgggcggctccgacaggtaacacaagcttgattcctgttctcgttttccccgaaggcagttttcaccctctgctttgagagcactttactgaacaagtacttgataccacgctcactatgtgctagacactgttctcggcactttacggttattacctcactgagtcctcacgacaccccagtgcagtgagtgcagttatcactttacagatgagtaaactgaggcacagagagattctgagttccccactccacatcggtcagttttatcttttgaggttctgagaacattgtcattaaagagttctgttgctaa

SEQ ID NO: 109389 - DNA, 2324 bp, Homo sapiens
  Payload ID: 1480
  Gene Symbol: ATXN7L1
  Gene Name: ataxin 7-like 1
  ENST ID: ENST00000472195
  CDS Start-End: 96-2324
gatcgcttcaggttccaaaagtacaacatgtttacagtcgtcgtagcatcagattaagttggcagcctgagtctctctagagaagacacggttcaatgtgtagaccttctccctctccagtgtctccagcctccaatcccaggacatcactagtacaggtgaaaacaaaagcctgtctcagcggccatcactctgccagcagcacctcaaagccattcaaaacgcccaaagacaatctacttacctccagcagcaaacagcacacagtctttcctgcgaaaggatcaagggataaaccatgtgttccagttcctgtagtcagtttagagaaaattcctaacctagtgaaggcagatggtgccaatgtcaaaatgaactccacaaccactactgcagtttctgcctcctccacctcgtcctctgccgtctccacccctcctttaattaagcctgtcctgatgtccaagtcagtgccaccttcaccagagaagatcttaaatggcaaaggaattctgccaaccaccatagacaagaaacaccaaaatggcaccaaaaacagcaacaagccttacaggagactttcagagagagaatttgacccaaataaacactgtggagtattggatcccgagacaaagaaaccttgcacaagatccctcacctgcaagacacattcgctaagccatcggagggcagtcccaggccggaaaaagcaatttgacctcctcctggcagaacacaaagcaaagtcccgggaaaaagaagttaaagataaagagcatctcctgacttccacgagggaaatacttccaagccaatccgggccggcacaggattctctgctagggtcttcagggagctctgggccagaaccaaaagttgcatcccctgcaaaatccagaccacccaactctgtacttcctagaccatcatctgcaaatagcataagcagcagcacatcttcaaatcatagcggccacactccagagcccccactcccaccggttggaggtgacctcgccagccgactgtccagtgatgaaggggagatggacggagccgacgaatccgagaagctagactgtcagttctccacgcaccaccccagacctctggcgttttgctcatttgggagtcgcctcatgggacgagggtactatgtgtttgatagaagatgggatcgttttcgattcgcactaaactccatggtagaaaaacacctgaattcacagatgtggaagaagatccctcctgcggcagatagccccctgccctcgccagcagcccacatcaccacccccgttccagcatccgttttgcagcctttcagcaaccccagtgctgtgtatcttccttcagctcccatcagctcgaggctcacctcttcttacataatgacatcagccatgctctcaaacgcagctttcgtgacatcgccggacccgagcgccctcatgtcccacaccacagctttccctcatgtggccgcaaccctcagcatcatggactcaaccttcaaggccccatccgccgtgtccccgataccagccgtcatcccttccccatcccacaagccatccaaaaccaaaaccagcaaatcctcaaaagtcaaagacctgtccacccgtagcgacgagtctccaagtaacaaaaaaaggaagccacagtcttcgacttcctcctcctcctcctcctcctcctcttccttgcagacatccctctcgtctccactgtcagggcctcacaaaaagaactgtgttttgaatgccagttctgctttgaactcctatcaggcggcccctccctataacagcctgtctgtgcacaactcaaacaatggggtgagcccactcagtgccaaactggagccctcaggacggacctcgctgcccggcggccccgcggacatagtgagacaggtgggcgcggtgggaggcagcagtgactcctgtcccctctctgtgccctcccttgcgctccacgcaggggacctctctctggcctcacacaatgctgtgtcttctctgcccctctcttttgacaaatcagaaggaaaaaagcgtaagaactcgagttctagtagcaaagcctgtaaaatcactaaaatgcctggtatgaatagcgttcacaaaaagaacccgcccagccttctcgcaccggtgcccgatcccgttaacagcacctcctctcggcaggtaagggacctcctggcaccgccttcaccggctctggggggcagggggagctgggcagcgcccctgcttagccgggcggctccgacaggtaacacaagcttgattcctgttctcgttttccccgaaggc

SEQ ID NO: 109390 - DNA, 2732 bp, Homo sapiens
  Payload ID: 1480
  Gene Symbol: ATXN7L1
  Gene Name: ataxin 7-like 1
  ENST ID: ENST00000474433
  CDS Start-End: 91-297
caactgccactccaaggagaacagaaatggttccgttattagtggctgctgtgggaccacgacagtctgtgggagagaagacacggttcaatgtgtagaccttctccctctccagtgtctccagcctccaatcccaggacatcactagtacaggtgaaaacaaaagcctgtctcagcggccatcactctgccagcagcacctcaaagccattcaaaacgcccaaagacaatctacttacctccagcagcaaacagcacacagtctttcctgcgaaaggatcaagggataaaccatgacatcactgggcagggaggggaatctacttgatgccaagagaaccatgtttcttaaagccagaggacccgccttgatctagaaagataaattcagacaggccaagcacaaaggaagaagacgtgggcaactaaagcagcacaaaagaaacagagtgttccagttcctgtagtcagtttagagaaaattcctaacctagtgaaggcagatggtgccaatgtcaaaatgaactccacaaccactactgcagtttctgcctcctccacctcgtcctctgccgtctccacccctcctttaattaagcctgtcctgatgtccaagtcagtgccaccttcaccagagaagatcttaaatggcaaaggaattctgccaaccaccatagacaagaaacaccaaaatggcaccaaaaacagcaacaagccttacaggagactttcagagagagaatttgacccaaataaacactgtggagtattggatcccgagacaaagaaaccttgcacaagatccctcacctgcaagacacattcgctaagccatcggagggcagtcccaggccggaaaaagcaatttgacctcctcctggcagaacacaaagcaaagtcccgggaaaaagaagttaaagataaagagcatctcctgacttccacgagggaaatacttccaagccaatccgggccggcacaggattctctgctagggtcttcagggagctctgggccagaaccaaaagttgcatcccctgcaaaatccagaccacccaactctgtacttcctagaccatcatctgcaaatagcataagcagcagcacatcttcaaatcatagcggccacactccagagcccccactcccaccggttggaggtgacctcgccagccgactgtccagtgatgaaggggagatggacggagccgacgaatccgagaagctagactgtcagttctccacgcaccaccccagacctctggcgttttgctcatttgggagtcgcctcatgggacgagggtactatgtgtttgatagaagatgggatcgttttcgattcgcactaaactccatggtagaaaaacacctgaattcacagatgtggaagaagatccctcctgcggcagatagccccctgccctcgccagcagcccacatcaccacccccgttccagcatccgttttgcagcctttcagcaaccccagtgctgtgtatcttccttcagctcccatcagctcgaggctcacctcttcttacataatgacatcagccatgctctcaaacgcagctttcgtgacatcgccggacccgagcgccctcatgtcccacaccacagctttccctcatgtggccgcaaccctcagcatcatggactcaaccttcaaggccccatccgccgtgtccccgataccagccgtcatcccttccccatcccacaagccatccaaaaccaaaaccagcaaatcctcaaaagtcaaagacctgtccacccgtagcgacgagtctccaagtaacaaaaaaaggaagccacagtcttcgacttcctcctcctcctcctcctcctcctcttccttgcagacatccctctcgtctccactgtcagggcctcacaaaaagaactgtgttttgaatgccagttctgctttgaactcctatcaggcggcccctccctataacagcctgtctgtgcacaactcaaacaatggggtgagcccactcagtgccaaactggagccctcaggacggacctcgctgcccggcggccccgcggacatagtgagacaggtgggcgcggtgggaggcagcagtgactcctgtcccctctctgtgccctcccttgcgctccacgcaggggacctctctctggcctcacacaatgctgtgtcttctctgcccctctcttttgacaaatcagaaggaaaaaagcgtaagaactcgagttctagtagcaaagcctgtaaaatcactaaaatgcctggtatgaatagcgttcacaaaaagaacccgcccagccttctcgcaccggtgcccgatcccgttaacagcacctcctctcggcaggtaagggacctcctggcaccgccttcaccggctctggggggcagggggagctgggcagcgcccctgcttagccgggcggctccgacaggtaacacaagcttgattcctgttctcgttttccccgaaggcagttttcaccctctgctttgagagcactttactgaacaagtacttgataccacgctcactatgtgctagacactgttctcggcactttacggttattacctcactgagtcctcacgacaccccagtgcagtgagtgcagttatcactttacagatgagtaaactgaggcacagagagattctgagttccccactccacatcggtcagttttatcttttgaggttctgagaacattgtcattaaagagttctgttgctaa

SEQ ID NO: 109391 - DNA, 2318 bp, Homo sapiens
  Payload ID: 1481
  Gene Symbol: ATXN7L2
  Gene Name: ataxin 7-like 2
  Uniprot ID: Q5T6C5
  ENST ID: ENST00000369870
  CDS Start-End: 16-2184
gcgtccgcggcggtgatggcggtgcgtgaacgcgcggcggcagcaatggccgctctggagcggcgggtgccgagtctcgatgacttcgcgggacagagctggagctcgtgggtggagcgggccgacctgcccgcggctgacggggctgagctggaggagagtagcaaaaacacgaagaagttggatgccatgaccctcattaaagaagacatgtccatcttcgggcactgccctgcccatgatgacttctacttggttgtgtgtaaccactgcagccaagtggtgaagcctcaagctttccagaagcactgcgaaagaagacatgggcccctcagcaagctttatggccgggccccacccccacctccagcccctgccagctctcagaaatgccatgtagtgaatgggcagggcccagcttgtagggccccaggttccacgaaaacctcctccagggagaagggccaggggtcccggagccgtggccaccagcctcctgagaagacccagaaggacaacctctgccagccagggggcctcaccaaggactcccctggaaaacctcccatggctcccccttctaaagaacctcctggcagagagaacatcgagatcatccccagtgaggggtccagtcactgggctgaaggcagccctcctgaaaaggagcccagtgggaccaggctgccccctaaaacccaccggaagatggctcggaaggagtgcgacctcaacaggcagtgtggggtaataaatccagagaccaaaaagatctgtacccgcctgttgacctgcaagatccactcagtacaccagcgccgggaagtccagggccgggccaaggactttgacgtgctggtggcagagctgaaggccaactcccgcaaaggggagtctcccaaggagaagagcccagggcgcaaggagcaagttctcgagcgcccctcccaggagctcccctcctcagtccaggttgtagcagcggtggctgctcccagcagcaccttctctgttcgtgccaagcagacctacccatactgtgcactgcccaggtcccgggcctcctccgagagtgaattggatgatgaaggcccctgtggtggtgatggggacccaggcctgttccccttccccatgccccggggtgggacccaggcctccagcgaagagagtgaggaggaggggacatctgacgacctccacccaccccctgactgccattatgcaacccggcccccacggccacaggcgttctgcacctttgggagccggctggtgagcccaggatgctatgtgtttagccgccggctggaccggttctgctcagcactcagctccatgctggaacggcacctcagcacacacatgtggaagaagatcccaccggcagctgaacctccagctcaccttgtcaactccccgttatctgctcccctgagcccatcctctacaggcacctgcccccgccttccaggtccaaccctgagacctgcctgcccagcctccatgccccccaccaaggacaaccttgtccccagctaccctgcaggctcccccagcgtggcggctgcctgtagccaggcagagtgcatgggcgggagccaggctatcacctcaccactgcctgccaacacgccatccccgtccttcagcaagctgccgccttccaaggccagcaagtcatccaaaggcaaggacggggtggaggtggaggccccttctcgaaagcggaagttatcccctggccctaccactcttaaacggacctgcatcctggagcccactggaaaagggaaaccctctggctgtaggggcctctcggccaaaactaaaacagccctgagcatggggcttaatgggacaatggggccaagagtgaagcgggcagggcccctggactgtcgtggctcccctcatcagctccccacaccagtcaaggcttctcagctggagaaccggggagcagctggacacccagccaaggccctgccaaccaactgcctctctgaggaggaggtggccaagaagcggaaaaacctggccacttattgccggccagtgaaggccaagcactgtcaggctggtgcccctgctgatgtggcctgctctgtgcgccgcaagaagccaggcccggccctggcctttgaggagaagtgctctacactgaagtcaaaagcccattaacgagaaagtgcctgcccactgcaacggagccgccagcacctcctcccctccagatccgggccccaggctgctgccgctttttataactttatattatttttttttaagaaaaaaagctctttaaaatacctcaa

SEQ ID NO: 109392 - DNA, 3022 bp, Homo sapiens
  Payload ID: 1481
  Gene Symbol: ATXN7L2
  Gene Name: ataxin 7-like 2
  ENST ID: ENST00000463678
  CDS Start-End: 476-787
ctattcgatctacaggggagcggagtcgcttcgtggccgccagcccgggaaggggcgccagccagctggcggacgcacggcttagaggggcgtctgggcagagaggtttggggctggggagagatgcagtgagcttgggagagtggactggtagcacaaataatgtgtgcataagggttagaagaggaggtcctggagctttggtcttctcttttccccctgcaattgtgcatttcggagggactcttgctgcaagctcggtaggcaatagcatccgctccaagactacacttcccagaaggctgtgagtgggtggggggggggggggcgcggggaacaggcaacctgtgttgcgcttgcgcaaagactgcgctggaaaggcaggtggggaggaggggaggcgtgcccgcgacggggcgagggggagggggccgcgcggcggcggcgccagggcgggcgcgcgtccgcggcggtgatggcggtgcgtgaacgcgcggcggcagcaatggccgctctggagcggcgggtgccgagtctcgatgacttcgcgggacagagctggagctcgtgggtggagcgggccgacctgcccgcggctgacgaaactgaggtacaagggcaacccctgcccaaaggccctctaagaaggggagggacttgcatagctgaccaaggagactttgaagatgctcaaggaccaaagacagcagtttctctgctctgtgaccatcctatcagtgcaggacctgagaagctgggtgtaactttgacaatgctatggggctgagctggaggagagtagcaaaaacacgaagaagttggatgccatgaccctcattaaagaagacatgtccatcttcgggcactgccctgcccatgatgacttctacttggttgtgtgtaaccactgcagccaagtggtgaagcctcaagctttccagaagcactgcgaaagaagacatgggcccctcagcaagctttatggccgggccccacccccacctccagcccctgccagctctcagaaatgccatgtagtgaatgggcagggcccagcttgtagggccccaggttccacgaaaacctcctccagggagaagggccaggggtcccggagccgtggccaccagcctcctgagaagacccagaaggacaacctctgccttttcgtgcctgtggtgaatctggagaagatgtccagtctcccgaagcctgatggacatggaatcagggtggccccaccctctgcttttctcagccagccagggggcctcaccaaggactcccctggaaaacctcccatggctcccccttctaaagaacctcctggcagagagaacatcgagatcatccccagtgaggggtccagtcactgggctgaaggcagccctcctgaaaaggagcccagtgggaccaggctgccccctaaaacccaccggaagatggctcggaaggagtgcgacctcaacaggcagtgtggggtaataaatccagagaccaaaaagatctgtacccgcctgttgacctgcaagatccactcagtacaccagcgccgggaagtccagggccgggccaaggactttgacgtgctggtggcagagctgaaggccaactcccgcaaaggggagtctcccaaggagaagagcccagggcgcaaggagcaagttctcgagcgcccctcccaggagctcccctcctcagtccaggttgtagcagcggtggctgctcccagcagcaccttctctgttcgtgccaagcagacctacccatactgtgcactgcccaggtcccgggcctcctccgagagtgaattggatgatgaaggcccctgtggtggtgatggggacccaggcctgttccccttccccatgccccggggtgggacccaggcctccagcgaagagagtgaggaggaggggacatctgacgacctccacccaccccctgactgccattatgcaacccggcccccacggccacaggcgttctgcacctttgggagccggctggtgagcccaggatgctatgtgtttagccgccggctggaccggttctgctcagcactcagctccatgctggaacggcacctcagcacacacatgtggaagaagatcccaccggcagctgaacctccagctcaccttgtcaactccccgttatctgctcccctgagcccatcctctacaggcacctgcccccgccttccaggtccaaccctgagacctgcctgcccagcctccatgccccccaccaaggacaaccttgtccccagctaccctgcaggctcccccagcgtggcggctgcctgtagccaggcagagtgcatgggcgggagccaggctatcacctcaccactgcctgccaacacgccatccccgtccttcagcaagctgccgccttccaaggccagcaagtcatccaaaggcaaggacggggtggaggtggaggccccttctcgaaagcggaagttatcccctggccctaccactcttaaacggacctgcatcctggagcccactggaaaagggaaaccctctggctgtaggggcctctcggccaaaactaaaacagccctgagcatggggcttaatgggacaatggggccaagagtgaagcgggcagggcccctggactgtcgtggctcccctcatcagctccccacaccagtcaaggcttctcagctggagaaccggggagcagctggacacccagccaaggccctgccaaccaactgcctctctgaggaggaggtggccaagaagcggaaaaacctggccacttattgccggccagtgaaggccaagcactgtcaggctggtgcccctgctgatgtggcctgctctgtgcgccgcaagaagccaggcccggccctggcctttgaggagaagtgctctacactgaagtcaaaagcccattaacgagaaagtgcctgcccactgcaacggagccgccagcacctcctcccctccagatccgggccccaggctgctgccgctttttataactttatattatttttttt

SEQ ID NO: 109393 - DNA, 2314 bp, Homo sapiens
  Payload ID: 1481
  Gene Symbol: ATXN7L2
  Gene Name: ataxin 7-like 2
  ENST ID: ENST00000615509
  CDS Start-End: 16-1758
gcgtccgcggcggtgatggcggtgcgtgaacgcgcggcggcagcaatggccgctctggagcggcgggtgccgagtctcgatgacttcgcgggacagagctggagctcgtgggtggagcgggccgacctgcccgcggctgacggggctgagctggaggagagtagcaaaaacacgaagaagttggatgccatgaccctcattaaagaagacatgtccatcttcgggcactgccctgcccatgatgacttctacttggttgtgtgtaaccactgcagccaagtggtgaagcctcaagctttccagaagcactgcgaaagaagacatgggcccctcagcaagctttatggccgggccccacccccacctccagcccctgccagctctcagaaatgccatgtagtgaatgggcagggcccagcttgtagggccccaggttccacgaaaacctcctccagggagaagggccaggggtcccggagccgtggccaccagcctcctgagaagacccagaaggacaacctctgccagccagggggcctcaccaaggactcccctggaaaacctcccatggctcccccttctaaagaacctcctggcagagagaacatcgagatcatccccagtgaggggtccagtcactgggctgaaggcagccctcctgaaaaggagcccagtgggaccaggctgccccctaaaacccaccggaagatggctcggaaggagtgcgacctcaacaggcagtgtggggtaataaatccagagaccaaaaagatctgtacccgcctgttgacctgcaagatccactcagtacaccagcgccgggaagtccagggccgggccaaggactttgacgtgctggtggcagagctgaaggccaactcccgcaaaggggagtctcccaaggagaagagcccagggcgcaaggagcaagttctcgagcgcccctcccaggagctcccctcctcagtccaggttgtagcagcggtggctgctcccagcagcaccttctctgttcgtgccaagcagacctacccatactgtgcactgcccaggtcccgggcctcctccgagagtgaattggatgatgaaggcccctgtggtggtgatggggacccaggcctgttccccttccccatgccccggggtgggacccaggcctccagcgaagagagtgaggaggaggggacatctgacgacctccacccaccccctgactgccattatgcaacccggcccccacggccacaggcgttctgcacctttgggagccggctggtgagcccaggatgctatgtgtttagccgccggctggaccggttctgctcagcactcagctccatgctggaacggcacctcagcacacacatgtggaagaagatcccaccggcagctgaacctccagctcaccttgtcaactccccgttatctgctcccctgagcccatcctctacaggcacctgcccccgccttccaggtccaaccctgagacctgcctgcccagcctccatgccccccaccaaggacaaccttgtccccagctaccctgcaggctcccccagcgtggcggctgcctgtagccaggcagagtgcatgggcgagccaggctatcacctcaccactgcctgccaacacgccatccccgtccttcagcaagctgccgccttccaaggccagcaagtcatccaaaggcaaggacggggtggaggtggaggccccttctcgaaagcggaagttatcccctggccctaccactcttaaacggacctgcatcctggagcccactggaaaagggaaaccctctggctgtaggggcctctcggccaaaactaaaacagccctgagcatggggcttaatgggacaatggggccaagagtgaagcgggcagggcccctggactgtcgtggctcccctcatcagctccccacaccagtcaaggcttctcagctggagaaccggggagcagctggacacccagccaaggccctgccaaccaactgcctctctgaggaggaggtggccaagaagcggaaaaacctggccacttattgccggccagtgaaggccaagcactgtcaggctggtgcccctgctgatgtggcctgctctgtgcgccgcaagaagccaggcccggccctggcctttgaggagaagtgctctacactgaagtcaaaagcccattaacgagaaagtgcctgcccactgcaacggagccgccagcacctcctcccctccagatccgggccccaggctgctgccgctttttataactttatattatttttttttaagaaaaaaagctctttaaaatacctc

SEQ ID NO: 109394 - DNA, 3811 bp, Homo sapiens
  Payload ID: 1482
  Gene Symbol: ATXN7L3
  Gene Name: ataxin 7-like 3
  Uniprot ID: Q14CW9
  ENST ID: ENST00000389384
  CDS Start-End: 310-1353
tgctgcctcctatagacccagactctgattggcagtggagtccagggcctgagctcaggcctgggaaagactaggccccctttaggtttcaggccttgaaggaccatccagacttagggagcctgggccttggggagggagagaccctgatgccaggactgagctttgggcagcgaggtggggagggaaggtggccgcattcagaggtgccttggactcacaacaacacccccacccccgtgtgtgcagccgtgttgccgcccgctgtgctatgagcagtcagagcgccgtctccacaagagtttacaaatgaaaatggaggaaatgtctttgtctggcctggataacagcaaactagaggccatcgctcaggagatatacgcggacctggtcgaggattcttgtttgggattctgctttgaggtacaccgggctgtcaagtgtggctacttcttcttggacgacacggaccctgatagcatgaaggattttgagatcgtggaccagccgggcttggacatctttggacaggttttcaaccagtggaagagcaaggagtgtgtttgccccaattgcagtcgcagcattgccgcctcccgctttgctccccatctggagaagtgcctgggaatgggtcggaacagcagccgaatcgccaaccgccggattgccaatagcaacaatatgaataagtctgagagtgaccaagaagataatgatgacatcaatgacaacgactggtcctatggctcggagaagaaagccaagaagagaaagtcagacaagaaccccaattcccctcgaagatccaagtcattaaaacacaaaaatggggaacttagcaattcggatccttttaagtataacaattcaactgggatcagctatgagaccctggggccggaggagcttcgcagcctgctaaccacgcaatgtggggtgatttctgaacacaccaagaagatgtgcacaaggtccctgcgctgcccacagcacacagatgagcagaggcgaaccgtacggatttattttctcgggccctcggctgtccttccagaggtcgagagctccctggataatgacagctttgacatgactgacagccaggccctgatcagccggcttcagtgggacggctcctctgacctctcaccctctgattcaggctcctccaagacgagtgaaaatcagggatggggtctaggtaccaacagctctgagtcacggaaaaccaagaaaaagaaatcccatctgagcctggtagggactgcctccggcctaggttccaacaagaagaagaagccaaagccaccggcacccccgacgcccagcatctatgatgacatcaactgacttgggtgcaagggatagcctttggctgagcagagccctctctcctgacccccacccaggtggcatagcctggcaaatggacggctgctgggggttggggcttgggaagcttggtgggccaggcaggcagaggatccgattatgcgcccctggggggtgtcaaagtcctctgcaatggagcacgactcctcggcgtgcaggactcagacctggacatattatgccttggacataagtttggtggggaggcggttttcctatttattctgtgagttactggatgtccagctaggccaggggcctgacctgggcactgtgccagggcactgcctgccccccaccccaggaactggactaagccctgctgaggggcaatgtggcgacccgggaggctgtgggttggaagctgagcctggagggggcctgcctcggccgccctcagcaatgtgaatgggtccggtgcttggagctgaggggcaaggctgggcatgtcctgtctgtgtgcagaatcttatcaaatgcccccagtcccaggggtaggcaggcacagagtgctgtctgctgaggtgggcgtccagaactgccgccaccttccctgcccctcacaggggcagccctttcccctcagtccccatgggcctccttggcagcaggagctgtccttttgttgggtgccaggaaagggcctccagcctctacagcttcaaggaatgggaaagggagggtaggaagagggagaagtgtcagaattcctccccctgcctctcctccctgacccagggctggtgaggagtggggccccaaggtgagagggaacggtgctgctttatttgaaatgttttcttacctcattccctgccccaggaagggacccagcctcaccctcctggggtggccccgtgttcctcctgcccaccctgccccactgccctaccggggcagcccaggttcccaactgctgcttccacccccttcaccttgactggcttcagttcctctcagcgctcctgcctccaaagcgtgccctgtttcccttccttagcgcttttaagttatttattctgtacttgtggtttggggctctgaggaaaatcctaatcttgtgcctctccccctttgctaggagttgggtgggaagagagggtggcctctgtgccccaggttgtcagtggaggggaaggggtgtcactgcccctctgtgggactgtcatgccagtgtgcccacctgcctggtctacatcctaaagagatgtaccgtcccccctccatgcgggcaccaccactcccaggagccaagctggaggaccgcgacctgggctgggagcagagctgactgacatgggtggaggtgaccctgagccaagttctctggcacttgctggacatgtcccctaccctcttcccaagaggagccatcccacatttgggtagttagtacccaggactggttggactgatcgggttagggaccctagagggttaagggaacaacagagatggggctgcaatgccctgtctggaactccgctctcccgctggggtggttctgattgtggctcatgcctggttgcaaattggtttttaacccacaaattgtgattattttttaaaaagccaaacagattttggcaggagttagaataaatcccggggcctgggcttctctattcttggccctccgtagtctccctccgagaggaggccagagggagaggaggatctcagcaggcctctagccgcttccagatgcagtctggggagtgggctgaaggtgaagggaggaaggctgtgggccactctcccttctgagaggcagctgcagctcaggccctaatacactctttgccctgtggcctctcccttttccccccttctggttggaggagggagaagtgggaagtagcttgggaactggtttgtccacataaacttccccattgttccttggcccgccctcagggcagagccccctgcccaggctgggtaagagatgggcttggtccagcagggaccctgagggaacaaacccttttccttctggggagagagtgccccccctaccatgtagttgaacaggggctaggagctccccactcccctccctctaacagcaggctgtgtgggtttcaattcccatccttcccaccccggctaggtgtcgtccaccctgtatcctgtgtctgagtgtgtgtgggggggttctgtactaatttccatggccggtggcttttccttccatgcatcactcccccccgcatgcccaggggccacccgcctggcattaccgcatgctggggtcattgggggaggggggtggggctcacgctgtcctgtggtcttgagatttttatttttgcatatgtaatccattctgtacaggtagctaactttgtaaacgctgtgtattccctctgcccccatggctgctggtgtaaataaactgcatctcccgttggta

SEQ ID NO: 109395 - DNA, 3523 bp, Homo sapiens
  Payload ID: 1482
  Gene Symbol: ATXN7L3
  Gene Name: ataxin 7-like 3
  Uniprot ID: Q14CW9
  ENST ID: ENST00000454077
  CDS Start-End: 1-1065
atgaaaatggaggaaatgtctttgtctggcctggataacagcaaactagaggccatcgctcaggagatatacgcggacctggtcgaggattcttgtttgggattctgctttgaggtacaccgggctgtcaagtgtggctacttcttcttggacgacacggaccctgatagcatgaaggattttgagatcgtggaccagccgggcttggacatctttggacaggttttcaaccagtggaagagcaaggagtgtgtttgccccaattgcagtcgcagcattgccgcctcccgctttgctccccatctggagaagtgcctgggaatgggtcggaacagcagccgaatcgccaaccgccggattgccaatagcaacaatatgaataagtctgagagtgaccaagaagataatgatgacatcaatgacaacgactggtcctatggctcggagaagaaagccaagaagagaaagtcagacaagctatggtatctcccattccagaaccccaattcccctcgaagatccaagtcattaaaacacaaaaatggggaacttagcaattcggatccttttaagtataacaattcaactgggatcagctatgagaccctggggccggaggagcttcgcagcctgctaaccacgcaatgtggggtgatttctgaacacaccaagaagatgtgcacaaggtccctgcgctgcccacagcacacagatgagcagaggcgaaccgtacggatttattttctcgggccctcggctgtccttccagaggtcgagagctccctggataatgacagctttgacatgactgacagccaggccctgatcagccggcttcagtgggacggctcctctgacctctcaccctctgattcaggctcctccaagacgagtgaaaatcagggatggggtctaggtaccaacagctctgagtcacggaaaaccaagaaaaagaaatcccatctgagcctggtagggactgcctccggcctaggttccaacaagaagaagaagccaaagccaccggcacccccgacgcccagcatctatgatgacatcaactgacttgggtgcaagggatagcctttggctgagcagagccctctctcctgacccccacccaggtggcatagcctggcaaatggacggctgctgggggttggggcttgggaagcttggtgggccaggcaggcagaggatccgattatgcgcccctggggggtgtcaaagtcctctgcaatggagcacgactcctcggcgtgcaggactcagacctggacatattatgccttggacataagtttggtggggaggcggttttcctatttattctgtgagttactggatgtccagctaggccaggggcctgacctgggcactgtgccagggcactgcctgccccccaccccaggaactggactaagccctgctgaggggcaatgtggcgacccgggaggctgtgggttggaagctgagcctggagggggcctgcctcggccgccctcagcaatgtgaatgggtccggtgcttggagctgaggggcaaggctgggcatgtcctgtctgtgtgcagaatcttatcaaatgcccccagtcccaggggtaggcaggcacagagtgctgtctgctgaggtgggcgtccagaactgccgccaccttccctgcccctcacaggggcagccctttcccctcagtccccatgggcctccttggcagcaggagctgtccttttgttgggtgccaggaaagggcctccagcctctacagcttcaaggaatgggaaagggagggtaggaagagggagaagtgtcagaattcctccccctgcctctcctccctgacccagggctggtgaggagtggggccccaaggtgagagggaacggtgctgctttatttgaaatgttttcttacctcattccctgccccaggaagggacccagcctcaccctcctggggtggccccgtgttcctcctgcccaccctgccccactgccctaccggggcagcccaggttcccaactgctgcttccacccccttcaccttgactggcttcagttcctctcagcgctcctgcctccaaagcgtgccctgtttcccttccttagcgcttttaagttatttattctgtacttgtggtttggggctctgaggaaaatcctaatcttgtgcctctccccctttgctaggagttgggtgggaagagagggtggcctctgtgccccaggttgtcagtggaggggaaggggtgtcactgcccctctgtgggactgtcatgccagtgtgcccacctgcctggtctacatcctaaagagatgtaccgtcccccctccatgcgggcaccaccactcccaggagccaagctggaggaccgcgacctgggctgggagcagagctgactgacatgggtggaggtgaccctgagccaagttctctggcacttgctggacatgtcccctaccctcttcccaagaggagccatcccacatttgggtagttagtacccaggactggttggactgatcgggttagggaccctagagggttaagggaacaacagagatggggctgcaatgccctgtctggaactccgctctcccgctggggtggttctgattgtggctcatgcctggttgcaaattggtttttaacccacaaattgtgattattttttaaaaagccaaacagattttggcaggagttagaataaatcccggggcctgggcttctctattcttggccctccgtagtctccctccgagaggaggccagagggagaggaggatctcagcaggcctctagccgcttccagatgcagtctggggagtgggctgaaggtgaagggaggaaggctgtgggccactctcccttctgagaggcagctgcagctcaggccctaatacactctttgccctgtggcctctcccttttccccccttctggttggaggagggagaagtgggaagtagcttgggaactggtttgtccacataaacttccccattgttccttggcccgccctcagggcagagccccctgcccaggctgggtaagagatgggcttggtccagcagggaccctgagggaacaaacccttttccttctggggagagagtgccccccctaccatgtagttgaacaggggctaggagctccccactcccctccctctaacagcaggctgtgtgggtttcaattcccatccttcccaccccggctaggtgtcgtccaccctgtatcctgtgtctgagtgtgtgtgggggggttctgtactaatttccatggccggtggcttttccttccatgcatcactcccccccgcatgcccaggggccacccgcctggcattaccgcatgctggggtcattgggggaggggggtggggctcacgctgtcctgtggtcttgagatttttatttttgcatatgtaatccattctgtacaggtagctaactttgtaaacgctgtgtattccctctgcccccatggctgctggtgtaaataaactgcatctcccgttggta

SEQ ID NO: 109396 - DNA, 539 bp, Homo sapiens
  Payload ID: 1482
  Gene Symbol: ATXN7L3
  Gene Name: ataxin 7-like 3
  ENST ID: ENST00000590537
  CDS Start-End: 322-539
ctttgtcaaatcttttttccttccctgggttctcggctcccccttttcgttaccctttccccaaagctatggtatctcccattccagaaccccaattcccctcgaagatccaagtcattaaaacacaaaaatgggttctctgtctgtacctctgcatcaaacacccttccccttcttttttcttcttcaggggaacttagcaattcggatccttttaagtataacaattcaactgggatcagctatgagaccctggggccggaggagcttcgcagcctgctaaccacgcaatgtggggtgatttctgaacacaccaagaagatgtgcacaaggtccctgcgctgcccacagcacacagatgagcagaggcgaaccgtacggatttattttctcgggccctcggctgtccttccagaggtcgagagctccctggataatgacagctttgacatgactgacagccaggccctgatcagccggcttcagtgggacggctcctctgacctctcaccctctgattcaggctcctccaagacgag

SEQ ID NO: 109397 - DNA, 1341 bp, Homo sapiens
  Payload ID: 1482
  Gene Symbol: ATXN7L3
  Gene Name: ataxin 7-like 3
  ENST ID: ENST00000587097
  CDS Start-End: 418-1341
tcgcggcacacgcgcgcgcgctccgggctcgcgccgcaccccccgcccgggagaggcgggctggagtggggggcggggggaggggcgcgcggacggcgcgcggactgcgcgcgggcggggtgaggtgaggaggaggaggcggcgacgggacaagaagggaggggaaggggccatggccgcccggtgaggcggccaggcgggggggcggcccgaccccccggccccgggccctgggccccggggagaggcgaggacggaccgacggacatggggctccggagcagccgccgccgtcgccgccgccggaggacgcggccctgagaggctgccgggccccggcgcggccccccgggcgggccgtgttgccgcccgctgtgctatgagcagtcagagcgccgtctccacaagagtttacaaatgaaaatggaggaaatgtctttgtctggcctggataacagcaaactagaggccatcgctcaggagatatacgcggacctggtcgaggattcttgtttgggattctgctttgaggtacaccgggctgtcaagtgtggctacttcttcttggacgacacggaccctgatagcatgaaggattttgagatcgtggaccagccgggcttggacatctttggacaggttttcaaccagtggaagagcaaggagtgtgtttgccccaattgcagtcgcagcattgccgcctcccgctttgctccccatctggagaagtgcctgggaatgggtcggaacagcagccgaatcgccaaccgccggattgccaatagcaacaatatgaataagtctgagagtgaccaagaagataatgatgacatcaatgacaacgactggtcctatggctcggagaagaaagccaagaagagaaagtcagacaagaaccccaattcccctcgaagatccaagtcattaaaacacaaaaatggggaacttagcaattcggatccttttaagtataacaattcaactgggatcagctatgagaccctggggccggaggagcttcgcagcctgctaaccacgcaatgtggggtgatttctgaacacaccaagaagatgtgcacaaggtccctgcgctgcccacagcacacagatgagcagaggcgaaccgtacggatttattttctcgggccctcggctgtccttccagaggtcgagagctccctggataatgacagctttgacatgactgacagccaggccctgatcagccggcttcagtgggacggctcctctgacctctcaccctctgattcaggctcctccaagacgagtgaaaatcagggatggggtctaggtaccaacagctctgagtcacggaaaacc

SEQ ID NO: 109398 - DNA, 622 bp, Homo sapiens
  Payload ID: 1482
  Gene Symbol: ATXN7L3
  Gene Name: ataxin 7-like 3
  ENST ID: ENST00000589805
  CDS Start-End: 204-622
ccctcccggactcctctccccggccggccggggctgctggcgggcggggaaggagaggggctgggacgcgtcccactctctgggggtcggtctgtcccggcccggcgccggccccggcggctcggctgtcctccccccagtcgccgtgttgccgcccgctgtgctatgagcagtcagagcgccgtctccacaagagtttacaaatgaaaatggaggaaatgtctttgtctggcctggataacagcaaactagaggccatcgctcaggagatatacgcggacctggtcgaggattcttgtttgggattctgctttgaggtacaccgggctgtcaagtgtggctacttcttcttggacgacacggaccctgatagcatgaaggattttgagatcgtggaccagccgggcttggacatctttggacaggttttcaaccagtggaagagcaaggagtgtgtttgccccaattgcagtcgcagcattgccgcctcccgctttgctccccatctggagaagtgcctgggaatgggtcggaacagcagccgaatcgccaaccgccggattgccaatagcaacaatatgaataagtctgagagtgaccaagaagataatgatgacatcaa

SEQ ID NO: 109399 - DNA, 3017 bp, Homo sapiens
  Payload ID: 1482
  Gene Symbol: ATXN7L3
  Gene Name: ataxin 7-like 3
  ENST ID: ENST00000591295
  CDS Start-End: 1-559
gtcattaaaacacaaaaatggggaacttagcaattcggatccttttaagtataacaattcaactgggatcagctatgagaccctggggccggaggagcttcgcagcctgctaaccacgcttatattcctcttccagcaatgtggggtgatttctgaacacaccaagaagatgtgcacaaggtccctgcgctgcccacagcacacagatgagcagaggcgaaccgtacggatttattttctcgggccctcggctgtccttccagaggtcgagagctccctggataatgacagctttgacatgactgacagccaggccctgatcagccggcttcagtgggacggctcctctgacctctcaccctctgattcaggctcctccaagacgagtgaaaatcagggatggggtctaggtaccaacagctctgagtcacggaaaaccaagaaaaagaaatcccatctgagcctggtagggactgcctccggcctaggttccaacaagaagaagaagccaaagccaccggcacccccgacgcccagcatctatgatgacatcaactgacttgggtgcaagggatagcctttggctgagcagagccctctctcctgacccccacccaggtggcatagcctggcaaatggacggctgctgggggttggggcttgggaagcttggtgggccaggcaggcagaggatccgattatgcgcccctggggggtgtcaaagtcctctgcaatggagcacgactcctcggcgtgcaggactcagacctggacatattatgccttggacataagtttggtggggaggcggttttcctatttattctgtgagttactggatgtccagctaggccaggggcctgacctgggcactgtgccagggcactgcctgccccccaccccaggaactggactaagccctgctgaggggcaatgtggcgacccgggaggctgtgggttggaagctgagcctggagggggcctgcctcggccgccctcagcaatgtgaatgggtccggtgcttggagctgaggggcaaggctgggcatgtcctgtctgtgtgcagaatcttatcaaatgcccccagtcccaggggtaggcaggcacagagtgctgtctgctgaggtgggcgtccagaactgccgccaccttccctgcccctcacaggggcagccctttcccctcagtccccatgggcctccttggcagcaggagctgtccttttgttgggtgccaggaaagggcctccagcctctacagcttcaaggaatgggaaagggagggtaggaagagggagaagtgtcagaattcctccccctgcctctcctccctgacccagggctggtgaggagtggggccccaaggtgagagggaacggtgctgctttatttgaaatgttttcttacctcattccctgccccaggaagggacccagcctcaccctcctggggtggccccgtgttcctcctgcccaccctgccccactgccctaccggggcagcccaggttcccaactgctgcttccacccccttcaccttgactggcttcagttcctctcagcgctcctgcctccaaagcgtgccctgtttcccttccttagcgcttttaagttatttattctgtacttgtggtttggggctctgaggaaaatcctaatcttgtgcctctccccctttgctaggagttgggtgggaagagagggtggcctctgtgccccaggttgtcagtggaggggaaggggtgtcactgcccctctgtgggactgtcatgccagtgtgcccacctgcctggtctacatcctaaagagatgtaccgtcccccctccatgcgggcaccaccactcccaggagccaagctggaggaccgcgacctgggctgggagcagagctgactgacatgggtggaggtgaccctgagccaagttctctggcacttgctggacatgtcccctaccctcttcccaagaggagccatcccacatttgggtagttagtacccaggactggttggactgatcgggttagggaccctagagggttaagggaacaacagagatggggctgcaatgccctgtctggaactccgctctcccgctggggtggttctgattgtggctcatgcctggttgcaaattggtttttaacccacaaattgtgattattttttaaaaagccaaacagattttggcaggagttagaataaatcccggggcctgggcttctctattcttggccctccgtagtctccctccgagaggaggccagagggagaggaggatctcagcaggcctctagccgcttccagatgcagtctggggagtgggctgaaggtgaagggaggaaggctgtgggccactctcccttctgagaggcagctgcagctcaggccctaatacactctttgccctgtggcctctcccttttccccccttctggttggaggagggagaagtgggaagtagcttgggaactggtttgtccacataaacttccccattgttccttggcccgccctcagggcagagccccctgcccaggctgggtaagagatgggcttggtccagcagggaccctgagggaacaaacccttttccttctggggagagagtgccccccctaccatgtagttgaacaggggctaggagctccccactcccctccctctaacagcaggctgtgtgggtttcaattcccatccttcccaccccggctaggtgtcgtccaccctgtatcctgtgtctgagtgtgtgtgggggggttctgtactaatttccatggccggtggcttttccttccatgcatcactcccccccgcatgcccaggggccacccgcctggcattaccgcatgctggggtcattgggggaggggggtggggctcacgctgtcctgtggtcttgagatttttatttttgcatatgtaatccattctgtacaggtagctaactttgtaaacgctgtgtattccctctgcccccatggctgctggtgtaaataaactgcatctcccgttggta

SEQ ID NO: 109400 - DNA, 593 bp, Homo sapiens
  Payload ID: 1482
  Gene Symbol: ATXN7L3
  Gene Name: ataxin 7-like 3
  ENST ID: ENST00000590169
  CDS Start-End: 152-593
ttaggagtctgtgcagttctttgccacaccctgtgggtttgctttgaggccttggagttccttctcctccccctgctgcattgcaccatggccgtgttgccgcccgctgtgctatgagcagtcagagcgccgtctccacaagagtttacaaatgaaaatggaggaaatgtctttgtctggcctggataacagcaaactagaggccatcgctcaggagatatacgcggacctggtcgaggattcttgtttgggattctgctttgaggtacaccgggctgtcaagtgtggctacttcttcttggacgacacggaccctgatagcatgaaggattttgagatcgtggaccagccgggcttggacatctttggacaggttttcaaccagtggaagagcaaggagtgtgtttgccccaattgcagtcgcagcattgccgcctcccgctttgctccccatctggagaagtgcctgggaatgggtcggaacagcagccgaatcgccaaccgccggattgccaatagcaacaatatgaataagtctgagagtgaccaagaagataatgatgacatcaatgacaacgactggtcctatggct

SEQ ID NO: 109401 - DNA, 7604 bp, Homo sapiens
  Payload ID: 1483
  Gene Symbol: ATXN7L3B
  Gene Name: ataxin 7-like 3B
  Uniprot ID: Q96GX2
  ENST ID: ENST00000519948
  CDS Start-End: 287-580
agaggcccaggaggctgggtgaggcgctgagacggtttggcggtgagtcctgggccaggcgcagctgaaaggcccgcaacccgggaaacgtcaaaacaaacagaaggacttgggattccggagcagtcgcccctatcgctgctcctgcagttgcggacgccaccgaccccgccgccggaggactgggcactgaaaggcctctaggcctaggcgcggcccgcggagccagacgtgttgctgccgtgagtaaaacgagcgccctctccgcactcgtttacaaattaaaatggaggaaatttcgttggccaacctggatactaacaagctagaggccatcgctcaggagatttacgtagacctgatagaggattcttgtttgggattctgctttgaggtgcaccgggcagtcaagtgtggctacttctacctggagttcgcagagactggtagcgtgaaggattttggcattcagccagtggaagacaaaggagcgtgccgcctcccgctttgctcccttcccggagaacctgggaatgggcctgatcagcagctgcagcgctcacctccggaattccagtagctgcaaaatgagagtctgaaagtggccaggacaataacatagactggtcctgtggcttcgaggagtaagctaagtagaaaaaagtagaaaaatcagacaaaagttttaattcccccttgaagatcctagcatttaaaaacccaaagtggataatttaggaatcctttttttaaagtgtattacctggagcaagctctgaagccctgggcaggaggagctgcacagcctgcgggccatgcagtgcctgttgatctctaaacacaccaggatgtgcgcaagatcctgtagtgcccccagtgcacaggtgagcagttgtgtgcccagcatataaaatttttggttcctcagcctttctgtctgcctgatgtcaagggcttcttggacagtttggacgttacagttcgtcaggccgtgatcagtggcctgcagtgggactgctcctttgatatctgaacctctgttatgggcttctctgagacaagtaaatgtcaggtgcaagatctggatactaacagtttcagtttgggaaatccaagaaaaagaattatcaagtttgatagggaagctctgtagccttgactccagcaagaagaaaaggtcaaaaccacgtgtttcccaaaagtccagactacaatgattcagctgacttgaggacaaggcctagcatttggctgagcagagccctcttccttgccctccaacctggtggcataggcttggcaaatggacaacttggttgtccagacaggttgaggattcggttatgatcccctggggaggtagcagggacctctgcaactatgcatgatttctcaaacttcaagattcatgtctggatgtattatgctgtggatataagtttagtagggcggtcatttcctactctgagttactggttacctagccagtccatgggtgtgacttggtccttaagtcaggtcactatctgcctcccaccctgggggcaggactgaagtatggaagagcatcatggctgtgcaggaggctgtggtttgaaaactgagcccagagggcactttcagctgccctcaataatgtgaatggattagtgctaggagccaaggagcaggactggattatctcatctgactgtgtgcagaatcctgttgaatgtccctgttttctttggttgggcagtcagagctctgctatggtgaacatccagactgtcaccactttctgtctgccgctcgaaagggatagtcctttccactcggtcccctttggatcttcttgacaacaggagcagtccttttattgttagaagtcagagaaagacctccagaatctcctgactttagggaatggtataggggaagatgggaagtaagagtcacatatcaaaactaccctccactttattccctgagcgagggtttatgaagtataaaggggtgggagccccgaggtgagcgggaacggtgctgctttatttgaaatgttttcttacctcattctgtgccccagtagggggtccagcctcatctgtctggcttggccctgtgttcctcctgtcccctgctccactgcctatctggtgccccaggtgctgcttgccactccagctgtcacattgaacagtttcaattcagctcttaatgctcctgcttccgaagcctgcccaatttcttttttcttggcctctgttttttttttttctttctttttcccttgtttttgtagaagactcagaggagaatctttcttatggctccctctgttgagattggaattggaagagaacttaattttttgtatttaaaatgcagtgtcatgcctataagcatttctcctatataggactgctttgctagtgtgccctcttgctgtgtcttacttcataaggagttgtatcttcccacctccatttcaatactgccggttaggacctaagtagaagagcagtaaaggctgattgacacacagggggatggagttggtccttgtccattctctcacccttgctgtgcatgtatcaatccttatcccagaaggtactatttagactgtatagactgatttagattacatactttagaggattaaggaaaccatagagtttgggccttggaactgttactgccttgtcctagagttgtcctgatcaggcttggggcctagttacagattagtcttaaagaattgcattaacttaaaaaaaatcaaaccttggcaagagctaaaataatttggagatatctttgcccttgacttgtagacgacatctaagaggatgaagaaaggagagtctaagtgagactctggcctacttcctaacaatgtcttggaagtgggatgatggtaaaggagaaaggccacagtccaatccctctgccttcagatagggaactcaaatcctgaaattactgttttctttctggccttttctcctggttagaggaggaagcggaaagtagttttgagtagtattttgttcatattaccccccttttgttttttgtttctggcccctctaccaatagggcagtagcctcctgccctggatgggtataaggtgggcttggtccaacaggtgcccagagggtacatactcctttctggggagagaatgctccctaccatatagttgacagtggttaggaactctccctttccctacctaccttccttttaatagcagaattcctatttttcccttgattatgtgtattgatcaccctgcaatcctattatgtatctgagtgtgtgtgtgtgtgtatgtgtgtgttatgggggaaggggggggttctttaaaatttctgtggtttgtggctttttcttccatacattagttcccaccatcgcatgcccagggaccactgcctggcattatcgcatgctgggatcatcgggggagggtagtgaagctcaccactgtcctttgttttggagatttttatttttgcataagtagtccatcctatacagatagctgattaactgtattcccctttcccctatggctgctggtgtaaataaactgcatctccccattggtaaacagtaataaaattttaaaaaatgactacttggtccttggactctgtatattcatcttttaaagctgtatgttttcaggcattgacataatgagataaacgttgaaatgctattgaaccttaatacttcctccctaacaggagttttatcagaacagagaaactgtccaaccttgtttctcaatttggcctgcaaatttaactgtctgtagcatccagtgaaagagccaaaccgtatacaatcatcccttttccatatgaggtaagaaggtggtaagataaatccagtcctgtcactaaaagcccactgtgacagatagttccatttgaattgaactcaatatatcttagtaagtacattttaccatcattttaagctaatatccttgttctcaaaaggtaaagtgattcacagcagacgatggttctgcctaatttttttctcaatacttaaaaaattacctcaacactttagatctttcatttcatttttaatagtaattctgaggtttttcatcccattcctaacccagagtttgagcacttcccctagaaactacttagtgatcctgtgtcctaatcagtctcttgctatgtgttctaatttattaaagtttcgtattggacataatactgagattaataaaaattacagaaatgagtccagagaagaatctgactcaataggatacctcagggaagcttatagatgtgtaacatggtattgagtcttctcttctaggagcactcgatgtacttgtcactgtccagtttaaataggccagggccaacgtggtgatttgagaaaacttaaaaatttgacgtgtgaaacccatgatgtaaccatagcaggagaaattcttcaaatgaaatttcaccaagattgggtattttgccttaagtaagatttctactacttttattaaaattcactgtagggatctactatcaattagctttcaaatacatctgcagcaaatacttttggttcctgttttgtaggtttggagtttaatatatttagtgctaagctaattagttttctaaaaagataattgcaagacccctgctttaccaaatacttgacaatgggactttgaaggttatttcttatgttttctgactagtatgatctttaaagaaaaaaaaaaacacattgcataccttttaactaccaatgtttaacctcctagatttagcatttaactacagcatgtaccatcaggtcaagaatctgataaatgattgcttgatgttgacaaagtgaaagacaaaatgaagtgtactgaagtaactaaaaattcaggaagaactttcttgtgcacacattaataagtaacattgccttctcttaagacctatctgaagtgttgtgaagtttttcttacaattttttaaaagagatttatgaagaaactatgtgctaaaagcacaacaattattaaatttattttcatgttgttgtttaattatggttaacgaattgccagttttcaagtcagccagagataataccagatttcagaagttttactctgctgtgaaggattacgagctctctgattttcatttatgttccaaaagatgcccataatgttgctttggaggacagcattagaagtgatgttcctattcaaaaaggttttgtggataaaccttaaactcttggcggtgtttttgtttgtatttgttttcccatttttgaaaacattttcaatcatatttcttgagactcattggaaatatgtgagctaaaaaggaaatactaaattgattttagagatgaaaaaaaaatcttcagcagcagtgacttgcccatagttcaaaaagcaaaaatttacaagtggtggaagcaaaagtagaatgctgctgttgtgactcctaggtcagcggtctttgttgaagcaatggagtaataaatcaaacgactaattaaaaacaaaacaatgaaaaatccatgatgcttatgaacaacgttagggcaatgaatttgaaaacaaaaaaagggaagtctattttaaaatagaactcaaaagtaactcaaggaattgttaattttttaagtaaatgaatacatctataacttttaaaacaccacacaattagaattttatagagaatacagtaaatgaaacaacaacaacaaaaacaggcaaaataataccaaaatagattttttttttaaatgaagatgttagcaaaccaactcctttaaaataacaaaagtaaacatcaacaagtcagtttaatcacaggatggcaagatttcatctcaaaatcatcacattaccattagagaaaatccatgtgaaaatttgaactgatactgaaaaatagtttgaaaaaattcaatacgaattattgcctaaaaaacaaagacattaacaatatagaaaccaaagctcaagaacttgtacacactgcaaaagggtatgtaccaaaaatctacaccagttactatacttattaatgaatacttggaagcactccctttaaaagcaggaatggaagaaacaaaatttttactgttctaagatgatatttacatgaacaattttatagaatctagaaacagttgttctcagatgacatctacatctacatggataattttatagaatctacaaacataccattgaaagtagtgagaaaatttagcacagttactggatataagatcaatatctaaaatcagaataccaacatttaaaaagtgttattaaatttagaatgtaattcaacaagttataacagtcctatgaaataatatcacaagaactgtgtaagattttataaagaaaataatattttctaatatgttgggaaaatcccaagtaaatggagagaagatgttcacgcacagaaaatgcaatcaatatcattgctccaaattatgtgaatcggaagcaatctgtattacaatccaaatagatgtgctcatggaacttgacaaattaattttaagatttatatgaacaccagatgctagaatagacaagatctttttgacagatgtatattttagttttggtgcagaaacaatggaatagaatagagtttagaattagatcgaaacacacagattacacgtttatgtcttgatgtgtggttaaatttgtattataatcagtggaatataaaccagtattgtggaacagattatccataaataataaaactgtgctcagacacaaaattaattcctatatggattaaagatttaatgtgtaaaagtaaaaaatgtcaaatctttctagaaaaatataggaggatgtgttcataattgtgtataaggggaaaatttcttaaaagtacaaaacatagagaaaagattgatgtgttcgaccataataaaaatagaactttctgttcattaaatcatactagaaacaaacaaaccaataacctgatgtgctagttgtttagttcttataactgattaaagattactaacaaaatagttgtacaattgccaaatgtataaagtaaaagaacagctcattcttacaaaaagaaatatgaatggccaaaaagttgtaaaagttcccttaggttcaaagaaatgcaaactaaaaacaaaataccaatttaccctactcagtatgattaaatttttttaaatggtgatgacatcaactctgaaaggcatatggagcaattaaaacacttaaactgctagtaggctgtaaattggtaaaaaatgtttttaaaagcaatttagaaatacctgttgtggttgaagacaaaagtaaccaatatcccaatatttccacctgttgcagcattatatgtaatagggaaaaattgaaagtaatatacccatttggaatacatatagtcactatactgaagtgagaataaattaaccagagctgtacaaataaaatagtaaacctatgttcttatactttgttgcctttcttttgatgtttaacaataggcaaatcaatgctgtatgttgtttaaataattgtgaatatgaaataaaaactataccaaaaata

SEQ ID NO: 109402 - DNA, 578 bp, Homo sapiens
  Payload ID: 1484
  Gene Symbol: ATHL1
  Gene Name: ATH1, acid trehalase-like 1 (yeast)
  ENST ID: ENST00000397660
  CDS Start-End: 1-578
ggagatttacgaggctgtgacgtccccccagggccccgccatgacctggagcatgtttgctgtgggctggatggagctgaaggacgcagtgcgggcccggggcctcctggacaggagctttgccaacatggctgaacccttcaaggtgtggacggagaatgcagacgggtcaggcgctgtgaacttcctgacaggcatggggggcttcctgcaggcggtggtcttcgggtgcacggggttcagagtgagcgtctccggcatcttctaccaggggaacaagctcaacttctctttttccgaggactccgtgaccgtggaggtcacagctcgagcagggccctgggctcctcacctggaggctgagctgtggccatcccagtcccggctctccctgttgccaggacacaaggtctcctttccccgctcggctggccggatacaaatgtcacccccgaagctgcctggaagttccagctccgagttccctgggaggactttttcagatgttagggacccgctccagagccccctctgggtcaccctgggttcctccagccccaccgagtcactcactgtgg

SEQ ID NO: 109403 - DNA, 2963 bp, Homo sapiens
  Payload ID: 1484
  Gene Symbol: ATHL1
  Gene Name: ATH1, acid trehalase-like 1 (yeast)
  ENST ID: ENST00000409655
  CDS Start-End: 567-2036
ccggccctggcgtggagcagagggacacaggttcccacgctggcgcccggcgaccgggtggggctgcgtgacccccgtctcttggccactgtgaccaacgcatacctgggcacacgagtgtttcacgacacgctgcacgtgagcggcgtgtacaatggggctggcggggacacgcaccgggccatgctgcccagccccctcaacgtccggctggaggcccctgcagggatgggggagcagctgaccgagaccttcgccctggacaccaacacaggctcctttcttcacaccctggagggcccccgcttccgggcctcccagtgcatctatgcgcatcgcacgctgccccacgtgctggctttccgagtgtccatcgcccgcctggccccggggagcgggcccatcacgctgctcctgcggtcagccttctccccagaaagcccagacctggacctgcatcagggtcctgacttccagggagcccggcatggccacgctctcacaggtacctgtatggccacaccctcacccctgagcagcccggggggccacagcaagaggtacacatgctgtggacaccagcacccccagacctgacccttggggaaggtgaggaggctaggacgtgggacttcctgacagcagtgggcggcagccaggctgaggctcaggcctgcctcactgaggccctgcagctgcaggccaggggagctctgtatacggctcacgcacaggcctgggcccagctctgggtagaatgtggcttggacgtggtggggcccctgcagctgcgccaggccctgcgtggctccctctactacctgctcagtgccctgccccagcccaaggccccaggatacatctgccatggcctcagtcctgggggcctctccaatgggagccgtgaggaatgctactggggccacgtcttctgggaccaggacctctggatgttcccgagtatcctgatgttccacccagaagccgccagggccatcctggagtaccgcatccgcacgctggacggggccctggagaacgcccagaacctgggctaccagggagccaagtttgcctgggagagtgcagactccggcctagaggtttgccctgaggacatttacggagtccaggaggtccacgtcaacggggccgtggtgttggccttcgagctgtactaccataccacccaggacctgcagctatttcgagaggctggtggctgggacgtggtcagggctgtggccgagttttggtgcagtcgtgttgagtggagccccagggaggaaaagtaccacctgaggggagtcatgtcccccgacgagtaccattcaggggtcaacaactctgtgtacaccaacgtcctggtccagaacaggaaaaatctggagatttacgaggctgtgacgtccccccagggccccgccatgacctggagcatgtttgctgtgggctggatggagctgaaggacgcagtgcgggcccggggcctcctggacaggagctttgccaacatggctgaacccttcaaggtgtggacggagaatgcagacgggtcaggcgctgtgaacttcctgacaggcatggggggcttcctgcaggcggtggtcttcgggtgcacggggttcagggtcacccgagcgggtgtgacctttgaccctgtgtgtctgtcggggatctccagagtgagcgtctccggcatcttctaccaggggaacaagctcaacttctctttttccgaggactccgtgaccgtggaggtcacagctcgagcagggccctgggctcctcacctggaggctgagctgtggccatcccagtcccggctctccctgttgccaggacacaaggtctcctttccccgctcggctggccggatacaaatgtcacccccgaagctgcctggaagttccagctccgagttccctgggaggactttttcagatgttagggacccgctccagagccccctctgggtcaccctgggttcctccagccccaccgagtcactcactgtggaccctgcctctgaataatcaggaacggtggcttcagagacgtctcttgggccttccctctggccacgtctgcacccacccctcctgggcaccctcctagcctgccatccctcacctgcagccaggctctcagggaaggtccatgctgcttggcctgagttcaaggctttctgcctgtagcctggactcccgtggacccccgtgggcaggtggcttccccgtggcatctccacaccgcctctgcctgcccctgtggactgatgctatcgcgcaccgtcccacgaccccaccccgagctcctgaagccggggtctgagcctgcatcacctctggcctctcatcccccactctcctgagagcagtggtcacagcggccggccgctctgctgagaaggcagagaggcaggctcaggcctcagcgtggacagcagggataaggggcacgaaggacggggactcggccccttcagaattcctcaggactctcaggtgcagctttgccaaaaaggaacttttcatgtcatgcagttgaggggacttagtctcaatcccaggctcctcttgactctgggcagctttaatcaggttgggcagcctctgctacagcgtggggtgggatggctctcttccctcagccacgccgcttgtgaggacagaggtgggggagtgggaagtgggaagtcaccagagaacaggagagggatttgagggcgagaccccagcgctctccacggaccagccagagggactggagccaggtgtgcatgggttcaaggccctggccctgcccagcctttgtcttgggagctcagccccagggttcggtcgtcagcagtttcccaagaacaagatgtgatggcatctgctgctgaaaccctgatgaggaccaggccccctgcaccgctgtcagcctgaggaattaaagctttggtgctggggagagca

SEQ ID NO: 109404 - DNA, 3062 bp, Homo sapiens
  Payload ID: 1484
  Gene Symbol: ATHL1
  Gene Name: ATH1, acid trehalase-like 1 (yeast)
  ENST ID: ENST00000409479
  CDS Start-End: 259-2553
gggagagacacactcaggggctcagctgggttcctggagatcaacctttggggtctgagcccctctgagagtcgagctcctttcctgcgaggccccgtctaggaggggcctcaggaaaatcggggctgcccagctggttccgcaactccccccagttctgagggaggcttcaggggattacagacggtctcaagagggaggcccagccagtcccgcggcccctgacaccccatcaggccgctcaggcccagcagctccatggaggacgccggcgaggaccccaccacgtttgctgcccactctctgcccagtgacccccgtctcttggccactgtgaccaacgcatacctgggcacacgagtgtttcacgacacgctgcacgtgagcggcgtgtacaatggggctggcggggacacgcaccgggccatgctgcccagccccctcaacgtccggctggaggcccctgcagggatgggggagcagctgaccgagaccttcgccctggacaccaacacaggctcctttcttcacaccctggagggcccccgcttccgggcctcccagtgcatctatgcgcatcgcacgctgccccacgtgctggctttccgagtgtccatcgcccgcctggccccggggagcgggcccatcacgctgctcctgcggtcagccttctccccagaaagcccagacctggacctgcatcagggtcctgacttccagggagcccggtacctgtatggccacaccctcacccctgagcagcccggggggccacagcaagaggtacacatgctgtggacaccagcacccccagacctgacccttggggaaggtgaggaggctaggacgtgggacttcctgacagcagtgggcggcagccaggctgaggctcaggcctgcctcactgaggccctgcagctgcaggccaggggagctctgtatacggctcacgcacaggcctgggcccagctctgggtagaatgtggcttggacgtggtggggcccctgcagctgcgccaggccctgcgtggctccctctactacctgctcagtgccctgccccagcccaaggccccaggatacatctgccatggcctcagtcctgggggcctctccaatgggagccgtgaggaatgctactggggccacgtcttctgggaccaggacctctggatgttcccgagtatcctgatgttccacccagaagccgccagggccatcctggagtaccgcatccgcacgctggacggggccctggagaacgcccagaacctgggctaccagggagccaagtttgcctgggagagtgcagactccggcctagaggtttgccctgaggacatttacggagtccaggaggtccacgtcaacggggccgtggtgttggccttcgagctgtactaccataccacccaggacctgcagctatttcgagaggctggtggctgggacgtggtcagggctgtggccgagttttggtgcagtcgtgttgagtggagccccagggaggaaaaacacctcacgtgtgccagccccacgctgaccaccggcgtggagggaaggcctctgagactctgcactgagcaccatcttggacttgtgtgtccaggagtcatgtcccccgacgagtaccattcaggggtcaacaactctgtgtacaccaacgtcctggtccagaacagcctgcgctttgctgctgccctggcccaggacctgggtcttcccatccccagccagtggctggcggtggctgacaagatcaaggtaccctttgacgtggagcagaacttccacccggagttcgatgggtatgagcctggagaggtggtgaagcaggcagacgtcgtgctcctgggatacccagtccccttctccctgagtcctgatgttcgcaggaaaaatctggagatttacgaggctgtgacgtccccccagggccccgccatgacctggagcatgtttgctgtgggctggatggagctgaaggacgcagtgcgggcccggggcctcctggacaggagctttgccaacatggctgaacccttcaaggtgtggacggagaatgcagacgggtcaggcgctgtgaacttcctgacaggcatggggggcttcctgcaggcggtggtcttcgggtgcacggggttcagggtcacccgagcgggtgtgacctttgaccctgtgtgtctgtcggggatctccagagtgagcgtctccggcatcttctaccaggggaacaagctcaacttctctttttccgaggactccgtgaccgtggaggtcacagctcgagcagggccctgggctcctcacctggaggctgagctgtggccatcccagtcccggctctccctgttgccaggacacaaggtctcctttccccgctcggctggccggatacaaatgtcacccccgaagctgcctggaagttccagctccgagttccctgggaggactttttcagatgttagggacccgctccagagccccctctgggtcaccctgggttcctccagccccaccgagtcactcactgtggaccctgcctctgaataatcaggaacggtggcttcagagacgtctcttgggccttccctctggccacgtctgcacccacccctcctgggcaccctcctagcctgccatccctcacctgcagccaggctctcagggaaggtccatgctgcttggcctgagttcaaggctttctgcctgtagcctggactcccgtggacccccgtgggcaggtggcttccccgtggcatctccacaccgcctctgcctgcccctgtggactgatgctatcgcgcaccgtcccacgaccccaccccgagctcctgaagccggggtctgagcctgcatcacctctggcctctcatcccccactctcctgagagcagtggtcacagcggccggccgctctgctgagaaggcagagaggcaggctcaggcctcagcgtggacagcagggataaggggcacgaaggacggggactcggccccttcagaattcctcaggactctcaggtgcagctttgccaaaaaggaacttttcatgtcatgca

SEQ ID NO: 109405 - DNA, 3687 bp, Homo sapiens
  Payload ID: 1484
  Gene Symbol: ATHL1
  Gene Name: ATH1, acid trehalase-like 1 (yeast)
  Uniprot ID: Q32M88
  ENST ID: ENST00000409548
  CDS Start-End: 116-2329
ggtggcgcggcagccgggcggctcctccttcctcccggccctggcgtggagcagagggacacaggttcccacgctggcgcccggcgaccgggtggggctgcggcccagcagctccatggaggacgccggcgaggaccccaccacgtttgctgcccactctctgcccagtgacccccgtctcttggccactgtgaccaacgcatacctgggcacacgagtgtttcacgacacgctgcacgtgagcggcgtgtacaatggggctggcggggacacgcaccgggccatgctgcccagccccctcaacgtccggctggaggcccctgcagggatgggggagcagctgaccgagaccttcgccctggacaccaacacaggctcctttcttcacaccctggagggcccccgcttccgggcctcccagtgcatctatgcgcatcgcacgctgccccacgtgctggctttccgagtgtccatcgcccgcctggccccggggagcgggcccatcacgctgctcctgcggtcagccttctccccagaaagcccagacctggacctgcatcagggtcctgacttccagggagcccggtacctgtatggccacaccctcacccctgagcagcccggggggccacagcaagaggtacacatgctgtggacaccagcacccccagacctgacccttggggaaggtgaggaggctaggacgtgggacttcctgacagcagtgggcggcagccaggctgaggctcaggcctgcctcactgaggccctgcagctgcaggccaggggagctctgtatacggctcacgcacaggcctgggcccagctctgggtagaatgtggcttggacgtggtggggcccctgcagctgcgccaggccctgcgtggctccctctactacctgctcagtgccctgccccagcccaaggccccaggatacatctgccatggcctcagtcctgggggcctctccaatgggagccgtgaggaatgctactggggccacgtcttctgggaccaggacctctggatgttcccgagtatcctgatgttccacccagaagccgccagggccatcctggagtaccgcatccgcacgctggacggggccctggagaacgcccagaacctgggctaccagggagccaagtttgcctgggagagtgcagactccggcctagaggtttgccctgaggacatttacggagtccaggaggtccacgtcaacggggccgtggtgttggccttcgagctgtactaccataccacccaggacctgcagctatttcgagaggctggtggctgggacgtggtcagggctgtggccgagttttggtgcagtcgtgttgagtggagccccagggaggaaaagtaccacctgaggggagtcatgtcccccgacgagtaccattcaggggtcaacaactctgtgtacaccaacgtcctggtccagaacagcctgcgctttgctgctgccctggcccaggacctgggtcttcccatccccagccagtggctggcggtggctgacaagatcaaggtaccctttgacgtggagcagaacttccacccggagttcgatgggtatgagcctggagaggtggtgaagcaggcagacgtcgtgctcctgggatacccagtccccttctccctgagtcctgatgttcgcaggaaaaatctggagatttacgaggctgtgacgtccccccagggccccgccatgacctggagcatgtttgctgtgggctggatggagctgaaggacgcagtgcgggcccggggcctcctggacaggagctttgccaacatggctgaacccttcaaggtgtggacggagaatgcagacgggtcaggcgctgtgaacttcctgacaggcatggggggcttcctgcaggcggtggtcttcgggtgcacggggttcagggtcacccgagcgggtgtgacctttgaccctgtgtgtctgtcggggatctccagagtgagcgtctccggcatcttctaccaggggaacaagctcaacttctctttttccgaggactccgtgaccgtggaggtcacagctcgagcagggccctgggctcctcacctggaggctgagctgtggccatcccagtcccggctctccctgttgccaggacacaaggtctcctttccccgctcggctggccggatacaaatgtcacccccgaagctgcctggaagttccagctccgagttccctgggaggactttttcagatgttagggacccgctccagagccccctctgggtcaccctgggttcctccagccccaccgagtcactcactgtggaccctgcctctgaataatcaggaacggtggcttcagagacgtctcttgggccttccctctggccacgtctgcacccacccctcctgggcaccctcctagcctgccatccctcacctgcagccaggctctcagggaaggtccatgctgcttggcctgagttcaaggctttctgcctgtagcctggactcccgtggacccccgtgggcaggtggcttccccgtggcatctccacaccgcctctgcctgcccctgtggactgatgctatcgcgcaccgtcccacgaccccaccccgagctcctgaagccggggtctgagcctgcatcacctctggcctctcatcccccactctcctgagagcagtggtcacagcggccggccgctctgctgagaaggcagagaggcaggctcaggcctcagcgtggacagcagggataaggggcacgaaggacggggactcggccccttcagaattcctcaggactctcaggtgcagctttgccaaaaaggaacttttcatgtcatgcagttgaggggacttagtctcaatcccaggctcctcttgactctgggcagctttaatcaggttgggcagcctctgctacagcgtggggtgggatggctctcttccctcagccacgccgcttgtgaggacagaggtgggggagtgggaagtgggaagtcaccagagaacaggagagggatttgagggcgagaccccagcgctctccacggaccagccagagggactggagccaggtgtgcatgggttcaaggccctggccctgcccagcctttgtcttgggagctcagccccagggttcggtcgtcagcagtttcccaagaacaagatgtgatggcatctgctgctgaaaccctgatgaggaccaggccccctgcaccgctgtcagcctgaggaattaaagctttggtgctggggagagcattattcctctgaggagccgctgtgcttccttctgaagtgagggccgtgccccgggtcccatttctcctttcacttgagtcgggaagcacagcaactttaaggctcgcgcccagcaacatggctcccctcgcatctgcatctccctcctgctctggtgttgccgctgcaccctgtcctcggaggacagcagaggtttggacggagactcagggagggagggaaggaggcaaggacgcctgtggaaacatctttcaggcagctctagggtctgggggccaggatgcctgggtctcccaaggcctgtctgctgtctctgccaccctcagcggctgccagaagcagcgtgtgggggaggcatgtgctgcagcacacctgcggccgagaccagcactcagaggtcggctcccctgacaggaaccgtgtagggtgca

SEQ ID NO: 109406 - DNA, 734 bp, Homo sapiens
  Payload ID: 1484
  Gene Symbol: ATHL1
  Gene Name: ATH1, acid trehalase-like 1 (yeast)
  ENST ID: ENST00000482937
  CDS Start-End: 1-611
tgtttcacgacacgctgcacgtgagcggcgtgtacaatggggctggcggggacacgcaccgggccatgctgcccagccccctcaacgtccggctggaggcccctgcagggatgggggagcagctgaccgagaccttcgccctggacaccaacacaggctcctttcttcacaccctggagggcccccgcttccgggcctcccagtgcatctatgcgcatcgcacgctgccccacgtgctggctttccgagtgtccatcgcccgcctggccccggggagcgggcccatcacgctgctcctgcggtcagccttctccccagaaagcccagacctggacctgcatcagggtcctgacttccagggagcccggtacctgtatggccacaccctcacccctgagcagcccggggggccacagcaagaggtacacatgctgtggacaccagcacccccagacctgacccttggggaagtgccctgccccagcccaaggccccaggatacatctgccatggcctcagtcctgggggcctctccaatgggagccgtgaggaatgctactggggccacgtcttctgggaccaggacctctggatgttcccgagtatcctgatgttccacccagaagccgccagggccatcctggagtaccgcatccgcacgctggacggggccctggagaacgcccagaacctgggctaccagggagccaagtttgcctgggagagtgcagact

SEQ ID NO: 109407 - DNA, 4414 bp, Homo sapiens
  Payload ID: 1485
  Gene Symbol: AKNA
  Gene Name: AT-hook transcription factor
  Uniprot ID: Q7Z591
  ENST ID: ENST00000223791
  CDS Start-End: 826-3525
gagagaaacgaccagattcttctgccctcagcccaaggaacacatctggaagcagacaaagacgtcacctaagccactcccttcccgattcattggctccatcagccccctgaatccccagcccaggccaacgcggcagggcaggccgctgcccagacagggagccactctggctggccgctcctcttctaatgcccccaagtatggccgggggcagttgaactacccactccctgatttctccaaggtagggccccgggtgagattccccaaagatgagagctaccgtccccccaagtccagaagccacaacaggaagcctcaggcccctgccaggcccctcatcttcaagtctccagctgagattgtgcaggaggtgctgttgagcagtggagaagcagccctggcaaaggacacgcctcctgcccaccctatcaccagggtaccccaagaatttcagacgcctgagcaagccactgagctggtccatcagctccaggaagactaccacaggctcctcaccaagtacgctgaggccgagaacaccattgaccagctacgcctcggggccaaggtgaacctgttctctgacccaccccagcccaaccacagcatccacacgggaatggtgccccaggggaccaaggtcttgtccttcaccatcccacagccccgctctgcagagtggtggccgggcccggccgaggacccccaggcctctgcggcctcagcctgggggcagccctggccctgccacttggcatcttggtgaccctggggtggccatcagctcgaggagacttgagcccctcctcgcttaccagcatgcccaccctggggtggcttccggagaaccgggacatctctgaggaccagtcctcagcagagcagacccaggcactggcttctcaggccagccagttcctggccaaggtggagtcctttgaaagactgatacaggcaggacgtctcatgccccaggaccaagtcaagggcttccagcggctgaaggctgcccacgcggccctagaggaggagtacctgaaggcttgtcgggagcaacaccctgcccagccgcttgccggctccaaggggacgcctggaagatttgatcctcgcagggagctggaggcagagatataccgtctgggaagctgcctggaagagctgaaggaacacatagaccagacccagcaagagcctgagccgcccgggtcagactcagctctggacagcaccccagccctgccctgcctccatcagccaacgcacctgcctgctccttctggacaagcccccatgccagccatcaagacctcctgccctgagcctgctaccaccactgccgccgccagcactggcccctgcccattgcacgtaaatgtggaggtgagctctggcaacagtgaggtggaggacaggccacaggaccccctggcccgactcaggcacaaggagctgcagatggagcaagtttaccatggcctcatggagcggtacctcagtgtgaagtctctcccagaagccatgagaatggaggaggaggaagaaggagaggaggaggaggaggaagaggggggaggtgactccctggaagttgatggggtggctgcaactccagggaaagcagaggccaccagggtcctcccaaggcagtgcccggtgcaggctgagaaaagtcatggggctcccctggaggaggccacggagaagatggtatctatgaagccaccaggtttccaggcatccctggctagagacgggcacatgtcaggcctgggcaaggctgaggcagcccctccaggccctggcgtgccaccccaccctccaggcaccaagtccgcagcatcccaccaaagtagtatgaccagcctggagggaagcggcatctctgagcgccttccacagaagcctttgcaccgaggcggtgggccccacctggaggagacctggatggcgtccccagagacagacagtggctttgtgggctcagaaacaagcagagtttcacccctcacccagactccagagcaccggctctcccacatcagcacagcaggaacattagcccagccctttgctgcatctgtgcccagggatggagcttcctaccccaaggccaggggttctctgattcccagaagagccacagagcccagcacaccccggagccaagcacagaggtacctctccagcccaagtgggcctctccggcagagggcacccaacttcagcctggagcggacactggcagccgagatggcggttcctggctcagagtttgaggggcacaaacggatttctgaacagccccttcccaacaagacaatcagcccacccccagcccccgcccctgccgctgcgcctctaccctgtggaccaacagagaccatccccagcttcctgctcaccagggcagggcgagaccaggccatctgtgagctgcaagaagaggtgtcccggcttcgtctgcggctggaagacagcctgcaccagccactccagggcagcccgacacgcccagcatctgcctttgaccgccccgcccggacccgcggccggccagcagactccccagccacctggggctcccattatggcagtaaatccacagagagattgcctggtgagcctagaggtgaagagcagattgtccctccaggaaggcagcgagccaggtcttcctcagtgcctcgggaggtgctccgactgtccctgagttcagaatctgagctgccctccctaccactgttctctgagaagagcaagaccaccaaggacagtccacaggcagctcgggatggaaagagaggggtgggcagtgctggatggccagacagggtcaccttccggggccaatacacaggccacgaataccatgttctgtcccctaaggcggtcccaaaaggcaatggcacagtctcctgtccccactgccggcccattaggacccaggatgcgggtggtgctgtcacaggggacccactgggaccgcctcccgctgatacccttcagtgtcccctgtgtggtcaagttgggtctcccccagaggcagatggtccaggctcagccacctctggggcagagaaggccaccacgaggagaaaagcatcttcaactcccagccccaagcagaggagcaagcaggcggggtcgtcgccacgcccaccccccggactgtggtatctggcaacagcgcccccagcaccagcccctccagcctttgcctacatctcctcggttcccatcatgccttatccacctgccgctgtgtactatgcgcctgcaggacctacctcagcccaaccagctgccaagtggccgcccacagcctctcccccaccagcccggagacaccggcactccatccagctcgacctgggcgacctagaggagctcaacaaggccctgagccgggccgtgcaggctgccgagagcgtccgctctaccaccaggcagatgagaagctcgctgtcagccgacctgcgccaggctcacagcctgcggggctcctgcctcttctgacttcactgggggcccagaggcagatgggtgggtgggtgggcaggtggcctgccaggccaggagtgggctggagctgctgaggcccagaaggcccgcatagttcctcaccaggagggtctccctccagcacaggtcccgcctgctcagtccctgtgctttccaagtggagggggtgtcagctcggtcaccaagagaagtgacttcccaggagcaccagtcccctcacagaggtgctgtgagcgaggcctccttcggtccaggcagaacctcaggcagtctctcctggtcctgcatgtgtgcaactccagctaataataggtattttatatacagatggacagatatttttttaaactggggagttttcctgatcttgggtcctctttagggggccagacaagaaaggcctacggtttctggagcaaacctgtcccccacctgtgaccagtcactctggggcaagcatcactgggaagggcatagccggagacctttctcctagtgactggtagtcagtggggcattttaggatgtcagggccccagggtgacatgtgtccagcttttctatggcagcagaggcctttccctcagacaagctacaaagtgcccaggatgccatccaccatggtccccttcagtacctcacgcatggtccccagcttctcctaggatcccagtggcgtttatcagtggccagctacctgccaggcccgggctggggcacggtctgcggccatgaggccaggccgcctcccgcacccctaccccgtggcagcagcatacctctgcatttctggaatgtgtgtgcatcaatgatgtttgtatatttgaggcatttaaaaatctattttcgttacgagggcaaatgaagaatgaatattgatctt

SEQ ID NO: 109408 - DNA, 7380 bp, Homo sapiens
  Payload ID: 1485
  Gene Symbol: AKNA
  Gene Name: AT-hook transcription factor
  Uniprot ID: Q7Z591
  ENST ID: ENST00000307564
  CDS Start-End: 163-4482
gcaactgaagacggaggtgcccaaggtcagaaggaagcaccacacagagggcacaggcaggatggccgatgctgacaggaaccagcggtgactctggggcccctggcagcagctctgtctcctgaagatgaagtggcccaggtgaagcccaggccagccccaatggccagctcggagactgagatccgctgggctgagcctggcctggggaagggcccccagcggcggcgctgggcctgggccgaggacaagagggatgtggatagaagtagttcacaaagctgggaagaagagagactctttcccaatgccaccagccccgagctcctagaggacttccgcctggcccagcagcacctgccgcccctggagtgggacccacacccgcagcccgatgggcatcaggattccgagtcaggagagacttcgggagaagaggctgaagcagaggatgtggacagcccagcaagttcccatgagcctcttgcctggctcccccagcagggccgtcagctggacatgactgaagaggagccagatgggaccctcggaagtctggaggttgaggaggctggagagagctcctcaaggttggggtatgaggctggtctcagcttggaaggccatggaaacaccagccccatggctcttgggcatggtcaggccaggggctgggtggcttctggcgaacaagccagtggggacaaactttctgaacattccgaggtcaacccatccgttgaactcagcccggcaaggtcctggagcagtgggacagtgagcctcgaccaccctagtgacagccttgattctacctgggaaggagagaccgatggcccccagcccactgccctggcagaaaccttgccagagggccccagccaccacctcctaagcccagatggcagaactggaggcagtgttgctcgggcaacccccatggaattccaggactcctcagctcccccagcccagagtccgcagcatgccacagatagatggaggagagaaacgaccagattcttctgccctcagcccaaggaacacatctggaagcagacaaagacgtcacctaagccactcccttcccgattcattggctccatcagccccctgaatccccagcccaggccaacgcggcagggcaggccgctgcccagacagggagccactctggctggccgctcctcttctaatgcccccaagtatggccgggggcagttgaactacccactccctgatttctccaaggtagggccccgggtgagattccccaaagatgagagctaccgtccccccaagtccagaagccacaacaggaagcctcaggcccctgccaggcccctcatcttcaagtctccagctgagattgtgcaggaggtgctgttgagcagtggagaagcagccctggcaaaggacacgcctcctgcccaccctatcaccagggtaccccaagaatttcagacgcctgagcaagccactgagctggtccatcagctccaggaagactaccacaggctcctcaccaagtacgctgaggccgagaacaccattgaccagctacgcctcggggccaaggtgaacctgttctctgacccaccccagcccaaccacagcatccacacgggaatggtgccccaggggaccaaggtcttgtccttcaccatcccacagccccgctctgcagagtggtggccgggcccggccgaggacccccaggcctctgcggcctcagggtggccatcagctcgaggagacttgagcccctcctcgcttaccagcatgcccaccctggggtggcttccggagaaccgggacatctctgaggaccagtcctcagcagagcagacccaggcactggcttctcaggccagccagttcctggccaaggtggagtcctttgaaagactgatacaggcaggacgtctcatgccccaggaccaagtcaagggcttccagcggctgaaggctgcccacgcggccctagaggaggagtacctgaaggcttgtcgggagcaacaccctgcccagccgcttgccggctccaaggggacgcctggaagatttgatcctcgcagggagctggaggcagagatataccgtctgggaagctgcctggaagagctgaaggaacacatagaccagacccagcaagagcctgagccgcccgggtcagactcagctctggacagcaccccagccctgccctgcctccatcagccaacgcacctgcctgctccttctggacaagcccccatgccagccatcaagacctcctgccctgagcctgctaccaccactgccgccgccagcactggcccctgcccattgcacgtaaatgtggaggtgagctctggcaacagtgaggtggaggacaggccacaggaccccctggcccgactcaggcacaaggagctgcagatggagcaagtttaccatggcctcatggagcggtacctcagtgtgaagtctctcccagaagccatgagaatggaggaggaggaagaaggagaggaggaggaggaggaagaggggggaggtgactccctggaagttgatggggtggctgcaactccagggaaagcagaggccaccagggtcctcccaaggcagtgcccggtgcaggctgagaaaagtcatggggctcccctggaggaggccacggagaagatggtatctatgaagccaccaggtttccaggcatccctggctagagacgggcacatgtcaggcctgggcaaggctgaggcagcccctccaggccctggcgtgccaccccaccctccaggcaccaagtccgcagcatcccaccaaagtagtatgaccagcctggagggaagcggcatctctgagcgccttccacagaagcctttgcaccgaggcggtgggccccacctggaggagacctggatggcgtccccagagacagacagtggctttgtgggctcagaaacaagcagagtttcacccctcacccagactccagagcaccggctctcccacatcagcacagcaggaacattagcccagccctttgctgcatctgtgcccagggatggagcttcctaccccaaggccaggggttctctgattcccagaagagccacagagcccagcacaccccggagccaagcacagaggtacctctccagcccaagtgggcctctccggcagagggcacccaacttcagcctggagcggacactggcagccgagatggcggttcctggctcagagtttgaggggcacaaacggatttctgaacagccccttcccaacaagacaatcagcccacccccagcccccgcccctgccgctgcgcctctaccctgtggaccaacagagaccatccccagcttcctgctcaccagggcagggcgagaccaggccatctgtgagctgcaagaagaggtgtcccggcttcgtctgcggctggaagacagcctgcaccagccactccagggcagcccgacacgcccagcatctgcctttgaccgccccgcccggacccgcggccggccagcagactccccagccacctggggctcccattatggcagtaaatccacagagagattgcctggtgagcctagaggtgaagagcagattgtccctccaggaaggcagcgagccaggtcttcctcagtgcctcgggaggtgctccgactgtccctgagttcagaatctgagctgccctccctaccactgttctctgagaagagcaagaccaccaaggacagtccacaggcagctcgggatggaaagagaggggtgggcagtgctggatggccagacagggtcaccttccggggccaatacacaggccacgaataccatgttctgtcccctaaggcggtcccaaaaggcaatggcacagtctcctgtccccactgccggcccattaggacccaggatgcgggtggtgctgtcacaggggacccactgggaccgcctcccgctgatacccttcagtgtcccctgtgtggtcaagttgggtctcccccagaggcagatggtccaggctcagccacctctggggcagagaaggccaccacgaggagaaaagcatcttcaactcccagccccaagcagaggagcaagcaggcggggtcgtcgccacgcccaccccccggactgtggtatctggcaacagcgcccccagcaccagcccctccagcctttgcctacatctcctcggttcccatcatgccttatccacctgccgctgtgtactatgcgcctgcaggacctacctcagcccaaccagctgccaagtggccgcccacagcctctcccccaccagcccggagacaccggcactccatccagctcgacctgggcgacctagaggagctcaacaaggccctgagccgggccgtgcaggctgccgagagcgtccgctctaccaccaggcagatgagaagctcgctgtcagccgacctgcgccaggctcacagcctgcggggctcctgcctcttctgacttcactgggggcccagaggcagatgggtgggtgggtgggcaggtggcctgccaggccaggagtgggctggagctgctgaggcccagaaggcccgcatagttcctcaccaggagggtctccctccagcacaggtcccgcctgctcagtccctgtgctttccaagtggagggggtgtcagctcggtcaccaagagaagtgacttcccaggagcaccagtcccctcacagaggtgctgtgagcgaggcctccttcggtccaggcagaacctcaggcagtctctcctggtcctgcatgtgtgcaactccagctaataataggtattttatatacagatggacagatatttttttaaactggggagttttcctgatcttgggtcctctttagggggccagacaagaaaggcctacggtttctggagcaaacctgtcccccacctgtgaccagtcactctggggcaagcatcactgggaagggcatagccggagacctttctcctagtgactggtagtcagtggggcattttaggatgtcagggccccagggtgacatgtgtccagcttttctatggcagcagaggcctttccctcagacaagctacaaagtgcccaggatgccatccaccatggtccccttcagtacctcacgcatggtccccagcttctcctaggatcccagtggcgtttatcagtggccagctacctgccaggcccgggctggggcacggtctgcggccatgaggccaggccgcctcccgcacccctaccccgtggcagcagcatacctctgcatttctggaatgtgtgtgcatcaatgatgtttgtatatttgaggcatttaaaaatctattttcgttacgagggcaaatgaagaatgaatattgatcttaaaaaaagaaaagaagacaaaaaaaatacccaaagccatccgtgtctctgctgtatgtcattaacttttgccttcaatgtcaagtttatggggtggtaggtttgatgcccagccaagccctttcccaggggacctgttgggtgctctgcctgcctccctctggtggcttctgtttctccagttttccccctttgcctatctcagaaccataaatctttcaactgcggagggccttgaggtggggctgcctagccaagtcccttttgactgaggccagagatgtaaatgaggcacacagcaagttgctgtctacaagagtatgcacctggactctccagtgctcctttctttcttttttttttcttttttctttttctttttttttttttttttgagactgagttttgctctggttgcccaggctggggtacagtggtggaatctcggctcactgcaacctccgcctcccgggttcaagtgattctcttgcctcagcctcccgagtagctgggattacaggcatgcaccaccacgtctggctaattttgtatttttagtagagacagggtttctccatgttggtcgggctgatcttgcactcccagcctcaggtgatccacccacctcagcctcccaaattgctgggattacaggcgtgagccatggcgcccagccttccagtactttcagtagcaaacagcacctgccatttagggagcacctgctagaccctgattccggtgctaagcactgggcattgtctgcttcacacagtccatgtgctaaccctcaggaccctcactctgccccccttttactgatgaggagagtggggttccaatgggccatctgcccaaactggtttgggagagaacctggatttaaactcacattggtctgacccaaagtccacattctttgttatgtgtgttttttgcttcctctacctccatgattctttttctcttgacctctggtttcttcctcacgtggctttttcttccatgttccccacttctcgtctcccttgcttctccctgctctgcccatcatgactcatttctgtttcatttttcagcggatcctcctgagtatggttgaaaatggtgtctcactgaaagtaacactgaaatggacaaacttcctgtaggttctgagccttcagttccaggacattgtgggaccccagaggctgtcctgtccacttgccttctgaggacatcagctcggtgtccccagcctccgtgctgtgggcacagctgtggtttgggtgctgagcaaaggatgctgtagtcttggccctgtggagcttggctgttgggacaggaggtacaaaggggagtggtgcctgtggacacaggactagaccccaggacatcagggcctcgggctcatggtcctatcaccctggatggtatacgcagctgcacacgtggaattgctcaaacaattcaggcccaacttttctgccacggaaggggtgctgcttccctcacgtaacaagaggctgtcaatcacgagcacccaggttggggtgaggccggccctttgtggcttgtgccactgagtgggctgtgcctcgggcttggctccacctcagggctccacatttgcaggatgtcagctgatttccagggaccagcctcacccttacgtgttatctccttcttctgggtctcccaggtgagcaccctaagaacacatccatggagacacccagcccctctggcctgggccccaagccctctgcatcaccccagcccttccctgccctgccctgtcctggcccaggcaaccgcctcttgcctagttgcccacagcagccttcactcaggccttcctgcctccagcctggtccccacaacgtgcctcccccgatggccatggtaatactggaataaggtccttgtgataggcaccacatgcctgaactctccccaccccatccaccttgtatttgtctgttctcacattgctataaagaactacctgagactgggtagtttatg

SEQ ID NO: 109409 - DNA, 3334 bp, Homo sapiens
  Payload ID: 1485
  Gene Symbol: AKNA
  Gene Name: AT-hook transcription factor
  Uniprot ID: Q7Z591
  ENST ID: ENST00000312033
  CDS Start-End: 336-2831
ggctgggcgcttcctgccgaggcgaggcggcctcaaccacggcaggggcggggagaggtggggagcgatgctggtctgtgagcagcagcttgggctggcagaacggcctggaggtgggccagggcgcaatggagacagggggctccctgggtttggaacaaagaattcacaggcaggtcccctgaaactgggtcggcaggacggtggtggagcccgagagagggcacaggcaggatggccgatgctgacaggaaccagcggtgactctggggcccctggcagcagctctgtctcctgaagatgaagtggcccaggtgaagcccaggccagccccaatggccagctcggagactgagatccgctgggctgagcctggcctggggaagggcccccagcggcggcgctgggcctgggccgaggacaagagggatgtggatagaagtagttcacaaagctgggaagaagagagactctttcccaatgccaccagccccgagctcctagaggacttccgcctggcccagcagcacctgccgcccctggagtgggacccacacccgcagcccgatgggcatcaggattccgagtcaggagagacttcgggagaagaggctgaagcagaggatgtggacagcccagcaagttcccatgagcctcttgcctggctcccccagcagggccgtcagctggacatgactgaagaggagccagatgggaccctcggaagtctggaggttgaggaggctggagagagctcctcaaggttggggtatgaggctggtctcagcttggaaggccatggaaacaccagccccatggctcttgggcatggtcaggccaggggctgggtggcttctggcgaacaagccagtggggacaaactttctgaacattccgaggtcaacccatccgttgaactcagcccggcaaggtcctggagcagtgggacagtgagcctcgaccaccctagtgacagccttgattctacctgggaaggagagaccgatggcccccagcccactgccctggcagaaaccttgccagagggccccagccaccacctcctaagcccagatggcagaactggaggcagtgttgctcgggcaacccccatggaattccaggactcctcagctcccccagcccagagtccgcagcatgccacagatagatggaggagagaaacgaccagattcttctgccctcagcccaaggaacacatctggaagcagacaaagacgtcacctaagccactcccttcccgattcattggctccatcagccccctgaatccccagcccaggccaacgcggcagggcaggccgctgcccagacagggagccactctggctggccgctcctcttctaatgcccccaagtatggccgggggcagttgaactacccactccctgatttctccaaggtagggccccgggtgagattccccaaagatgagagctaccgtccccccaagtccagaagccacaacaggaagcctcaggcccctgccaggcccctcatcttcaagtctccagctgagattgtgcaggaggtgctgttgagcagtggagaagcagccctggcaaaggacacgcctcctgcccaccctatcaccagggtaccccaagaatttcagacgcctgagcaagccactgagctggtccatcagctccaggaagactaccacaggctcctcaccaagtacgctgaggccgagaacaccattgaccagctacgcctcggggccaaggtgaacctgttctctgacccaccccagcccaaccacagcatccacacgggaatggtgccccaggggaccaaggtcttgtccttcaccatcccacagccccgctctgcagagtggtggccgggcccggccgaggacccccaggcctctgcggcctcagggtggccatcagctcgaggagacttgagcccctcctcgcttaccagcatgcccaccctggggtggcttccggagaaccgggacatctctgaggaccagtcctcagcagagcagacccaggcactggcttctcaggccagccagttcctggccaaggtggagtcctttgaaagactgatacaggcaggacgtctcatgccccaggaccaagtcaagggcttccagcggctgaaggctgcccacgcggccctagaggaggagtacctgaaggcttgtcgggagcaacaccctgcccagccgcttgccggctccaaggggacgcctggaagatttgatcctcgcagggagctggaggcagagatataccgtctgggaagctgcctggaagagctgaaggaacacatagaccagacccagcaagagcctgagccgcccgggtcagactcagctctggacagcaccccagccctgccctgcctccatcagccaacgcacctgcctgctccttctggacaagcccccatgccagccatcaagacctcctgccctgagcctgctaccaccactgccgccgccagcactggcccctgcccattgcacgtaaatgtggaggtgagctctggcaacagtgaggtggaggacaggccacaggaccccctggcccgactcaggcacaaggagctgcagatggagcaagtttaccatggcctcatggagcggtacctcagtgtgaagtctctcccagaagccatgagaatggaggaggaggaagaaggagaggaggaggaggaggaagaggggggaggtgactccctggaagttgatggggtggctgcaactccagggaaagcagaggccaccagggtcctcccaaggcagtgcccggtgcaggctgagaaaagtcatggggctcccctggagtaagtcactgagcctttcctgcagaatgtttgtttccaccctaaaaccacagggatgatcactgtcagagtgaataagacagcgcttcacagtttagacatggcttacctgtcctgcctcttcaagtgtggaatgtataccactgatagcccttgaaatgattttgggtagtgtgggacatgattttcagtaggacacatgcagtattaaagaacattattctcagctgggcacagtggctcatgcctgtaatcccagcattgagggaggccaaggcaggtggatcacttgagtccaggagttcaagactagcctgagcaaaacggcaaagccccatctcaacaagaaatacaaaaattagccaggcatggtggtacacgcctatagccctagctatttgggaggctgaagcaggtgaatctcttgagcccaggaggcggaggttgcagtgagctgagatcgggccactgcactccagcctgggtgatagtgtgagaccctgtctc

SEQ ID NO: 109410 - DNA, 5038 bp, Homo sapiens
  Payload ID: 1485
  Gene Symbol: AKNA
  Gene Name: AT-hook transcription factor
  Uniprot ID: Q7Z591
  ENST ID: ENST00000374075
  CDS Start-End: 73-4149
gtgatgaggaaatggaagccagagagttgaagtgacttagggtaagttacaaggtgggtgcagagctggtatatgctaagaagtgaatggcctgtctttccagaggctgaagcagaggatgtggacagcccagcaagttcccatgagcctcttgcctggctcccccagcagggccgtcagctggacatgactgaagaggagccagatgggaccctcggaagtctggaggttgaggaggctggagagagctcctcaaggttggggtatgaggctggtctcagcttggaaggccatggaaacaccagccccatggctcttgggcatggtcaggccaggggctgggtggcttctggcgaacaagccagtggggacaaactttctgaacattccgaggtcaacccatccgttgaactcagcccggcaaggtcctggagcagtgggacagtgagcctcgaccaccctagtgacagccttgattctacctgggaaggagagaccgatggcccccagcccactgccctggcagaaaccttgccagagggccccagccaccacctcctaagcccagatggcagaactggaggcagtgttgctcgggcaacccccatggaattccaggactcctcagctcccccagcccagagtccgcagcatgccacagatagatggaggagagaaacgaccagattcttctgccctcagcccaaggaacacatctggaagcagacaaagacgtcacctaagccactcccttcccgattcattggctccatcagccccctgaatccccagcccaggccaacgcggcagggcaggccgctgcccagacagggagccactctggctggccgctcctcttctaatgcccccaagtatggccgggggcagttgaactacccactccctgatttctccaaggtagggccccgggtgagattccccaaagatgagagctaccgtccccccaagtccagaagccacaacaggaagcctcaggcccctgccaggcccctcatcttcaagtctccagctgagattgtgcaggaggtgctgttgagcagtggagaagcagccctggcaaaggacacgcctcctgcccaccctatcaccagggtaccccaagaatttcagacgcctgagcaagccactgagctggtccatcagctccaggaagactaccacaggctcctcaccaagtacgctgaggccgagaacaccattgaccagctacgcctcggggccaaggtgaacctgttctctgacccaccccagcccaaccacagcatccacacgggaatggtgccccaggggaccaaggtcttgtccttcaccatcccacagccccgctctgcagagtggtggccgggcccggccgaggacccccaggcctctgcggcctcagggtggccatcagctcgaggagacttgagcccctcctcgcttaccagcatgcccaccctggggtggcttccggagaaccgggacatctctgaggaccagtcctcagcagagcagacccaggcactggcttctcaggccagccagttcctggccaaggtggagtcctttgaaagactgatacaggcaggacgtctcatgccccaggaccaagtcaagggcttccagcggctgaaggctgcccacgcggccctagaggaggagtacctgaaggcttgtcgggagcaacaccctgcccagccgcttgccggctccaaggggacgcctggaagatttgatcctcgcagggagctggaggcagagatataccgtctgggaagctgcctggaagagctgaaggaacacatagaccagacccagcaagagcctgagccgcccgggtcagactcagctctggacagcaccccagccctgccctgcctccatcagccaacgcacctgcctgctccttctggacaagcccccatgccagccatcaagacctcctgccctgagcctgctaccaccactgccgccgccagcactggcccctgcccattgcacgtaaatgtggaggtgagctctggcaacagtgaggtggaggacaggccacaggaccccctggcccgactcaggcacaaggagctgcagatggagcaagtttaccatggcctcatggagcggtacctcagtgtgaagtctctcccagaagccatgagaatggaggaggaggaagaaggagaggaggaggaggaggaagaggggggaggtgactccctggaagttgatggggtggctgcaactccagggaaagcagaggccaccagggtcctcccaaggcagtgcccggtgcaggctgagaaaagtcatggggctcccctggaggaggccacggagaagatggtatctatgaagccaccaggtttccaggcatccctggctagagacgggcacatgtcaggcctgggcaaggctgaggcagcccctccaggccctggcgtgccaccccaccctccaggcaccaagtccgcagcatcccaccaaagtagtatgaccagcctggagggaagcggcatctctgagcgccttccacagaagcctttgcaccgaggcggtgggccccacctggaggagacctggatggcgtccccagagacagacagtggctttgtgggctcagaaacaagcagagtttcacccctcacccagactccagagcaccggctctcccacatcagcacagcaggaacattagcccagccctttgctgcatctgtgcccagggatggagcttcctaccccaaggccaggggttctctgattcccagaagagccacagagcccagcacaccccggagccaagcacagaggtacctctccagcccaagtgggcctctccggcagagggcacccaacttcagcctggagcggacactggcagccgagatggcggttcctggctcagagtttgaggggcacaaacggatttctgaacagccccttcccaacaagacaatcagcccacccccagcccccgcccctgccgctgcgcctctaccctgtggaccaacagagaccatccccagcttcctgctcaccagggcagggcgagaccaggccatctgtgagctgcaagaagaggtgtcccggcttcgtctgcggctggaagacagcctgcaccagccactccagggcagcccgacacgcccagcatctgcctttgaccgccccgcccggacccgcggccggccagcagactccccagccacctggggctcccattatggcagtaaatccacagagagattgcctggtgagcctagaggtgaagagcagattgtccctccaggaaggcagcgagccaggtcttcctcagtgcctcgggaggtgctccgactgtccctgagttcagaatctgagctgccctccctaccactgttctctgagaagagcaagaccaccaaggacagtccacaggcagctcgggatggaaagagaggggtgggcagtgctggatggccagacagggtcaccttccggggccaatacacaggccacgaataccatgttctgtcccctaaggcggtcccaaaaggcaatggcacagtctcctgtccccactgccggcccattaggacccaggatgcgggtggtgctgtcacaggggacccactgggaccgcctcccgctgatacccttcagtgtcccctgtgtggtcaagttgggtctcccccagaggcagatggtccaggctcagccacctctggggcagagaaggccaccacgaggagaaaagcatcttcaactcccagccccaagcagaggagcaagcaggcggggtcgtcgccacgcccaccccccggactgtggtatctggcaacagcgcccccagcaccagcccctccagcctttgcctacatctcctcggttcccatcatgccttatccacctgccgctgtgtactatgcgcctgcaggacctacctcagcccaaccagctgccaagtggccgcccacagcctctcccccaccagcccggagacaccggcactccatccagctcgacctgggcgacctagaggagctcaacaaggccctgagccgggccgtgcaggctgccgagagcgtccgctctaccaccaggcagatgagaagctcgctgtcagccgacctgcgccaggctcacagcctgcggggctcctgcctcttctgacttcactgggggcccagaggcagatgggtgggtgggtgggcaggtggcctgccaggccaggagtgggctggagctgctgaggcccagaaggcccgcatagttcctcaccaggagggtctccctccagcacaggtcccgcctgctcagtccctgtgctttccaagtggagggggtgtcagctcggtcaccaagagaagtgacttcccaggagcaccagtcccctcacagaggtgctgtgagcgaggcctccttcggtccaggcagaacctcaggcagtctctcctggtcctgcatgtgtgcaactccagctaataataggtattttatatacagatggacagatatttttttaaactggggagttttcctgatcttgggtcctctttagggggccagacaagaaaggcctacggtttctggagcaaacctgtcccccacctgtgaccagtcactctggggcaagcatcactgggaagggcatagccggagacctttctcctagtgactggtagtcagtggggcattttaggatgtcagggccccagggtgacatgtgtccagcttttctatggcagcagaggcctttccctcagacaagctacaaagtgcccaggatgccatccaccatggtccccttcagtacctcacgcatggtccccagcttctcctaggatcccagtggcgtttatcagtggccagctacctgccaggcccgggctggggcacggtctgcggccatgaggccaggccgcctcccgcacccctaccccgtggcagcagcatacctctgcatttctggaatgtgtgtgcatcaatgatgtttgtatatttgaggcatttaaaaatctattttcgttacgagggcaaatgaagaatgaatattgatctt

SEQ ID NO: 109411 - DNA, 2138 bp, Homo sapiens
  Payload ID: 1485
  Gene Symbol: AKNA
  Gene Name: AT-hook transcription factor
  Uniprot ID: Q7Z591
  ENST ID: ENST00000374079
  CDS Start-End: 58-1212
ctggggcacagccaggaagaggcctccactccttctgacacagtcatctgagcgctcatgtctgctggaggcggcaccaggggatactcacccaggagtccaggggccaccagccaggccatctgtgagctgcaagaagaggtgtcccggcttcgtctgcggctggaagacagcctgcaccagccactccagggcagcccgacacgcccagcatctgcctttgaccgccccgcccggacccgcggccggccagcagactccccagccacctggggctcccattatggcagtaaatccacagagagattgcctggtgagcctagaggtgaagagcagattgtccctccaggaaggcagcgagccaggtcttcctcagtgcctcgggaggtgctccgactgtccctgagttcagaatctgagctgccctccctaccactgttctctgagaagagcaagaccaccaaggacagtccacaggcagctcgggatggaaagagaggggtgggcagtgctggatggccagacagggtcaccttccggggccaatacacaggccacgaataccatgttctgtcccctaaggcggtcccaaaaggcaatggcacagtctcctgtccccactgccggcccattaggacccaggatgcgggtggtgctgtcacaggggacccactgggaccgcctcccgctgatacccttcagtgtcccctgtgtggtcaagttgggtctcccccagaggcagatggtccaggctcagccacctctggggcagagaaggccaccacgaggagaaaagcatcttcaactcccagccccaagcagaggagcaagcaggcggggtcgtcgccacgcccaccccccggactgtggtatctggcaacagcgcccccagcaccagcccctccagcctttgcctacatctcctcggttcccatcatgccttatccacctgccgctgtgtactatgcgcctgcaggacctacctcagcccaaccagctgccaagtggccgcccacagcctctcccccaccagcccggagacaccggcactccatccagctcgacctgggcgacctagaggagctcaacaaggccctgagccgggccgtgcaggctgccgagagcgtccgctctaccaccaggcagatgagaagctcgctgtcagccgacctgcgccaggctcacagcctgcggggctcctgcctcttctgacttcactgggggcccagaggcagatgggtgggtgggtgggcaggtggcctgccaggccaggagtgggctggagctgctgaggcccagaaggcccgcatagttcctcaccaggagggtctccctccagcacaggtcccgcctgctcagtccctgtgctttccaagtggagggggtgtcagctcggtcaccaagagaagtgacttcccaggagcaccagtcccctcacagaggtgctgtgagcgaggcctccttcggtccaggcagaacctcaggcagtctctcctggtcctgcatgtgtgcaactccagctaataataggtattttatatacagatggacagatatttttttaaactggggagttttcctgatcttgggtcctctttagggggccagacaagaaaggcctacggtttctggagcaaacctgtcccccacctgtgaccagtcactctggggcaagcatcactgggaagggcatagccggagacctttctcctagtgactggtagtcagtggggcattttaggatgtcagggccccagggtgacatgtgtccagcttttctatggcagcagaggcctttccctcagacaagctacaaagtgcccaggatgccatccaccatggtccccttcagtacctcacgcatggtccccagcttctcctaggatcccagtggcgtttatcagtggccagctacctgccaggcccgggctggggcacggtctgcggccatgaggccaggccgcctcccgcacccctaccccgtggcagcagcatacctctgcatttctggaatgtgtgtgcatcaatgatgtttgtatatttgaggcatttaaaaatctattttcgttacgagggcaaatgaagaatgaatattgatcttaaaaaaagaaaagaagacaaaaaaaatacccaaagcc

SEQ ID NO: 109412 - DNA, 5464 bp, Homo sapiens
  Payload ID: 1485
  Gene Symbol: AKNA
  Gene Name: AT-hook transcription factor
  Uniprot ID: Q7Z591
  ENST ID: ENST00000374088
  CDS Start-End: 218-4537
ccagggcgcaatggagacagggggctccctgggtttggaacaaagaattcacaggcaggtcccctgaaactgggtcggcaggacggtggtggagcccgagagagggcacaggcaggatggccgatgctgacaggaaccagcggtgactctggggcccctggcagcagctctgtctcctgaagatgaagtggcccaggtgaagcccaggccagccccaatggccagctcggagactgagatccgctgggctgagcctggcctggggaagggcccccagcggcggcgctgggcctgggccgaggacaagagggatgtggatagaagtagttcacaaagctgggaagaagagagactctttcccaatgccaccagccccgagctcctagaggacttccgcctggcccagcagcacctgccgcccctggagtgggacccacacccgcagcccgatgggcatcaggattccgagtcaggagagacttcgggagaagaggctgaagcagaggatgtggacagcccagcaagttcccatgagcctcttgcctggctcccccagcagggccgtcagctggacatgactgaagaggagccagatgggaccctcggaagtctggaggttgaggaggctggagagagctcctcaaggttggggtatgaggctggtctcagcttggaaggccatggaaacaccagccccatggctcttgggcatggtcaggccaggggctgggtggcttctggcgaacaagccagtggggacaaactttctgaacattccgaggtcaacccatccgttgaactcagcccggcaaggtcctggagcagtgggacagtgagcctcgaccaccctagtgacagccttgattctacctgggaaggagagaccgatggcccccagcccactgccctggcagaaaccttgccagagggccccagccaccacctcctaagcccagatggcagaactggaggcagtgttgctcgggcaacccccatggaattccaggactcctcagctcccccagcccagagtccgcagcatgccacagatagatggaggagagaaacgaccagattcttctgccctcagcccaaggaacacatctggaagcagacaaagacgtcacctaagccactcccttcccgattcattggctccatcagccccctgaatccccagcccaggccaacgcggcagggcaggccgctgcccagacagggagccactctggctggccgctcctcttctaatgcccccaagtatggccgggggcagttgaactacccactccctgatttctccaaggtagggccccgggtgagattccccaaagatgagagctaccgtccccccaagtccagaagccacaacaggaagcctcaggcccctgccaggcccctcatcttcaagtctccagctgagattgtgcaggaggtgctgttgagcagtggagaagcagccctggcaaaggacacgcctcctgcccaccctatcaccagggtaccccaagaatttcagacgcctgagcaagccactgagctggtccatcagctccaggaagactaccacaggctcctcaccaagtacgctgaggccgagaacaccattgaccagctacgcctcggggccaaggtgaacctgttctctgacccaccccagcccaaccacagcatccacacgggaatggtgccccaggggaccaaggtcttgtccttcaccatcccacagccccgctctgcagagtggtggccgggcccggccgaggacccccaggcctctgcggcctcagggtggccatcagctcgaggagacttgagcccctcctcgcttaccagcatgcccaccctggggtggcttccggagaaccgggacatctctgaggaccagtcctcagcagagcagacccaggcactggcttctcaggccagccagttcctggccaaggtggagtcctttgaaagactgatacaggcaggacgtctcatgccccaggaccaagtcaagggcttccagcggctgaaggctgcccacgcggccctagaggaggagtacctgaaggcttgtcgggagcaacaccctgcccagccgcttgccggctccaaggggacgcctggaagatttgatcctcgcagggagctggaggcagagatataccgtctgggaagctgcctggaagagctgaaggaacacatagaccagacccagcaagagcctgagccgcccgggtcagactcagctctggacagcaccccagccctgccctgcctccatcagccaacgcacctgcctgctccttctggacaagcccccatgccagccatcaagacctcctgccctgagcctgctaccaccactgccgccgccagcactggcccctgcccattgcacgtaaatgtggaggtgagctctggcaacagtgaggtggaggacaggccacaggaccccctggcccgactcaggcacaaggagctgcagatggagcaagtttaccatggcctcatggagcggtacctcagtgtgaagtctctcccagaagccatgagaatggaggaggaggaagaaggagaggaggaggaggaggaagaggggggaggtgactccctggaagttgatggggtggctgcaactccagggaaagcagaggccaccagggtcctcccaaggcagtgcccggtgcaggctgagaaaagtcatggggctcccctggaggaggccacggagaagatggtatctatgaagccaccaggtttccaggcatccctggctagagacgggcacatgtcaggcctgggcaaggctgaggcagcccctccaggccctggcgtgccaccccaccctccaggcaccaagtccgcagcatcccaccaaagtagtatgaccagcctggagggaagcggcatctctgagcgccttccacagaagcctttgcaccgaggcggtgggccccacctggaggagacctggatggcgtccccagagacagacagtggctttgtgggctcagaaacaagcagagtttcacccctcacccagactccagagcaccggctctcccacatcagcacagcaggaacattagcccagccctttgctgcatctgtgcccagggatggagcttcctaccccaaggccaggggttctctgattcccagaagagccacagagcccagcacaccccggagccaagcacagaggtacctctccagcccaagtgggcctctccggcagagggcacccaacttcagcctggagcggacactggcagccgagatggcggttcctggctcagagtttgaggggcacaaacggatttctgaacagccccttcccaacaagacaatcagcccacccccagcccccgcccctgccgctgcgcctctaccctgtggaccaacagagaccatccccagcttcctgctcaccagggcagggcgagaccaggccatctgtgagctgcaagaagaggtgtcccggcttcgtctgcggctggaagacagcctgcaccagccactccagggcagcccgacacgcccagcatctgcctttgaccgccccgcccggacccgcggccggccagcagactccccagccacctggggctcccattatggcagtaaatccacagagagattgcctggtgagcctagaggtgaagagcagattgtccctccaggaaggcagcgagccaggtcttcctcagtgcctcgggaggtgctccgactgtccctgagttcagaatctgagctgccctccctaccactgttctctgagaagagcaagaccaccaaggacagtccacaggcagctcgggatggaaagagaggggtgggcagtgctggatggccagacagggtcaccttccggggccaatacacaggccacgaataccatgttctgtcccctaaggcggtcccaaaaggcaatggcacagtctcctgtccccactgccggcccattaggacccaggatgcgggtggtgctgtcacaggggacccactgggaccgcctcccgctgatacccttcagtgtcccctgtgtggtcaagttgggtctcccccagaggcagatggtccaggctcagccacctctggggcagagaaggccaccacgaggagaaaagcatcttcaactcccagccccaagcagaggagcaagcaggcggggtcgtcgccacgcccaccccccggactgtggtatctggcaacagcgcccccagcaccagcccctccagcctttgcctacatctcctcggttcccatcatgccttatccacctgccgctgtgtactatgcgcctgcaggacctacctcagcccaaccagctgccaagtggccgcccacagcctctcccccaccagcccggagacaccggcactccatccagctcgacctgggcgacctagaggagctcaacaaggccctgagccgggccgtgcaggctgccgagagcgtccgctctaccaccaggcagatgagaagctcgctgtcagccgacctgcgccaggctcacagcctgcggggctcctgcctcttctgacttcactgggggcccagaggcagatgggtgggtgggtgggcaggtggcctgccaggccaggagtgggctggagctgctgaggcccagaaggcccgcatagttcctcaccaggagggtctccctccagcacaggtcccgcctgctcagtccctgtgctttccaagtggagggggtgtcagctcggtcaccaagagaagtgacttcccaggagcaccagtcccctcacagaggtgctgtgagcgaggcctccttcggtccaggcagaacctcaggcagtctctcctggtcctgcatgtgtgcaactccagctaataataggtattttatatacagatggacagatatttttttaaactggggagttttcctgatcttgggtcctctttagggggccagacaagaaaggcctacggtttctggagcaaacctgtcccccacctgtgaccagtcactctggggcaagcatcactgggaagggcatagccggagacctttctcctagtgactggtagtcagtggggcattttaggatgtcagggccccagggtgacatgtgtccagcttttctatggcagcagaggcctttccctcagacaagctacaaagtgcccaggatgccatccaccatggtccccttcagtacctcacgcatggtccccagcttctcctaggatcccagtggcgtttatcagtggccagctacctgccaggcccgggctggggcacggtctgcggccatgaggccaggccgcctcccgcacccctaccccgtggcagcagcatacctctgcatttctggaatgtgtgtgcatcaatgatgtttgtatatttgaggcatttaaaaatctattttcgttacgagggcaaatgaagaatgaatattgatcttaaaaaaagaaaagaagacaaaaaaaatacccaaagcca

SEQ ID NO: 109413 - DNA, 2647 bp, Homo sapiens
  Payload ID: 1486
  Gene Symbol: ATL1
  Gene Name: atlastin GTPase 1
  Uniprot ID: Q8WXF7
  ENST ID: ENST00000358385
  CDS Start-End: 242-1918
agggagggtgtgacgctggtatctgtgtgaactcgggcttgtgatgctgagcttggttcatctgctttctcctcccttttcctccccactccttcccaccagcgccacagcaacatcctcagagtctgagcgaactgcgcccagcgcgggcacggagcctcccaccgccagcaacctgcggccccggagaaggcagcgagcgcagtgacagcgcctcaccgccaccagctcctggaccaccatggccaagaaccgcagggacagaaacagttggggtggattttcggaaaagacatatgaatggagctcagaagaggaggagccagtgaaaaaggcaggaccagtccaagtcctcattgtcaaagatgaccattcctttgagttagatgaaactgcattaaatcggatccttctctcggaggctgtcagagacaaggaggttgttgctgtatctgttgctggagcatttagaaaaggaaaatcattcctgatggacttcatgttgagatacatgtacaaccaggaatcagttgattgggttggagactacaatgaaccattgactggtttttcatggagaggtggatctgagcgagagaccacaggaattcagatatggagtgaaatcttccttatcaataaacctgatggtaaaaaggttgcagtgttattgatggatactcagggaacctttgatagtcagtcaactttgagagattcagccacagtatttgcccttagcacaatgatcagctcaatacaggtatataacttatcccaaaatgtccaggaggatgatcttcagcacctccagcttttcactgagtatggcagactggcaatggaggaaacattcctgaagccatttcagagtctgatatttcttgttcgagactggagtttcccatacgaattttcatatggagccgatggtggtgccaaattcttggaaaaacgcctcaaggtctcagggaaccagcatgaagaactacagaacgtcagaaaacacatccattcctgtttcaccaacatttcctgttttctgctacctcatcctggcttaaaagtagctaccaatccaaactttgatggaaaattgaaagaaatagatgatgaattcatcaaaaacttgaaaatactgattccttggctacttagtcccgagagcctagatattaaagagatcaatgggaataaaatcacctgccggggtctggtggagtacttcaaggcttatataaagatctatcaaggtgaagaattaccacatcccaaatccatgttacaggccacagcagaagctaacaatttagcagccgtggcaactgccaaggacacatacaacaaaaaaatggaagagatttgtggtggtgacaaaccatttctggccccaaatgacttgcagaccaaacacctgcaacttaaggaagaatctgtgaagctattccgaggggtgaagaagatgggtggggaagaatttagccggcgttacctgcagcagttggagagtgaaatagatgaactttacatccaatatatcaagcacaatgatagcaaaaatatcttccatgcagctcgtaccccagccacactgtttgtagtcatctttatcacatatgtgattgctggtgtgactggattcattggtttggacatcatagctagcctatgcaatatgataatgggactgacccttatcaccctgtgcacttgggcatatatccggtactctggagaataccgagagctgggagctgtaatagaccaggtggctgcagctctgtgggaccagggaagtacaaatgaggctttgtacaagctttacagtgcagcagcaacccacagacatctgtatcatcaagctttccctacaccaaagtcggaatctactgaacaatcagaaaagaaaaaaatgtaatgcaaattttaagaaatacaggtgcatgaccaattgtcaattaaatattcagttttatgtctccatgcaaacattcaaagtgcttccatcagaacggagtaaaatactaaacacctctgaagactgcaaactggattagttcttttacttcagtgtttaataagcagatgtatgtatgcatggttatactattttgttaacatgtacaatttcctgatttttcttcaaaaatgctgttataaagtatttgtctatttatgataacagtacacgtgttctgcttgaatttactaaattctactactgggttataattaaatcatgtgatattccacgtttggatatgctcatttaatttctacagaaaaaattttaaattatttcacattagccatttgttaaaacacagcatcataactcagcaggctggatttaatctgtatcatcttatatatatcacaatcttatttttaagcacattttagagttccttagttgctttatcaaaaaccagatattgcttttacatggtttaatagaatataaacctcttgataaaaaatgcacaaaaaatcactttgtatatgtgagtttcactgcattgtatattttttcatttggtacacaaagaatgtattcttcataggtttattcttttaatatgtgaactattattaaagtttactctggttcctaagattaaaaacaaatgcttactgaatttgaaaa

SEQ ID NO: 109414 - DNA, 2853 bp, Homo sapiens
  Payload ID: 1486
  Gene Symbol: ATL1
  Gene Name: atlastin GTPase 1
  Uniprot ID: Q8WXF7
  ENST ID: ENST00000441560
  CDS Start-End: 482-2143
agtcccggcacaccctactgcaccttcctgttttgcaaaccgatcccggtggtaccagtttgaggctgcactgcacacctgcacaacctgccttctacttagttcttctgagacatttctgaaagtctgaattcctaggactgctcaatgacctttgtccctgttgggcacacgcagtgtctcatcgctggtattgcacctttaatgagaccaggagttccgcaaaagtaaaacaaaggggtcacagactggttctggttctaccacttcctcagtatgtgctctgggacaaaacagcatatttggcaacatctcggtgtccttatctgcagcttgaagaggcgccacagcaacatcctcagagtctgagcgaactgcgcccagcgcgggcacggagcctcccaccgccagcaacctgcggccccggagaaggcagcgagcgcagtgacagcgcctcaccgccaccagctcctggaccaccatggccaagaaccgcagggacagaaacagttggggtggattttcggaaaagacatatgaatggagctcagaagaggaggagccagtgaaaaaggcaggaccagtccaagtcctcattgtcaaagatgaccattcctttgagttagatgaaactgcattaaatcggatccttctctcggaggctgtcagagacaaggaggttgttgctgtatctgttgctggagcatttagaaaaggaaaatcattcctgatggacttcatgttgagatacatgtacaaccaggaatcagttgattgggttggagactacaatgaaccattgactggtttttcatggagaggtggatctgagcgagagaccacaggaattcagatatggagtgaaatcttccttatcaataaacctgatggtaaaaaggttgcagtgttattgatggatactcagggaacctttgatagtcagtcaactttgagagattcagccacagtatttgcccttagcacaatgatcagctcaatacaggtatataacttatcccaaaatgtccaggaggatgatcttcagcacctccagcttttcactgagtatggcagactggcaatggaggaaacattcctgaagccatttcagagtctgatatttcttgttcgagactggagtttcccatacgaattttcatatggagccgatggtggtgccaaattcttggaaaaacgcctcaaggtctcagggaaccagcatgaagaactacagaacgtcagaaaacacatccattcctgtttcaccaacatttcctgttttctgctacctcatcctggcttaaaagtagctaccaatccaaactttgatggaaaattgaaagaaatagatgatgaattcatcaaaaacttgaaaatactgattccttggctacttagtcccgagagcctagatattaaagagatcaatgggaataaaatcacctgccggggtctggtggagtacttcaaggcttatataaagatctatcaaggtgaagaattaccacatcccaaatccatgttacaggccacagcagaagctaacaatttagcagccgtggcaactgccaaggacacatacaacaaaaaaatggaagagatttgtggtggtgacaaaccatttctggccccaaatgacttgcagaccaaacacctgcaacttaaggaagaatctgtgaagctattccgaggggtgaagaagatgggtggggaagaatttagccggcgttacctgcagcagttggagagtgaaatagatgaactttacatccaatatatcaagcacaatgatagcaaaaatatcttccatgcagctcgtaccccagccacactgtttgtagtcatctttatcacatatgtgattgctggtgtgactggattcattggtttggacatcatagctagcctatgcaatatgataatgggactgacccttatcaccctgtgcacttgggcatatatccggtactctggagaataccgagagctgggagctgtaatagaccaggtggctgcagctctgtgggaccaggctttgtacaagctttacagtgcagcagcaacccacagacatctgtatcatcaagctttccctacaccaaagtcggaatctactgaacaatcagaaaagaaaaaaatgtaatgcaaattttaagaaatacaggtgcatgaccaattgtcaattaaatattcagttttatgtctccatgcaaacattcaaagtgcttccatcagaacggagtaaaatactaaacacctctgaagactgcaaactggattagttcttttacttcagtgtttaataagcagatgtatgtatgcatggttatactattttgttaacatgtacaatttcctgatttttcttcaaaaatgctgttataaagtatttgtctatttatgataacagtacacgtgttctgcttgaatttactaaattctactactgggttataattaaatcatgtgatattccacgtttggatatgctcatttaatttctacagaaaaaattttaaattatttcacattagccatttgttaaaacacagcatcataactcagcaggctggatttaatctgtatcatcttatatatatcacaatcttatttttaagcacattttagagttccttagttgctttatcaaaaaccagatattgcttttacatggtttaatagaatataaacctcttgataaaaaatgcacaaaaaatcactttgtatatgtgagtttcactgcattgtatattttttcatttggtacacaaagaatgtattcttcataggtttattcttttaatatgtgaactattattaaagtttactctggttcctaagattaaaaacaaa

SEQ ID NO: 109415 - DNA, 383 bp, Homo sapiens
  Payload ID: 1486
  Gene Symbol: ATL1
  Gene Name: atlastin GTPase 1
  ENST ID: ENST00000555266
  CDS Start-End: 1-159
gggaaccagcatgaagaactacagaacgtcagaaaacacatccattcctgtttcaccaacatttcctgttttctgctacctcatcctggcttaaaagtagctaccaatccaaactttgatggaaaattgaaaggcttatataaagatctatcaaggtgaagaattaccacatcccaaatccatgttacaggccacagcagaagctaacaatttagcagccgtggcaactgccaaggacacatacaacaaaaaaatggaagagatttgtggtggtgacaaaccatttctggccccaaatgacttgcagaccaaacacctgcaacttaaggaagaatctgtgaagctattccgaggggtgaagaagatgggtggggaagaattta

SEQ ID NO: 109416 - DNA, 527 bp, Homo sapiens
  Payload ID: 1486
  Gene Symbol: ATL1
  Gene Name: atlastin GTPase 1
  ENST ID: ENST00000553509
  CDS Start-End: 439-527
atctttgcaaatctagtgggaaattttacccagtggatattgagttacagatcgtaatgaatctacagctttcatttatcttgatcttcttgatataaattttgctattctaattttaagacaaactactcagtatacatatacaaaaatgcatgataccctctttactaacatgaccttgcttttaaaatggaaaaaaaaatgggtgcctcgtagataaatgcacattattttagctactttggctatataaatgttgccagcttgtttgtactaatgtataaccgtgcttgaaacagcgccacagcaacatcctcagagtctgagcgaactgcgcccagcgcgggcacggagcctcccaccgccagcaacctgcggccccggagaaggcagcgagcgcagtgacagcgcctcaccgccaccagctcctggaccaccatggccaagaaccgcagggacagaaacagttggggtggattttcggaaaagacatatgaatggagctcagaagaggaggagccagtgaa

SEQ ID NO: 109417 - DNA, 570 bp, Homo sapiens
  Payload ID: 1486
  Gene Symbol: ATL1
  Gene Name: atlastin GTPase 1
  ENST ID: ENST00000557735
  CDS Start-End: 430-570
agaaacagttggggtgagtagcaaatgagaacttctgcagcctgcacggggtcttctggccctccactttctgcttctgtggagacagggagggccaagggctgctaggtgcctgcgtccacggctgggagacgggccgtagccgagccgctccctgtttgggcggaggaaccatggccgagcggtacccgcgtcaccgaatcgcgctgtcggggtggattttcggaaaagacatatgaatggagctcagaagaggaggagccagtgaaaaaggcaggaccagtccaagtcctcattgtcaaagatgaccattcctttgagttagatgaaactgcattaaatcggatccttctctcggaggctgtcagagacaaggaggttgttgctgtatctgttgctggagcatttagaaaaggaaaatcattcctgatggacttcatgttgagatacatgtacaaccaggaatcagttgattgggttggagactacaatgaaccattgactggtttttcatggagaggtggatctgagcgagagaccacaggaattcagatatggagtgaaatcttc

SEQ ID NO: 109418 - DNA, 550 bp, Homo sapiens
  Payload ID: 1486
  Gene Symbol: ATL1
  Gene Name: atlastin GTPase 1
  ENST ID: ENST00000556067
  CDS Start-End: 1-318
cagcagttggagagtgaaatagatgaactttacatccaatatatcaagcacaatgatagcaaaaatatcttccatgcagctcgtaccccagccacactgtttgtagtcatctttatcacatatgtgattgctggtgtgactggattcattggtttggacatcatagctagcctatgcaatatgataatgggactgacccttatcaccctgtgcacttgggcatatatccggtactctggagaataccgagagctgggagctgtaatagaccaggtggctgcagctctgtgggaccagggaagtacaaatgagatctgaagatggtaccatacagacgtaatgccataagaaaatcaaggccaggcgcggtggctcacgcctgtaatcccagcactttgggagactgaggtgggcggatcacgttaggtcaggagttcgagaccagcctggctaacatggctttgtacaagctttacagtgcagcagcaacccacagacatctgtatcatcaagctttccctacaccaaagtcggaatctactgaacaatc

SEQ ID NO: 109419 - DNA, 545 bp, Homo sapiens
  Payload ID: 1486
  Gene Symbol: ATL1
  Gene Name: atlastin GTPase 1
  ENST ID: ENST00000554886
  CDS Start-End: 320-545
acagcaacatcctcagagtctgagcgaactgcgcccagcgcgggcacggagcctcccaccgccagcaacctgcggccccggagaaggcagcgagcgcagtgacagcgcctcaccgccaccagctcctggaccaccatggccaagaaccgcagggacagaaacagttggggaatcagttgattgggttggagactacaatgaaccattgactggtttttcatggagaggtggatctgagcgagagaccacaggaattcagatatggagtgaaatcttccttatcaataaacctgatggtaaaaaggttgcagtgttattgatggatactcagggaacctttgatagtcagtcaactttgagagattcagccacagtatttgcccttagcacaatgatcagctcaatacaggtatataacttatcccaaaatgtccaggaggatgatcttcagcacctccagcttttcactgagtatggcagactggcaatggaggaaacattcctgaagccatttcagagtctgatatttcttgttcgagactgga

SEQ ID NO: 109420 - DNA, 620 bp, Homo sapiens
  Payload ID: 1486
  Gene Symbol: ATL1
  Gene Name: atlastin GTPase 1
  ENST ID: ENST00000555960
  CDS Start-End: 322-620
agaagactacaagtatagatttgggaatcatcagcatggaggtcctgtctgaagccatcatagtaaattacattgagagagtgtagcgtgaggagttgcttaccatgaggaattagcagagatcatggatctggtaattaagaggctggcagtgatctcctaagaaccgatcagtacagagtcgccacagcaacatcctcagagtctgagcgaactgcgcccagcgcgggcacggagcctcccaccgccagcaacctgcggccccggagaaggcagcgagcgcagtgacagcgcctcaccgccaccagctcctggaccaccatggccaagaaccgcagggacagaaacagttggggtggattttcggaaaagacatatgaatggagctcagaagaggaggagccagtgaaaaaggcaggaccagtccaagtcctcattgtcaaagatgaccattcctttgagttagatgaaactgcattaaatcggatccttctctcggaggctgtcagagacaaggaggttgttgctgtatctgttgctggagcatttagaaaaggaaaatcattcctgatggacttcatgttgagatacatgtacaaccaggaatcagttgattgggt

SEQ ID NO: 109421 - DNA, 2868 bp, Homo sapiens
  Payload ID: 1487
  Gene Symbol: ATL2
  Gene Name: atlastin GTPase 2
  Uniprot ID: Q8NHH9
  ENST ID: ENST00000378954
  CDS Start-End: 3-1754
agatggcggagggggacgaggcagcgcgagggcagcaaccgcaccaggggctgtggcgccggcgacggaccagcgacccaagcgccgcggttaaccacgtctcgtccacgacctccctaggtgagaattatgaagatgatgacctagtaaattctgatgaggttatgaagaaaccatgtccagtacagattgttcttgctcatgaagatgaccataactttgaacttgatgaagaagctttggagcagatattgctacaggagcacatacgagatcttaacatagtagtggtatctgtggcaggagcttttcgtaaagggaagtcatttctactggacttcatgcttagatacatgtataacaaggattctcaaagttggattggtggaaacaatgaaccattgacaggctttacatggcgaggtggctgtgaaagagaaacaacaggcatacaagtttggaatgaagtatttgtgattgacagacctaatggaactaaagttgctgtgctgcttatggatacccagggtgcctttgatagccagtcaactatcaaagactgtgcaacggtgtttgctctgagcactatgactagctctgtccaggtatataatctgtctcagaatattcaagaagatgatcttcaacatttgcaattatttacagagtatggaagacttgcgatggaagaaatctaccagaaaccatttcagacattaatgtttttgattcgagattggagctatccttatgaacattcatatggtttggaaggtggaaagcaatttcttgaaaagagattacaggtaaaacaaaatcaacatgaagagcttcagaatgtaaggaagcacatacacaattgtttctcaaatcttggttgcttccttttgccacatcctggtcttaaagttgcaactaatcctagttttgatgggagattgaaagatattgatgaagactttaaacgagagcttcgaaatctggttccattgctgcttgcccctgaaaatttggtagaaaaagagataagtggatctaaagtcacttgtagagatcttgtagaatattttaaggcttacatcaaaatctatcaaggagaagaacttccacatccaaagtccatgcttcaggcaacagctgaagctaataatcttgctgcagtagcaggagcaagagatacctattgtaaaagtatggaacaggtatgtggaggggacaagccttacattgcaccttcagatctggagcgaaaacacttggatctcaaggaagtggcgataaaacaatttcgttcagtaaaaaagatgggtggagatgagttctgccgtcgttatcaggaccagcttgaagctgaaattgaagaaacctatgcaaattttataaagcacaatgatggcaaaaatatcttctatgctgctcgtaccccagccacactgtttgcggtcatgtttgctatgtatataatctcaggactgactggcttcattggcctaaactctatagctgtcttgtgtaaccttgtcatggggttagcactgatatttctttgtacttgggcatatgttaaatactctggggagttcagagaaattggaacagtgattgatcagattgctgaaacactatgggaacaggtattgaagcccctgggtgataatttgatggaggaaaacataaggcagtctgtaacaaactctatcaaagcaggcctgactgaccaggtgtctcatcatgccagattaaagacagactgacagttcatctcctcacggactccactctctttttttttcatgcttgctgtacaatgagaactcaaataaaaataaaccaaagtttacaatcaactgtagaagtagtttagtgtaactggcttcacagatggctgccacagagtgtgaagattgtttgttagttttaagcattcttttaatggctcctaagacatgcagatggactgaggagcattggttaatcatgcacctttgtgccatgtttaactcttttatttctttttacttaatctaatgttagtgaatttgtcttatgtaaaaggatatttcagggaaatattttcagaaatctatttagagtctctttaacacagtgtcccattgaaattttaatttttagagaatttatgaatcactgtttcaagaaccagattggaaagacaatgaagcctttattgagccactacattaaaagtatatattgctttactgccttcaataccagtattacatcaatgcatgtatcagaaacttcacagaaattacatggcaactcttgtagctaagaaagtaattctgaggtgtacatttgtcttgcctttttaaatttataaacttgccctaaaaggagatgcatatctgggaaactgaactgtctttttgcagtttagccttcatgtatataaaatatgccattaattttattggggaagaaattccatccaaaaatgttgcctacagctatgagttaagagtgtctgtacagtgtgtagcttttattttctaaaatcacagatagggcatgtatatgacttataaatatataaatacgattttgtattaaaagttttgtagtttatggcaaaatctggtcctgtggtaggctaaataagtactgtccctgtgaaaggaatgtttgtggctcatgtcagtgtgtgaatgcatagacaatttgaagtttttgatatatttgtgatatttatcttgagcactgcaatctcaccccccccccgcccaccaagggaattcaatgggaatgtttattgtgactttgtcctctgttgcattttaaagttatttcctgtaatttattttcagtacataattaaaaatttgttgtatatataaaatgaaa

SEQ ID NO: 109422 - DNA, 1905 bp, Homo sapiens
  Payload ID: 1487
  Gene Symbol: ATL2
  Gene Name: atlastin GTPase 2
  ENST ID: ENST00000405384
  CDS Start-End: 14-163
aaatcggtacaagatggcggagggggacgaggcagcgcgagggcagcaaccgcaccaggggctgtggcgccggcgacggaccagcgacccaagcgccgcggttaaccacgtctcgtccacgacctccctaggattctcaaagttggattggtggaaacaatgaaccattgacaggctttacatggcgaggtggctgtgaaagagaaacaacaggcatacaagtttggaatgaagtatttgtgattgacagacctaatggaactaaagttgctgtgctgcttatggatacccagggtgcctttgatagccagtcaactatcaaagactgtgcaacggtgtttgctctgagcactatgactagctctgtccaggtatataatctgtctcagaatattcaagaagatgatcttcaacatttgcaattatttacagagtatggaagacttgcgatggaagaaatctaccagaaaccatttcagacattaatgtttttgattcgagattggagctatccttatgaacattcatatggtttggaaggtggaaagcaatttcttgaaaagagattacaggtaaaacaaaatcaacatgaagagcttcagaatgtaaggaagcacatacacaattgtttctcaaatcttggttgcttccttttgccacatcctggtcttaaagttgcaactaatcctagttttgatgggagattgaaagatattgatgaagactttaaacgagagcttcgaaatctggttccattgctgcttgcccctgaaaatttggtagaaaaagagataagtggatctaaagtcacttgtagagatcttgtagaatattttaaggcttacatcaaaatctatcaaggagaagaacttccacatccaaagtccatgcttcaggcaacagctgaagctaataatcttgctgcagtagcaggagcaagagatacctattgtaaaagtatggaacaggtatgtggaggggacaagccttacattgcaccttcagatctggagcgaaaacacttggatctcaaggaagtggcgataaaacaatttcgttcagtaaaaaagatgggtggagatgagttctgccgtcgttatcaggaccagcttgaagctgaaattgaagaaacctatgcaaattttataaagcacaatgatggcaaaaatatcttctatgctgctcgtaccccagccacactgtttgcggtcatgtttgctatgtatataatctcaggactgactggcttcattggcctaaactctatagctgtcttgtgtaaccttgtcatggggttagcactgatatttctttgtacttgggcatatgttaaatactctggggagttcagagaaattggaacagtgattgatcagattgctgaaacactatgggaacaggtattgaagcccctgggtgataatttgatggaggaaaacataaggcagtctgtaacaaactctatcaaagcaggcctgactgaccaggtgtctcatcatgccagattaaagacagactgacagttcatctcctcacggactccactctctttttttttcatgcttgctgtacaatgagaactcaaataaaaataaaccaaagtttacaatcaactgtagaagtagtttagtgtaactggcttcacagatggctgccacagagtgtgaagattgtttgttagttttaagcattcttttaatggctcctaagacatgcagatggactgaggagcattggttaatcatgcacctttgtgccatgtttaactcttttatttctttttacttaatctaatgttagtgaatttgtcttatgtaaaaggatatttcagggaaatattttcagaaatctatttagagtctctttaacacagtgtcccattgaaattttaatttttagagaatt

SEQ ID NO: 109423 - DNA, 1883 bp, Homo sapiens
  Payload ID: 1487
  Gene Symbol: ATL2
  Gene Name: atlastin GTPase 2
  Uniprot ID: Q8NHH9
  ENST ID: ENST00000402054
  CDS Start-End: 260-1498
actgtggtgcgaattgatcgcatgaaatcctgattgaaaattttgatggtacttaagaaaggcataaagttttttcaaaggcttataaatagtaaaagcctacgatttggattctcaaagttggattggtggaaacaatgaaccattgacaggctttacatggcgaggtggctgtgaaagagaaacaacaggcatacaagtttggaatgaagtatttgtgattgacagacctaatggaactaaagttgctgtgctgcttatggatacccagggtgcctttgatagccagtcaactatcaaagactgtgcaacggtgtttgctctgagcactatgactagctctgtccaggtatataatctgtctcagaatattcaagaagatgatcttcaacatttgcaattatttacagagtatggaagacttgcgatggaagaaatctaccagaaaccatttcagacattaatgtttttgattcgagattggagctatccttatgaacattcatatggtttggaaggtggaaagcaatttcttgaaaagagattacaggtaaaacaaaatcaacatgaagagcttcagaatgtaaggaagcacatacacaattgtttctcaaatcttggttgcttccttttgccacatcctggtcttaaagttgcaactaatcctagttttgatgggagattgaaagatattgatgaagactttaaacgagagcttcgaaatctggttccattgctgcttgcccctgaaaatttggtagaaaaagagataagtggatctaaagtcacttgtagagatcttgtagaatattttaaggcttacatcaaaatctatcaaggagaagaacttccacatccaaagtccatgcttcaggcaacagctgaagctaataatcttgctgcagtagcaggagcaagagatacctattgtaaaagtatggaacaggtatgtggaggggacaagccttacattgcaccttcagatctggagcgaaaacacttggatctcaaggaagtggcgataaaacaatttcgttcagtaaaaaagatgggtggagatgagttctgccgtcgttatcaggaccagcttgaagctgaaattgaagaaacctatgcaaattttataaagcacaatgatggcaaaaatatcttctatgctgctcgtaccccagccacactgtttgcggtcatgtttgctatgtatataatctcaggactgactggcttcattggcctaaactctatagctgtcttgtgtaaccttgtcatggggttagcactgatatttctttgtacttgggcatatgttaaatactctggggagttcagagaaattggaacagtgattgatcagattgctgaaacactatgggaacaggtattgaagcccctgggtgataatttgatggaggaaaacataaggcagtctgtaacaaactctatcaaagcaggcctgactgaccaggtgtctcatcatgccagattaaagacagactgacagttcatctcctcacggactccactctctttttttttcatgcttgctgtacaatgagaactcaaataaaaataaaccaaagtttacaatcaactgtagaagtagtttagtgtaactggcttcacagatggctgccacagagtgtgaagattgtttgttagttttaagcattcttttaatggctcctaagacatgcagatggactgaggagcattggttaatcatgcacctttgtgccatgtttaactcttttatttctttttacttaatctaatgttagtgaatttgtcttatgtaaaaggatatttcagggaaatattttcagaaatctatttagagtctctttaacacagtgtcccattgaaattttaatttttagagaatt

SEQ ID NO: 109424 - DNA, 2864 bp, Homo sapiens
  Payload ID: 1487
  Gene Symbol: ATL2
  Gene Name: atlastin GTPase 2
  ENST ID: ENST00000406122
  CDS Start-End: 294-1535
ggagttaattttaaatcggtacaagatggcggagggggacgaggcagcgcgagggcagcaaccgcaccaggggctgtggcgccggcgacggaccagcgacccaagcgccgcggttaaccacgtctcgtccacgacctccctaggattctcaaagttggattggtggaaacaatgaaccattgacaggctttacatggcgaggtggctgtgaaagagaaacaacaggcatacaagtttggaatgaagtatttgtgattgacagacctaatggaactaaagttgctgtgctgcttatggatacccagggtgcctttgatagccagtcaactatcaaagactgtgcaacggtgtttgctctgagcactatgactagctctgtccaggtatataatctgtctcagaatattcaagaagatgatcttcaacatttgcaattatttacagagtatggaagacttgcgatggaagaaatctaccagaaaccatttcagacattaatgtttttgattcgagattggagctatccttatgaacattcatatggtttggaaggtggaaagcaatttcttgaaaagagattacaggtaaaacaaaatcaacatgaagagcttcagaatgtaaggaagcacatacacaattgtttctcaaatcttggttgcttccttttgccacatcctggtcttaaagttgcaactaatcctagttttgatgggagattgaaagatattgatgaagactttaaacgagagcttcgaaatctggttccattgctgcttgcccctgaaaatttggtagaaaaagagataagtggatctaaagtcacttgtagagatcttgtagaatattttaaggcttacatcaaaatctatcaaggagaagaacttccacatccaaagtccatgcttcaggcaacagctgaagctaataatcttgctgcagtagcaggagcaagagatacctattgtaaaagtatggaacaggtatgtggaggggacaagccttacattgcaccttcagatctggagcgaaaacacttggatctcaaggaagtggcgataaaacaatttcgttcagtaaaaaagatgggtggagatgagttctgccgtcgttatcaggaccagcttgaagctgaaattgaagaaacctatgcaaattttataaagcacaatgatggcaaaaatatcttctatgctgctcgtaccccagccacactgtttgcggtcatgtttgctatgtatataatctcaggactgactggcttcattggcctaaactctatagctgtcttgtgtaaccttgtcatggggttagcactgatatttctttgtacttgggcatatgttaaatactctggggagttcagagaaattggaacagtgattgatcagattgctgaaacactatgggaacagaggagtcccaggaaggtgttttccaaactgtttgaagttactagacgtcgaatggttcaccgtgctctttcatcagcacagcgacagagactgtcatccaacaataacaagaagaaaaattagacagtatttttaacctttttctctatctgaagtgttcacacttacacatgtaggacaataagcaggaccgtctgggccggtctgcataaatgctgtatacataccagatttgatgctgcatatagggtatggaattgcacatccatctcataggaattgtaaatggtttgaataagaggaaagtaatttttgttgcattataaaatgtctagtagcatcataagtttttttgagagaagcatctttttatttcccatattcctggttattttcatcattgctttgaattgaatttttatatctatttttatatgtaactctttttttacctcatgtttttgtttgttttgcacatttctcataccacaggtattgaagcccctgggtgataatttgatggaggaaaacataaggcagtctgtaacaaactctatcaaagcaggcctgactgaccaggtgtctcatcatgccagattaaagacagactgacagttcatctcctcacggactccactctctttttttttcatgcttgctgtacaatgagaactcaaataaaaataaaccaaagtttacaatcaactgtagaagtagtttagtgtaactggcttcacagatggctgccacagagtgtgaagattgtttgttagttttaagcattcttttaatggctcctaagacatgcagatggactgaggagcattggttaatcatgcacctttgtgccatgtttaactcttttatttctttttacttaatctaatgttagtgaatttgtcttatgtaaaaggatatttcagggaaatattttcagaaatctatttagagtctctttaacacagtgtcccattgaaattttaatttttagagaatttatgaatcactgtttcaagaaccagattggaaagacaatgaagcctttattgagccactacattaaaagtatatattgctttactgccttcaataccagtattacatcaatgcatgtatcagaaacttcacagaaattacatggcaactcttgtagctaagaaagtaattctgaggtgtacatttgtcttgcctttttaaatttataaacttgccctaaaaggagatgcatatctgggaaactgaactgtctttttgcagtttagccttcatgtatataaaatatgccattaattttattggggaagaaattccatccaaaaatgttgcctacagctatgagttaagagtgtctgtacagtgtgtagcttttattttctaaaatcacagatagggcatgtatatgacttataaatatataaatacgattttgtattaaaagttttgtagtttatg

SEQ ID NO: 109425 - DNA, 2199 bp, Homo sapiens
  Payload ID: 1487
  Gene Symbol: ATL2
  Gene Name: atlastin GTPase 2
  Uniprot ID: Q8NHH9
  ENST ID: ENST00000452935
  CDS Start-End: 416-2113
cttcctggagggaaccgcagtccgcaggccagggctctgtccccgggctcgcgtttcggggctcctcggctcccgaacccattcgcgcgggttgtgcgtggctagggtgcaagtctagattttcgtgtcaaactggggttatgagccgtttacgagtcacttggacgatagtaaggcctgatcactctgaaagtgtctgtagtgtgaagtcacctgatccttggctccctggttttgctgaatgtgagctcctactgtacgtgtaccaggagcgcccctgccccctcgaagacgcagttgcgttggcagcgcagtgtatccctctcactcataacacccctatttataggagtttagcgtttgatctctcactgtggtgcgaattgatcgcatgaaatcctgattgaaaattttgatggtacttaagaaaggcataaagttttttcaaaggcttataaatagtaaaagcctacgatttggtgagaattatgaagatgatgacctagtaaattctgatgaggttatgaagaaaccatgtccagtacagattgttcttgctcatgaagatgaccataactttgaacttgatgaagaagctttggagcagatattgctacaggagcacatacgagatcttaacatagtagtggtatctgtggcaggagcttttcgtaaagggaagtcatttctactggacttcatgcttagatacatgtataacaaggattctcaaagttggattggtggaaacaatgaaccattgacaggctttacatggcgaggtggctgtgaaagagaaacaacaggcatacaagtttggaatgaagtatttgtgattgacagacctaatggaactaaagttgctgtgctgcttatggatacccagggtgcctttgatagccagtcaactatcaaagactgtgcaacggtgtttgctctgagcactatgactagctctgtccaggtatataatctgtctcagaatattcaagaagatgatcttcaacatttgcaattatttacagagtatggaagacttgcgatggaagaaatctaccagaaaccatttcagacattaatgtttttgattcgagattggagctatccttatgaacattcatatggtttggaaggtggaaagcaatttcttgaaaagagattacaggtaaaacaaaatcaacatgaagagcttcagaatgtaaggaagcacatacacaattgtttctcaaatcttggttgcttccttttgccacatcctggtcttaaagttgcaactaatcctagttttgatgggagattgaaagatattgatgaagactttaaacgagagcttcgaaatctggttccattgctgcttgcccctgaaaatttggtagaaaaagagataagtggatctaaagtcacttgtagagatcttgtagaatattttaaggcttacatcaaaatctatcaaggagaagaacttccacatccaaagtccatgcttcaggcaacagctgaagctaataatcttgctgcagtagcaggagcaagagatacctattgtaaaagtatggaacaggtatgtggaggggacaagccttacattgcaccttcagatctggagcgaaaacacttggatctcaaggaagtggcgataaaacaatttcgttcagtaaaaaagatgggtggagatgagttctgccgtcgttatcaggaccagcttgaagctgaaattgaagaaacctatgcaaattttataaagcacaatgatggcaaaaatatcttctatgctgctcgtaccccagccacactgtttgcggtcatgtttgctatgtatataatctcaggactgactggcttcattggcctaaactctatagctgtcttgtgtaaccttgtcatggggttagcactgatatttctttgtacttgggcatatgttaaatactctggggagttcagagaaattggaacagtgattgatcagattgctgaaacactatgggaacaggtattgaagcccctgggtgataatttgatggaggaaaacataaggcagtctgtaacaaactctatcaaagcaggcctgactgaccaggtgtctcatcatgccagattaaagacagactgacagttcatctcctcacggactccactctctttttttttcatgcttgctgtacaatgagaactcaaataaaaataaaccaaagttta

SEQ ID NO: 109426 - DNA, 576 bp, Homo sapiens
  Payload ID: 1487
  Gene Symbol: ATL2
  Gene Name: atlastin GTPase 2
  ENST ID: ENST00000451483
  CDS Start-End: 20-576
aattttaaatcggtacaagatggcggagggggacgaggcagcgcgagggcagcaaccgcaccaggggctgtggcgccggcgacggaccagcgacccaagcgccgcggttaaccacgtctcgtccacgacctccctagagtcttgctctgtcgccaggttggagtgcagtggcacgatcttcgcttactgcaacctcccgggttcaagtgattcctctgcctcagcctcccaagtagctgggattacaggtgagaattatgaagatgatgacctagtaaattctgatgaggttatgaagaaaccatgtccagtacagattgttcttgctcatgaagatgaccataactttgaacttgatgaagaagctttggagcagatattgctacaggagcacatacgagatcttaacatagtagtggtatctgtggcaggagcttttcgtaaagggaagtcatttctactggacttcatgcttagatacatgtataacaaggattctcaaagttggattggtggaaacaatgaaccattgacaggctttacatggcgaggtggctgtgaaagagaaacaacagg

SEQ ID NO: 109427 - DNA, 593 bp, Homo sapiens
  Payload ID: 1487
  Gene Symbol: ATL2
  Gene Name: atlastin GTPase 2
  ENST ID: ENST00000416222
  CDS Start-End: 14-295
aaatcggtacaagatggcggagggggacgaggcagcgcgagggcagcaaccgcaccaggggctgtggcgccggcgacggaccagcgacccaagcgccgcggttaaccacgtctcgtccacgacctccctagacggagtctcgctctgtcgcccaggctggggtgcagtggcacggtctcggctcactgcaagctccgcctcttgggtccacgccattctccggcctcagcctcctgagtatctgggactacaggcgcctgccaccgtgtccggcttactttttttgtatttttaatagagacggggtttccctgtggtctcgatctcctgacctcgtgatccgcccgccttggcctcccaaagtgctgggattacaggtgagaattatgaagatgatgacctagtaaattctgatgaggttatgaagaaaccatgtccagtacagattgttcttgctcatgaagatgaccataactttgaacttgatgaagaagctttggagcagatattgctacaggagcacatacgagatcttaacatagtagtggtatctgtggcaggagcttttcgtaaagggaagtcatttctactgg

SEQ ID NO: 109428 - DNA, 526 bp, Homo sapiens
  Payload ID: 1487
  Gene Symbol: ATL2
  Gene Name: atlastin GTPase 2
  ENST ID: ENST00000449130
  CDS Start-End: 2-526
gatggcggagggggacgaggcagcgcgagggcagcaaccgcaccaggggctgtggcgccggcgacggaccagcgacccaagcgccgcggttaaccacgtctcgtccacgacctccctagagtatggaagacttgcgatggaagaaatctaccagaaaccatttcagacattaatgtttttgattcgagattggagctatccttatgaacattcatatggtttggaaggtggaaagcaatttcttgaaaagagattacaggtaaaacaaaatcaacatgaagagcttcagaatgtaaggaagcacatacacaattgtttctcaaatcttggttgcttccttttgccacatcctggtcttaaagttgcaactaatcctagttttgatgggagattgaaagatattgatgaagactttaaacgagagcttcgaaatctggttccattgctgcttgcccctgaaaatttggtagaaaaagagataagtggatctaaagtcacttgtagagatcttgtagaatattttaag

SEQ ID NO: 109429 - DNA, 775 bp, Homo sapiens
  Payload ID: 1487
  Gene Symbol: ATL2
  Gene Name: atlastin GTPase 2
  ENST ID: ENST00000443098
  CDS Start-End: 1-775
cggagggggacgaggcagcgcgagggcagcaaccgcaccaggggctgtggcgccggcgacggaccagcgacccaagcgccgcggttaaccacgtctcgtccacgacctccctaggtgagaattatgaagatgatgacctagtaaattctgatgaggttatgaagaaaccatgtccagtacagattgttcttgctcatgaagatgaccataactttgaacttgatgaagaagctttggagcagatattgctacaggagcacatacgagatcttaacatagtagtggtatctgtggcaggagcttttcgtaaagggaagtcatttctactggacttcatgcttagatacatgtataacaaggtatataatctgtctcagaatattcaagaagatgatcttcaacatttgcaattatttacagagtatggaagacttgcgatggaagaaatctaccagaaaccatttcagacattaatgtttttgattcgagattggagctatccttatgaacattcatatggtttggaaggtggaaagcaatttcttgaaaagagattacaggtaaaacaaaatcaacatgaagagcttcagaatgtaaggaagcacatacacaattgtttctcaaatcttggttgcttccttttgccacatcctggtcttaaagttgcaactaatcctagttttgatgggagattgaaagatattgatgaagactttaaacgagagcttcgaaatctggttccattgctgcttgcccctgaaaatttggtagaaaa

SEQ ID NO: 109430 - DNA, 578 bp, Homo sapiens
  Payload ID: 1487
  Gene Symbol: ATL2
  Gene Name: atlastin GTPase 2
  ENST ID: ENST00000456736
  CDS Start-End: 3-263
agatggcggagggggacgaggcagcgcgagggcagcaaccgcaccaggggctgtggcgccggcgacggaccagcgacccaagcgccgcggttaaccacgtctcgtccacgacctccctagagtcttgctctgtcgccaggttggagtgcagtggcacgatcttcgcttactgcaacctcccgggttcaagtgattcctctgcctcagcctcccaagtagctgggattacaggattctcaaagttggattggtggaaacaatgaaccattgacaggctttacatggcgaggtggctgtgaaagagaaacaacaggcatacaagtttggaatgaagtatttgtgattgacagacctaatggaactaaagttgctgtgctgcttatggatacccagggtgcctttgatagccagtcaactatcaaagactgtgcaacggtgtttgctctgagcactatgactagctctgtccaggtatataatctgtctcagaatattcaagaagatgatcttcaacatttgcaattatttacagagtatggaagacttgcgatggaagaaatctaccagaaaccatttca

SEQ ID NO: 109431 - DNA, 2335 bp, Homo sapiens
  Payload ID: 1487
  Gene Symbol: ATL2
  Gene Name: atlastin GTPase 2
  Uniprot ID: Q8NHH9
  ENST ID: ENST00000419554
  CDS Start-End: 14-1753
aaatcggtacaagatggcggagggggacgaggcagcgcgagggcagcaaccgcaccaggggctgtggcgccggcgacggaccagcgacccaagcgccgcggttaaccacgtctcgtccacgacctccctaggtgagaattatgaagatgatgacctagtaaattctgatgaggttatgaagaaaccatgtccagtacagattgttcttgctcatgaagatgaccataactttgaacttgatgaagaagctttggagcagatattgctacaggagcacatacgagatcttaacatagtagtggtatctgtggcaggagcttttcgtaaagggaagtcatttctactggacttcatgcttagatacatgtataacaaggattctcaaagttggattggtggaaacaatgaaccattgacaggctttacatggcgaggtggctgtgaaagagaaacaacaggcatacaagtttggaatgaagtatttgtgattgacagacctaatggaactaaagttgctgtgctgcttatggatacccagggtgcctttgatagccagtcaactatcaaagactgtgcaacggtgtttgctctgagcactatgactagctctgtccaggtatataatctgtctcagaatattcaagaagatgatcttcaacatttgcaattatttacagagtatggaagacttgcgatggaagaaatctaccagaaaccatttcagacattaatgtttttgattcgagattggagctatccttatgaacattcatatggtttggaaggtggaaagcaatttcttgaaaagagattacaggtaaaacaaaatcaacatgaagagcttcagaatgtaaggaagcacatacacaattgtttctcaaatcttggttgcttccttttgccacatcctggtcttaaagttgcaactaatcctagttttgatgggagattgaaagatattgatgaagactttaaacgagagcttcgaaatctggttccattgctgcttgcccctgaaaatttggtagaaaaagagataagtggatctaaagtcacttgtagagatcttgtagaatattttaaggcttacatcaaaatctatcaaggagaagaacttccacatccaaagtccatgcttcaggcaacagctgaagctaataatcttgctgcagtagcaggagcaagagatacctattgtaaaagtatggaacaggtatgtggaggggacaagccttacattgcaccttcagatctggagcgaaaacacttggatctcaaggaagtggcgataaaacaatttcgttcagtaaaaaagatgggtggagatgagttctgccgtcgttatcaggaccagcttgaagctgaaattgaagaaacctatgcaaattttataaagcacaatgatggcaaaaatatcttctatgctgctcgtaccccagccacactgtttgcggtcatgtttgctatgtatataatctcaggactgactggcttcattggcctaaactctatagctgtcttgtgtaaccttgtcatggggttagcactgatatttctttgtacttgggcatatgttaaatactctggggagttcagagaaattggaacagtgattgatcagattgctgaaacactatgggaacaggtgttttccaaactgtttgaagttactagacgtcgaatggttcaccgtgctctttcatcagcacagcgacagagactgtcatccaacaataacaagaagaaaaattagacagtatttttaacctttttctctatctgaagtgttcacacttacacatgtaggacaataagcaggaccgtctgggccggtctgcataaatgctgtatacataccagatttgatgctgcatatagggtatggaattgcacatccatctcataggaattgtaaatggtttgaataagaggaaagtaatttttgttgcattataaaatgtctagtagcatcataagtttttttgagagaagcatctttttatttcccatattcctggttattttcatcattgctttgaattgaatttttatatctatttttatatgtaactctttttttacctcatgtttttgtttgttttgcacatttctcataccacaggtattgaagcccctgggtgataatttgatggaggaaaacataaggcagtctgtaacaaactctatcaaagcaggcctgactgaccaggtgtctcatcatgccagattaaagacagactgacagttcatctcctcacggactccactctctttttttttcatgcttgctgtacaatgagaactcaaataaaaataaaccaaagtttacaatcaa

SEQ ID NO: 109432 - DNA, 1242 bp, Homo sapiens
  Payload ID: 1487
  Gene Symbol: ATL2
  Gene Name: atlastin GTPase 2
  ENST ID: ENST00000629272
  CDS Start-End: 1-1242
atggatacccagggtgcctttgatagccagtcaactatcaaagactgtgcaacggtgtttgctctgagcactatgactagctctgtccaggtatataatctgtctcagaatattcaagaagatgatcttcaacatttgcaattatttacagagtatggaagacttgcgatggaagaaatctaccagaaaccatttcagacattaatgtttttgattcgagattggagctatccttatgaacattcatatggtttggaaggtggaaagcaatttcttgaaaagagattacaggtaaaacaaaatcaacatgaagagcttcagaatgtaaggaagcacatacacaattgtttctcaaatcttggttgcttccttttgccacatcctggtcttaaagttgcaactaatcctagttttgatgggagattgaaagatattgatgaagactttaaacgagagcttcgaaatctggttccattgctgcttgcccctgaaaatttggtagaaaaagagataagtggatctaaagtcacttgtagagatcttgtagaatattttaaggcttacatcaaaatctatcaaggagaagaacttccacatccaaagtccatgcttcaggcaacagctgaagctaataatcttgctgcagtagcaggagcaagagatacctattgtaaaagtatggaacaggtatgtggaggggacaagccttacattgcaccttcagatctggagcgaaaacacttggatctcaaggaagtggcgataaaacaatttcgttcagtaaaaaagatgggtggagatgagttctgccgtcgttatcaggaccagcttgaagctgaaattgaagaaacctatgcaaattttataaagcacaatgatggcaaaaatatcttctatgctgctcgtaccccagccacactgtttgcggtcatgtttgctatgtatataatctcaggactgactggcttcattggcctaaactctatagctgtcttgtgtaaccttgtcatggggttagcactgatatttctttgtacttgggcatatgttaaatactctggggagttcagagaaattggaacagtgattgatcagattgctgaaacactatgggaacagaggagtcccaggaaggtgttttccaaactgtttgaagttactagacgtcgaatggttcaccgtgctctttcatcagcacagcgacagagactgtcatccaacaataacaagaagaaaaattag

SEQ ID NO: 109433 - DNA, 7135 bp, Homo sapiens
  Payload ID: 1488
  Gene Symbol: ATL3
  Gene Name: atlastin GTPase 3
  Uniprot ID: Q6DD88
  ENST ID: ENST00000398868
  CDS Start-End: 278-1903
acacgcggcaggcggtggcgggattctgccgcgtgcgctttcccgccccgcctcgcctagcctcgtcctgcgctcgccacgcctcgggctgtccgttgggccacgcagaccgcgctgcgctcgctccgtcgcggctccgcgtgccccaccttctggctagttttttctagagcccaggctccgcccgtttcccgcttccagggcccggttcgttcccgcccgcacccgtccctctcctctgcacccctgctgcttctgctttgaaggcggaggctccatgttgtcccctcagcgagtggcagcagctgcctcaagaggagcagatgatgccatggagagcagcaagcctggtccagtgcaggttgttttggttcagaaagatcaacattcctttgagctagatgagaaagccttggccagcatcctcttgcaggaccacatccgagatcttgatgtggtggtggtttcagtggctggtgccttccgaaagggcaagtccttcattctggattttatgctacgatacttatattctcagaaggaaagtggccattcaaattggttgggtgacccagaagaaccgttaacaggattttcctggagagggggatctgatccagaaaccactgggattcaaatctggagtgaagttttcactgtggagaagccaggtgggaagaaggttgcagttgttctgatggatacccagggggcatttgacagccagtcaactgtgaaagactgtgctaccatctttgctctaagcactatgactagttctgttcagatttataatttatctcagaacattcaagaagatgatcttcaacagctgcagctcttcacagaatacggtcgtctggcaatggatgaaattttccaaaagcctttccagacactgatgtttttggttagagattggagtttcccttatgaatatagctatggactccaaggaggaatggcatttttggataagcgtttacaggtgaaggaacatcaacatgaagaaattcagaatgttcgaaatcacattcactcatgtttctccgatgtcacctgctttctcttaccacatccaggactccaggtggccacaagccctgactttgatgggaaattaaaagatattgctggtgaattcaaagagcagttacaggcactgataccgtatgtattaaacccatctaagttaatggaaaaggagatcaatggctcaaaggtcacctgtcggggactactggagtattttaaggcatatattaaaatttatcaaggagaagatctgcctcaccccaagtccatgcttcaggccactgctgaagccaacaacttagcagctgcagcctctgccaaggacatttattataacaacatggaagaggtttgtgggggagagaaaccttatttgtctccagacattctagaggagaagcactgtgaattcaaacaacttgctctggaccattttaagaagaccaagaagatgggtgggaaggatttcagctttcgttaccagcaggagctggaggaggaaatcaaggaattatatgagaacttctgcaagcacaatggtagcaagaacgtcttcagcaccttccgaacccctgcagtgctgttcacgggcattgtagctttgtacatagcctcaggcctcactggcttcataggtcttgaggttgtagcccagttgttcaactgtatggttggactactgttaatagcactcctcacctggggctacatcaggtattctggtcaatatcgtgagctgggcggagctattgattttggtgccgcatatgtgttggagcaggcttcttctcatatcggtaattccactcaggccactgtgagggatgcagttgttggaagaccatccatggataaaaaagctcaatagcatcttaacgtgaagatcaaacaagaacacaacaagcccctactgatttctgggtttctgccacggccacaggttcatatccagaggaatggcagatctgagacgatccaggaagagctaaaacatggccctgtaataaatgagcagacctctcctgtggtttcaaattattaaacacacttccatttctcttggaagcatttcttttccttgctgttatagatgcaagcctgtgtctattttcatattactctgctttgtgcactttatggaggaggaagctagaggaaaaatggaaatgcagcttttaagttctttatgtgccacttagtgccttttaagattgattccatggttttgcacacacgatggggaggggatggaggataacctcatgaaaggtgccgttttcgggtgaaacttgacatttcttttatactttactcttttgagaaggattctttttttttttttttttttttttgagttggagtctcgctctgtcaccaggcttgagtgcagtggtgtgatcttggctcactgcaacctctgcctgccgggttcaagcagttctcctgcctcagcctcccaagtagctgggactacaggtgtacgccaccatacccagctaatttttttgtatttttagtagagatggggtttcaccatgttggccaggatggtcttggtctcttgaccttgtgatccgcctgcccgccttggcctcccaaagtgctgggattacaggcgtgagccaccgtgcccggccaagaaggattccttttttaaaagtttacagaacttggagaaacttcagaactaaagactaactgaaaatgatgtcattacactcaaaaaaaatttacaatagggaatcctgttgccacatagtgtggaaaaatcatgtcatatttaaatataccatactctgaaatgtgaggtttttacccagtaggctgacagttttgttgcaacttgctctattttttttttttttttggtccctatagcttctttctagaaaaagaggcaaacgtgccttgaaaagccagagtggctcataataaaaggaatgcgctagatacttcaagaaaaaagctaagtttaaatgaaccatgtgacctctgataagtcacttgaacttgtgccttggtcaggttcactgtaggtttacatatgtatgtatgttttacacaactcttgtaattgtcatttgaggggttttgtttttgagagttctgcataagaacagaactttattaaggattagagggaagatacaaatattactgcgtttaattgatgtctaatttcatgtggcttagcagcaattaataacctgatttaaggtctttattcagaatgttaatttgcattctctgccgtgtctaatgttcttaataatgaagctaaaattaacccattttatttagtgaattatctatttaattttactttggctagtctggtagctttaagatagctttgccttagcaaggatcaaagtcctacccaaatataaaaaatatctagaagtatctaagagttctttttttctatttaccttgattaggagataaaagttttatctgttagttgcttttccttttggaattattgtggattttaaaacttaaaacttgcctgcaagtatttatataaacattcaggtatataagccttaatttctaagataatttaacttttgttatgggagggaggtaagagtgtaaattttatatacatgaaggtaagatctgagtgtaaactttacatacatgaagtatgaatggaaggtagaaaaaaagtcccttttcgcatgtaatctctttatcaaagaattttcttttgacactttaccactgaagtatttttgtaagtcctaaattcgcagcatattgtttcatatttatatgccatcttgcaaatagttcttgctattttattcactgctgttacactttagaaaaattccagcttgtttacttgcatttatcagtgatgccaaccaagctttgactgttaacttgaaagcttgcttctgaaatgttggtgcattttcaggtgacctcttatctctctgaaagttcatacctattagcaggctctgtaaatattgacatacttagcttttaatacattctataagtaaatttatagatttcagaataacttaaaaaatttaatggtaagaaggggtgatgtgtcgaaaactcatactaaagtattaggtcactttaaaaaaagtgataatgtatgatttaatgaaatcttaagattcagttactatttaaattcaccatttctgttttggtcttataaagagaccttggtttaattatccagaggaagtcctcttcaccattttttttttttcttagttctgcttctggaaagtgttttataaagttttctcagtgagggttcttaagagttttctttggcctcttttctctcaacagtaaattgatgattttatatcagctttttcaataaaagatgcattatcattactggctataaatcatcctggggagatttataaccaggttaaaaataatatcttttacttctctcaccttttacttgtggttcagatgctcagactgtgcctgtttgcgtcgtgtctgttgctctgccgctttccatgcaggcatttttaattttacacaatcctaacaatatatggaactcattcctatgaatatataaaaggaggcttccaaaattttctattaaaatatttcaggataaattaagtgttgataatttgaaaaaataatttcaatgagctgcttatagtaaaaatggtagaatcagagttttcattctttgagaaatctttctgtaagattggctcatagataaaatgagacaaactactatgtatgataaaacaccttcagagtcatgccttgttttattttattttattttttgagacagaggtctcgctctgtcgcccaggttggagtgcagtggtgcaatctcgctcactgcaacctccacctcccaggttcaagcgattctcctgtctcagcttcctgagtagctgggactacaggtgtacaccaccacgcctggctaatttttgtttttttactagaggtggggttttgccatgttggccaggctggtctcaaactcctgacctcaggtgatccactccccccagcctcccaaagtgctgggattacaggcatgagccaccccgcccagctgagtcatgccttattttcgtagtataccaagaaatgttctatggaagtttacgttttaacacctcttttatacttggtaaaattgcctgtgtttcgctttattcctttttttttttgagacggactcttgtactgtcacccaggctgaagtgcagtggcgcaatcttggctcactacaacctccgcctcctgggttcaagtgattcttttgcctcagcctcccaagtagcagggattacaggcatgtgccaccacacccggcttatttttgtatttttagtagagacagggcttcgccatgttgaccaggctggtctcaactcctctgggaatccgcctgtcttggccttccagggtgctgggattacaggcgtgagccactggaacctggccttgttttgctttattttttctcttacatgaagtaaagcgctttggtcaaacacacaaaaatactgccttgtactggtggttggtttcattagtggatcacacacagtgttctacttggcttgtaaaatggtgccttggatagggtgagtttggataagtatgtatgtatgtatgagttatagcaaaattaagtagattgaatcaagtccatgcaaaagcaataaaacagttttaattttttaattttttaaaaattaaaactttaataaaacagtttttaattttttgctaggttcttttaaaaaatgatgtaacttacatggaagtcttcacaggacttttttctttcctggaactattgaaatgtaatttaggatgatttgatcttccatctcaagttgtcaacatggctgtgtcattctggcttacatatgttttatttaacaaaattctagtcaagggataagggcataatgaagacaagcttcagttatgaaagtacaaactatttgtgtgattaatttttaaaaatgacattaagaagcccattgtaaaataatatttgcagtcaaatggtttttcttgctgtaagtcctgttgtagctatgtttagggtagtggttctcatctaccttggagtgcataagacttacctagcaggcttgtttaaaaagttcagattcctagctttgtacccagggattgcctcaggtggtatgggctgtggtcctggagtcatcacttttataaatagtggttcagagaccacagagagagactgcttcatcgaatgggaagtaccaaggagaaagtacaattcagtattgtctggaggcaagtggacactttgtacctgaggtttagaataggtggtctcttgccagtacaatccccaggcgttttctgtgttcagaagtagtaagaatgcctttaattcagaggattatctaagctctttaaagctgtttttctccattgtcatagtgccttctctgaaaaatgaatgtacaggtatcctattttctaatgtaattaggattttttaaaagcaatttttgatagtttttcttttaaaaagtaaaattcagcactgtgacttgaacccccaaatctttcacatacaggtgaaacattaagccacaaataaaaataatgaacaagaaagaagacaagatcctaattcctgtcattagtgacctaagtaccccatatcagaaactttgcaaaacagatctagggacagaagggctttgaaagacatttttctttggggcaaatttcgtgtgccagaactacagtttaaatgtttttatgagcaagggaaggtagcattgattcccatagctttctaattagatacatgctgtcatggatgtaagccttaaaggagttaatactaatcttgtacatacacaaattttcctcaggtttttttattttaaaaaatgatttgttaaaagtactgtctgctagacccttgcctttgagtggctttgaaacttaatatagtttttaaaaagtgcaatgggatgagattatgctattagtatattaaaagcatgtttctgttttactccaatttgtaagatcatttaatggaataaagatcacaacacca

SEQ ID NO: 109434 - DNA, 1920 bp, Homo sapiens
  Payload ID: 1488
  Gene Symbol: ATL3
  Gene Name: atlastin GTPase 3
  ENST ID: ENST00000538786
  CDS Start-End: 283-1854
aaacaccaaagctgtctctcacactggtggttccaggataaagcctcggcctggggcctggtctgcacgttaggcgccggccgcagctcgcaggaggacccgagccagcccgccccttcccgcacagcctgctgggagttgtagttcagtcgtcggagaaccacgccaagccccgccccagatgagtgcgcagtatgaggaccgctggccgggacccagtgagcgcgggactacaattcccaaaggacggtagcactcagcgccccgccaacagatgatgccatggagagcagcaagcctggtccagtgcaggttgttttggttcagaaagatcaacattcctttgagctagatgagaaagccttggccagcatcctcttgcaggaccacatccgagatcttgatgtggtggtggtttcagtggctggtgccttccgaaagggcaagtccttcattctggattttatgctacgatacttatattctcagaaggaaagtggccattcaaattggttgggtgacccagaagaaccgttaacaggattttcctggagagggggatctgatccagaaaccactgggattcaaatctggagtgaagttttcactgtggagaagccaggtgggaagaaggttgcagttgttctgatggatacccagggggcatttgacagccagtcaactgtgaaagactgtgctaccatctttgctctaagcactatgactagttctgttcagatttataatttatctcagaacattcaagaagatgatcttcaacagctgcagctcttcacagaatacggtcgtctggcaatggatgaaattttccaaaagcctttccagacactgatgtttttggttagagattggagtttcccttatgaatatagctatggactccaaggaggaatggcatttttggataagcgtttacaggtgaaggaacatcaacatgaagaaattcagaatgttcgaaatcacattcactcatgtttctccgatgtcacctgctttctcttaccacatccaggactccaggtggccacaagccctgactttgatgggaaattaaaagatattgctggtgaattcaaagagcagttacaggcactgataccgtatgtattaaacccatctaagttaatggaaaaggagatcaatggctcaaaggtcacctgtcggggactactggagtattttaaggcatatattaaaatttatcaaggagaagatctgcctcaccccaagtccatgcttcaggccactgctgaagccaacaacttagcagctgcagcctctgccaaggacatttattataacaacatggaagaggtttgtgggggagagaaaccttatttgtctccagacattctagaggagaagcactgtgaattcaaacaacttgctctggaccattttaagaagaccaagaagatgggtgggaaggatttcagctttcgttaccagcaggagctggaggaggaaatcaaggaattatatgagaacttctgcaagcacaatggtagcaagaacgtcttcagcaccttccgaacccctgcagtgctgttcacgggcattgtagctttgtacatagcctcaggcctcactggcttcataggtcttgaggttgtagcccagttgttcaactgtatggttggactactgttaatagcactcctcacctggggctacatcaggtattctggtcaatatcgtgagctgggcggagctattgattttggtgccgcatatgtgttggagcaggcttcttctcatatcggtaattccactcaggccactgtgagggatgcagttgttggaagaccatccatggataaaaaagctcaatagcatcttaacgtgaagatcaaacaagaacacaacaagcccctactgatttctgggtttctgccacgg

SEQ ID NO: 109435 - DNA, 714 bp, Homo sapiens
  Payload ID: 1488
  Gene Symbol: ATL3
  Gene Name: atlastin GTPase 3
  ENST ID: ENST00000540699
  CDS Start-End: 207-714
ccaggcctagttaaacaccaaagctgtctctcacactggtggttccaggataaagcctcggcctggggcctggtctgcacgttaggcgccggccgcagctcgcaggaggacccgagccagcccgccccttcccgcacagcctgctgggagttgtagttcagtcgtcggagaaccacgccaagccccgccccagatgagtgcgcagtatgaggaccgctggccgggacccagtgagcgcgggactacaattcccaaaggacggtagcactcagcgccccgccaacagggcccggttcgttcccgcccgcacccgtccctctcctctgcacccctgctgcttctgctttgaaggcggaggctccatgttgtcccctcagcgagtggcagcagctgcctcaagaggagcagatgatgccatggagagcagcaagcctggtccagtgcaggttgttttggttcagaaagatcaacattcctttgagctagatgagaaagccttggccagcatcctcttgcaggaccacatccgagatcttgatgtggtggtggtttcagtggctggtgccttccgaaagggcaagtccttcattctggattttatgctacgatacttatattctcagaaggaaagtggccattcaaattggttgggtgacccagaagaaccgttaacaggattttcctggagagggggatctgatccagaaaccactg

SEQ ID NO: 109436 - DNA, 4884 bp, Homo sapiens
  Payload ID: 1489
  Gene Symbol: ATMIN
  Gene Name: ATM interactor
  Uniprot ID: O43313
  ENST ID: ENST00000299575
  CDS Start-End: 25-2496
gggccgggcggccgtgcgggagccatggcggcctcggaggcggcggcggcggcggggtccgcggctctggcggcgggtgcccgggccgtcccggcggccacgacaggagccgccgccgccgcctcgggcccgtgggtgcccccgggaccccgactgaggggcagccggccgcggcccgcgggggcgacgcagcagcccgctgtccccgcgccgccggcgggggagctgatccagccgtcggtgagcgagctgtcccgggccgtgcggaccaacatcctgtgcaccgtgcgcggctgcggcaagatcctgcccaacagccccgcgctcaacatgcacctagtcaagagccaccgcctgcaggatggcatagtcaatccaacaataagaaaagatttgaaaactggaccgaaattctactgctgtccaattgaaggctgccccagaggccctgagagaccgttttctcagttttctctcgtaaaacagcactttatgaaaatgcatgctgagaagaagcacaaatgtagtaagtgcagcaattcgtacggtacagaatgggacctgaaaagacatgcagaggactgtggcaagaccttccggtgcacatgcggctgtccctacgccagtagaacagcactgcagtctcacatctaccgaactgggcacgagatacctgcagaacacagggacccacctagtaagaaaaggaaaatggaaaactgtgcacaaaaccagaagttatccaacaagaccattgaatcattgaacaaccaaccaatccctagaccagacactcaagaactagaagcttcagaaataaagctagaaccatcttttgaagactcttgtggctctaacactgacaagcagactcttacaacaccaccgagatatcctcagaagttgcttttaccaaagcccaaagtggctttggttaaactacccgtgatgcagttttctgtcatgcctgtctttgtgcctacagccgactcctcagcccagcctgtggtgttaggtgttgatcagggctctgccacaggggctgtgcacttaatgcccttgtcagtaggaaccctgatcctcggcctagattcagaggcttgctctcttaaggagagcctacctcttttcaaaattgctaatcctattgctggtgagccaataagtactggtgttcaagtgaactttggtaaaagtccatctaatcctttacaagaactagggaacacgtgtcaaaagaatagcatttcttcaatcaacgtgcagacagatctgtcttatgcctcacaaaactttataccttctgcacagtgggccactgctgattcctctgtgtcgtcttgttctcaaactgatttgtcgtttgattctcaagtgtctcttcccattagtgttcacactcagacatttttgcccagctctaaggtaacttcatctatagctgctcagactgatgcatttatggacacctgtttccagtcaggtggggtctccagagaaactcaaaccagtgggatagaaagtccaacggatgaccatgtacagatggaccaagctggaatgtgcggagacatttttgagagtgttcattcatcatataatgttgctacaggtaacattataagcaacagtttagtagcagagacagtaactcatagtttgttacctcagaatgagcctaagactttaaatcaagatattgagaaatctgcaccaattataaatttcagtgcacagaatagtatgcttccttcacagaacatgacagataatcagacccaaaccatagatttattaagtgatttggaaaacatcttgtcaagtaatctgcctgctcagacattggatcatcgtagtcttttgtctgacacaaatcctggacctgacacccagctcccatctggcccagcccagaaccccggaatcgattttgatatcgaagagttcttttcggcctcaaatatccagactcaaactgaagagagtgaacttagcaccatgaccaccgagccagtcttggagtcactggacatagagactcaaacggacttcttactcgcagatacctctgctcagtcctatgggtgtaggggaaattctaacttcttaggccttgagatgtttgacacacagacacagacagacttaaactttttcttagacagtagccctcatctgcctctgggaagtattctgaaacactccagcttttccgtgagtactgattcatctgacacagagacccaaactgaaggagtctccactgctaaaaatatacctgctctagaaagcaaagttcagttgaacagtacagaaacacagaccatgagttctgggtttgaaaccctggggagcttgttcttcaccagcaacgaaactcagacagcaatggatgactttcttctggctgatctggcctggaacacgatggagtctcagttcagctctgtagaaacccagacttctgcggaaccacacacagtctccaacttctaaaactaacggtggagtccatgtgtgaaatggcatctaccatttcctctggattaaaactacggactggggacaacagtattaattcgattgaatgtggctgatgatgcagttgcttagcttctttgtgtttctttgccttttgtacttgtaaacagaaatttgcgtataaatgtgagtgtattataaagtttgagatgttgatctaaattgtttttgtgttgcctacatttgccttttcacagctagtcttttcatgttaaaaaaaaaaatgtatttcatatctataaaacctatatagccatttagctgaagcccagcttaccaggttcaagggtacaaacttctcaaatcttcaaaacattttagtcaaagtgtaatatacttaaactgcacctaaaatatctttggcactgcttgttagaaattcctgattcctgttactaatcactaaagaaaccggatgctgccaccgtaggatttaagcagtagtgcttccatgctcttaagactcctgctgcctggaccttcgtcagctttgacacctcttttctgatttaaagacaccaaggaaaactacaactgtctttagctttgaagcagttttcatgtaatcattgccacctcttcgctacatgaactactattgataccagcatacaagtgtacagcactttacacacaagaggtttattgatgtaaaattatcggctagggaagcagcagcgggccaggtgtggtggcttacccctgtaatcccagcactttgggaggccaaagcaggacgatcacttgagcccaggagttcaacaccagcttgggcaacgtaagaagaccgtgtctctggaatttttttttttttttaattagccaggcacagtggcatgcgcctgtgatcccagctacttggaaggctgaggtgagaggatcactcgaggagattggggctgccatgagccatggtcttggcactgtactccaacctgggtaacagggcaagaccctatctcaaaaaaaaaaaaagtcgccagcaacaagcacgtagtgtagtgttcctgctaaatgagcgtaggttatccaaaccttgggaacagggagttatggaaacatgcctatgacttcatcttggggtgtgtcctatgaagatcctttctggtctccacagtaggccagagttgggggctctggagctgtttccccaagtgcatccacaagctggatctgagttttgtcactctaaaattaaacaagaaaaaaagtgggaaaagggcatcccccattaggtttcaatactttgcacttctactaagcttgatagggcaggagtgcaatctacaattattttaaagtgaatttccttccattcaccattctttatcttttctttgaataagaaaaagtatctagcaaggatattacttgtgccttgaggctagcaattataggatagattcatctaaaatatggtattctgcattttggttttttttcttaagtgaataataccagtcttcaaagaaaacaaggtgaagacctattgcttcaataatcaagaatgctttgtgtgttttgaggtaggagcatgatcaagtatgctttggggattttctgtatttaggagatcctggattcttaattgttggctaagttccagtcaagtaggaatcagtgcagcctgtaagttctccacattgacacacacacacacacacacacacacacacgacatgctcctttctgtggcacatgcctgtattactgaaagctaaatcctcaaaacctagtaaggggactaatgattcattaaagtaaattgatggttttgctactaattcctatcccatacatttgacacaaaagaagtgttggtaatggataaataacatatcccgggcagatgagctcaacctagtaggtaagagtttggtttggtcacagttgcctatgagtgtgggtttcaaaagaaacataaagccttaacttagaatttcattatgttttagaatcatcactgccttaatattcaagcatctatttaagtcctaataaaggagaaatgcatgtttatggcttttttgtaaatataaatgcagtgatctatggcttaaaaaatttgtttctgtgacaatgtttgtaaatctagccaatagagtcatttacagaagaaaaatgagcatgtaataatacaagaactgtttccccctcaaaacctgaacctgaattatttgtaaaaactgaaatttaatgattaaagagaagccagaattgtacccttttttgtgaattcttgaacgtactcataaatatgacttattgtattgccttaagttttcactcattgtcttttgaaagccatatgataaaatgattttatttaataatacccagtta

SEQ ID NO: 109437 - DNA, 5343 bp, Homo sapiens
  Payload ID: 1489
  Gene Symbol: ATMIN
  Gene Name: ATM interactor
  Uniprot ID: O43313
  ENST ID: ENST00000566488
  CDS Start-End: 964-2967
tttattgaacatttattctgttcaaaacattcccaaaggcaacagaagatacaaataaatctctgcccatgtaaaggtgtggggggcattagaaggcgttctcttcggtgtaatgaagtaatgagagaagaaaaagtagtttgaagctatggagtaagggactttgagtatcccaggctcaaaaagttgggacttgaacagtacgggggtgctgctgaaaacgtttgagggaggtaatgacatgatcgaagctatacttgagaaaggtgaatctgataaagtatgagtgaaaaagagactgaaggtctagaaattagattgaggctaatgacaaaatccacataaataggaggacttgaacgaaggggcacttagaagaggacaggagatagtaaaaggcattcaatgatgagagcacacactacaggggagcatgagggaggttggaaaagataatgaaaggattaccgagcttcactgacgatgtgtttgaaatgagcaggaatcttgtagtgatcctaatccgtggttttctggagcatttcacagcctaggaacatacaaggggggcatctccctggaatgtaaattgactaagaggaattcagtaatggtcaaatgaatgcagaattttagagtcttgcttagtattctcaccacatttcgtttaatctactcatactctttttctcttactgctgacactagatggaaaaactcttaattaaaagtatttcacaaaatgtgctcgttttcagtcattccgtttccactccagcctgttgtgttgtttttttgaaataataatttaaagtaattttccttttgcaggatggcatagtcaatccaacaataagaaaagatttgaaaactggaccgaaattctactgctgtccaattgaaggctgccccagaggccctgagagaccgttttctcagttttctctcgtaaaacagcactttatgaaaatgcatgctgagaagaagcacaaatgtagtaagtgcagcaattcgtacggtacagaatgggacctgaaaagacatgcagaggactgtggcaagaccttccggtgcacatgcggctgtccctacgccagtagaacagcactgcagtctcacatctaccgaactgggcacgagatacctgcagaacacagggacccacctagtaagaaaaggaaaatggaaaactgtgcacaaaaccagaagttatccaacaagaccattgaatcattgaacaaccaaccaatccctagaccagacactcaagaactagaagcttcagaaataaagctagaaccatcttttgaagactcttgtggctctaacactgacaagcagactcttacaacaccaccgagatatcctcagaagttgcttttaccaaagcccaaagtggctttggttaaactacccgtgatgcagttttctgtcatgcctgtctttgtgcctacagccgactcctcagcccagcctgtggtgttaggtgttgatcagggctctgccacaggggctgtgcacttaatgcccttgtcagtaggaaccctgatcctcggcctagattcagaggcttgctctcttaaggagagcctacctcttttcaaaattgctaatcctattgctggtgagccaataagtactggtgttcaagtgaactttggtaaaagtccatctaatcctttacaagaactagggaacacgtgtcaaaagaatagcatttcttcaatcaacgtgcagacagatctgtcttatgcctcacaaaactttataccttctgcacagtgggccactgctgattcctctgtgtcgtcttgttctcaaactgatttgtcgtttgattctcaagtgtctcttcccattagtgttcacactcagacatttttgcccagctctaaggtaacttcatctatagctgctcagactgatgcatttatggacacctgtttccagtcaggtggggtctccagagaaactcaaaccagtgggatagaaagtccaacggatgaccatgtacagatggaccaagctggaatgtgcggagacatttttgagagtgttcattcatcatataatgttgctacaggtaacattataagcaacagtttagtagcagagacagtaactcatagtttgttacctcagaatgagcctaagactttaaatcaagatattgagaaatctgcaccaattataaatttcagtgcacagaatagtatgcttccttcacagaacatgacagataatcagacccaaaccatagatttattaagtgatttggaaaacatcttgtcaagtaatctgcctgctcagacattggatcatcgtagtcttttgtctgacacaaatcctggacctgacacccagctcccatctggcccagcccagaaccccggaatcgattttgatatcgaagagttcttttcggcctcaaatatccagactcaaactgaagagagtgaacttagcaccatgaccaccgagccagtcttggagtcactggacatagagactcaaacggacttcttactcgcagatacctctgctcagtcctatgggtgtaggggaaattctaacttcttaggccttgagatgtttgacacacagacacagacagacttaaactttttcttagacagtagccctcatctgcctctgggaagtattctgaaacactccagcttttccgtgagtactgattcatctgacacagagacccaaactgaaggagtctccactgctaaaaatatacctgctctagaaagcaaagttcagttgaacagtacagaaacacagaccatgagttctgggtttgaaaccctggggagcttgttcttcaccagcaacgaaactcagacagcaatggatgactttcttctggctgatctggcctggaacacgatggagtctcagttcagctctgtagaaacccagacttctgcggaaccacacacagtctccaacttctaaaactaacggtggagtccatgtgtgaaatggcatctaccatttcctctggattaaaactacggactggggacaacagtattaattcgattgaatgtggctgatgatgcagttgcttagcttctttgtgtttctttgccttttgtacttgtaaacagaaatttgcgtataaatgtgagtgtattataaagtttgagatgttgatctaaattgtttttgtgttgcctacatttgccttttcacagctagtcttttcatgttaaaaaaaaaaatgtatttcatatctataaaacctatatagccatttagctgaagcccagcttaccaggttcaagggtacaaacttctcaaatcttcaaaacattttagtcaaagtgtaatatacttaaactgcacctaaaatatctttggcactgcttgttagaaattcctgattcctgttactaatcactaaagaaaccggatgctgccaccgtaggatttaagcagtagtgcttccatgctcttaagactcctgctgcctggaccttcgtcagctttgacacctcttttctgatttaaagacaccaaggaaaactacaactgtctttagctttgaagcagttttcatgtaatcattgccacctcttcgctacatgaactactattgataccagcatacaagtgtacagcactttacacacaagaggtttattgatgtaaaattatcggctagggaagcagcagcgggccaggtgtggtggcttacccctgtaatcccagcactttgggaggccaaagcaggacgatcacttgagcccaggagttcaacaccagcttgggcaacgtaagaagaccgtgtctctggaatttttttttttttttaattagccaggcacagtggcatgcgcctgtgatcccagctacttggaaggctgaggtgagaggatcactcgaggagattggggctgccatgagccatggtcttggcactgtactccaacctgggtaacagggcaagaccctatctcaaaaaaaaaaaaagtcgccagcaacaagcacgtagtgtagtgttcctgctaaatgagcgtaggttatccaaaccttgggaacagggagttatggaaacatgcctatgacttcatcttggggtgtgtcctatgaagatcctttctggtctccacagtaggccagagttgggggctctggagctgtttccccaagtgcatccacaagctggatctgagttttgtcactctaaaattaaacaagaaaaaaagtgggaaaagggcatcccccattaggtttcaatactttgcacttctactaagcttgatagggcaggagtgcaatctacaattattttaaagtgaatttccttccattcaccattctttatcttttctttgaataagaaaaagtatctagcaaggatattacttgtgccttgaggctagcaattataggatagattcatctaaaatatggtattctgcattttggttttttttcttaagtgaataataccagtcttcaaagaaaacaaggtgaagacctattgcttcaataatcaagaatgctttgtgtgttttgaggtaggagcatgatcaagtatgctttggggattttctgtatttaggagatcctggattcttaattgttggctaagttccagtcaagtaggaatcagtgcagcctgtaagttctccacattgacacacacacacacacacacacacacacacgacatgctcctttctgtggcacatgcctgtattactgaaagctaaatcctcaaaacctagtaaggggactaatgattcattaaagtaaattgatggttttgctactaattcctatcccatacatttgacacaaaagaagtgttggtaatggataaataacatatcccgggcagatgagctcaacctagtaggtaagagtttggtttggtcacagttgcctatgagtgtgggtttcaaaagaaacataaagccttaacttagaatttcattatgttttagaatcatcactgccttaatattcaagcatctatttaagtcctaataaaggagaaatgcatgtttatggcttttttgtaaatataaatgcagtgatctatggcttaaaaaatttgtttctgtgacaatgtttgtaaatctagccaatagagtcatttacagaagaaaaatgagcatgtaataatacaagaactgtttccccctcaaaacctgaacctgaattatttgtaaaaactgaaatttaatgattaaagagaagccagaattgtacccttttttgtgaattcttgaacgtactcataaatatgacttattgtattgccttaagttttcactcattgtcttttgaaagccatatgataaaatgattttatttaat

SEQ ID NO: 109438 - DNA, 4803 bp, Homo sapiens
  Payload ID: 1489
  Gene Symbol: ATMIN
  Gene Name: ATM interactor
  Uniprot ID: O43313
  ENST ID: ENST00000564241
  CDS Start-End: 422-2425
aggccagcagtgacataattcaaaagcgcaagtcattgaaagcagttctgcgaatatgtagcttttgatgatcaggagtaaatttagagtacccagaatattgcatgttctgtctgcccatagtcaggcttctgataagaatttcacagcagaaaactctgaggttgtagtctctagtaggacagatgtgtcgccaatgaagagtgatctgctcttaccaccatctaaaccgggatgcaacaacgttctcaattgaagatcagggagccagtcaggaaatgtacctgaggatggcatagtcaatccaacaataagaaaagatttgaaaactggaccgaaattctactgctgtccaattgaaggctgccccagaggccctgagagaccgttttctcagttttctctcgtaaaacagcactttatgaaaatgcatgctgagaagaagcacaaatgtagtaagtgcagcaattcgtacggtacagaatgggacctgaaaagacatgcagaggactgtggcaagaccttccggtgcacatgcggctgtccctacgccagtagaacagcactgcagtctcacatctaccgaactgggcacgagatacctgcagaacacagggacccacctagtaagaaaaggaaaatggaaaactgtgcacaaaaccagaagttatccaacaagaccattgaatcattgaacaaccaaccaatccctagaccagacactcaagaactagaagcttcagaaataaagctagaaccatcttttgaagactcttgtggctctaacactgacaagcagactcttacaacaccaccgagatatcctcagaagttgcttttaccaaagcccaaagtggctttggttaaactacccgtgatgcagttttctgtcatgcctgtctttgtgcctacagccgactcctcagcccagcctgtggtgttaggtgttgatcagggctctgccacaggggctgtgcacttaatgcccttgtcagtaggaaccctgatcctcggcctagattcagaggcttgctctcttaaggagagcctacctcttttcaaaattgctaatcctattgctggtgagccaataagtactggtgttcaagtgaactttggtaaaagtccatctaatcctttacaagaactagggaacacgtgtcaaaagaatagcatttcttcaatcaacgtgcagacagatctgtcttatgcctcacaaaactttataccttctgcacagtgggccactgctgattcctctgtgtcgtcttgttctcaaactgatttgtcgtttgattctcaagtgtctcttcccattagtgttcacactcagacatttttgcccagctctaaggtaacttcatctatagctgctcagactgatgcatttatggacacctgtttccagtcaggtggggtctccagagaaactcaaaccagtgggatagaaagtccaacggatgaccatgtacagatggaccaagctggaatgtgcggagacatttttgagagtgttcattcatcatataatgttgctacaggtaacattataagcaacagtttagtagcagagacagtaactcatagtttgttacctcagaatgagcctaagactttaaatcaagatattgagaaatctgcaccaattataaatttcagtgcacagaatagtatgcttccttcacagaacatgacagataatcagacccaaaccatagatttattaagtgatttggaaaacatcttgtcaagtaatctgcctgctcagacattggatcatcgtagtcttttgtctgacacaaatcctggacctgacacccagctcccatctggcccagcccagaaccccggaatcgattttgatatcgaagagttcttttcggcctcaaatatccagactcaaactgaagagagtgaacttagcaccatgaccaccgagccagtcttggagtcactggacatagagactcaaacggacttcttactcgcagatacctctgctcagtcctatgggtgtaggggaaattctaacttcttaggccttgagatgtttgacacacagacacagacagacttaaactttttcttagacagtagccctcatctgcctctgggaagtattctgaaacactccagcttttccgtgagtactgattcatctgacacagagacccaaactgaaggagtctccactgctaaaaatatacctgctctagaaagcaaagttcagttgaacagtacagaaacacagaccatgagttctgggtttgaaaccctggggagcttgttcttcaccagcaacgaaactcagacagcaatggatgactttcttctggctgatctggcctggaacacgatggagtctcagttcagctctgtagaaacccagacttctgcggaaccacacacagtctccaacttctaaaactaacggtggagtccatgtgtgaaatggcatctaccatttcctctggattaaaactacggactggggacaacagtattaattcgattgaatgtggctgatgatgcagttgcttagcttctttgtgtttctttgccttttgtacttgtaaacagaaatttgcgtataaatgtgagtgtattataaagtttgagatgttgatctaaattgtttttgtgttgcctacatttgccttttcacagctagtcttttcatgttaaaaaaaaaaatgtatttcatatctataaaacctatatagccatttagctgaagcccagcttaccaggttcaagggtacaaacttctcaaatcttcaaaacattttagtcaaagtgtaatatacttaaactgcacctaaaatatctttggcactgcttgttagaaattcctgattcctgttactaatcactaaagaaaccggatgctgccaccgtaggatttaagcagtagtgcttccatgctcttaagactcctgctgcctggaccttcgtcagctttgacacctcttttctgatttaaagacaccaaggaaaactacaactgtctttagctttgaagcagttttcatgtaatcattgccacctcttcgctacatgaactactattgataccagcatacaagtgtacagcactttacacacaagaggtttattgatgtaaaattatcggctagggaagcagcagcgggccaggtgtggtggcttacccctgtaatcccagcactttgggaggccaaagcaggacgatcacttgagcccaggagttcaacaccagcttgggcaacgtaagaagaccgtgtctctggaatttttttttttttttaattagccaggcacagtggcatgcgcctgtgatcccagctacttggaaggctgaggtgagaggatcactcgaggagattggggctgccatgagccatggtcttggcactgtactccaacctgggtaacagggcaagaccctatctcaaaaaaaaaaaaagtcgccagcaacaagcacgtagtgtagtgttcctgctaaatgagcgtaggttatccaaaccttgggaacagggagttatggaaacatgcctatgacttcatcttggggtgtgtcctatgaagatcctttctggtctccacagtaggccagagttgggggctctggagctgtttccccaagtgcatccacaagctggatctgagttttgtcactctaaaattaaacaagaaaaaaagtgggaaaagggcatcccccattaggtttcaatactttgcacttctactaagcttgatagggcaggagtgcaatctacaattattttaaagtgaatttccttccattcaccattctttatcttttctttgaataagaaaaagtatctagcaaggatattacttgtgccttgaggctagcaattataggatagattcatctaaaatatggtattctgcattttggttttttttcttaagtgaataataccagtcttcaaagaaaacaaggtgaagacctattgcttcaataatcaagaatgctttgtgtgttttgaggtaggagcatgatcaagtatgctttggggattttctgtatttaggagatcctggattcttaattgttggctaagttccagtcaagtaggaatcagtgcagcctgtaagttctccacattgacacacacacacacacacacacacacacacgacatgctcctttctgtggcacatgcctgtattactgaaagctaaatcctcaaaacctagtaaggggactaatgattcattaaagtaaattgatggttttgctactaattcctatcccatacatttgacacaaaagaagtgttggtaatggataaataacatatcccgggcagatgagctcaacctagtaggtaagagtttggtttggtcacagttgcctatgagtgtgggtttcaaaagaaacataaagccttaacttagaatttcattatgttttagaatcatcactgccttaatattcaagcatctatttaagtcctaataaaggagaaatgcatgtttatggcttttttgtaaatataaatgcagtgatctatggcttaaaaaatttgtttctgtgacaatgtttgtaaatctagccaatagagtcatttacagaagaaaaatgagcatgtaataatacaagaactgtttccccctcaaaacctgaacctgaattatttgtaaaaactgaaatttaatgattaaagagaagccagaattgtacccttttttgtgaattcttgaacgtactcataaatatgacttattgtattgccttaagttttcactcattgtcttttgaaagccatatgataaaatgattttatttaataa

SEQ ID NO: 109439 - DNA, 587 bp, Homo sapiens
  Payload ID: 1489
  Gene Symbol: ATMIN
  Gene Name: ATM interactor
  ENST ID: ENST00000565237
  CDS Start-End: 424-587
aaaagcgcaagtcattgaaagcagttctgcgaatatgtagcttttgatgatcaggagtaaatttagagtacccagaatattgcatgttctgtctgcccatagtcaggcttctgataagaatttcacagcagaaaactctgaggttgtagtctctagtaggacagatgtgtcgccaatgaagagtgatctgctcttaccaccatctaaaccgggatgcaacaacgttctcaattgaagatcagggagccagtcaggaaatgtacctgaggtatgctgaggaagaccgtgcaggatggcatagtcaatccaacaataagaaaagatttgaaaactggaccgaaattctactgctgtccaattgaaggctgccccagaggccctgagagaccgttttctcagttttctctcgtaaaacagcactttatgaaaatgcatgctgagaagaagcacaaatgtagtaagtgcagcaattcgtacggtacagaatgggacctgaaaagacatgcagaggactgtggcaagaccttccggtgcacatgcggctgtccctacgccagtagaacagcactgcagtctcacatctaccg

SEQ ID NO: 109440 - DNA, 13147 bp, Homo sapiens
  Payload ID: 1490
  Gene Symbol: ATM
  Gene Name: ATM serine/threonine kinase
  Uniprot ID: Q13315
  ENST ID: ENST00000278616
  CDS Start-End: 386-9556
ccggagcccgagccgaagggcgagccgcaaacgctaagtcgctggccattggtggacatggcgcaggcgcgtttgctccgacgggccgaatgttttggggcagtgttttgagcgcggagaccgcgtgatactggatgcgcatgggcataccgtgctctgcggctgcttggcgttgcttcttcctccagaagtgggcgctgggcagtcacgcagggtttgaaccggaagcgggagtaggtagctgcgtggctaacggagaaaagaagccgtggccgcgggaggaggcgagaggagtcgggatctgcgctgcagccaccgccgcggttgatactactttgaccttccgagtgcagtgacagtgatgtgtgttctgaaattgtgaaccatgagtctagtacttaatgatctgcttatctgctgccgtcaactagaacatgatagagctacagaacgaaagaaagaagttgagaaatttaagcgcctgattcgagatcctgaaacaattaaacatctagatcggcattcagattccaaacaaggaaaatatttgaattgggatgctgtttttagatttttacagaaatatattcagaaagaaacagaatgtctgagaatagcaaaaccaaatgtatcagcctcaacacaagcctccaggcagaaaaagatgcaggaaatcagtagtttggtcaaatacttcatcaaatgtgcaaacagaagagcacctaggctaaaatgtcaagaactcttaaattatatcatggatacagtgaaagattcatctaatggtgctatttacggagctgattgtagcaacatactactcaaagacattctttctgtgagaaaatactggtgtgaaatatctcagcaacagtggttagaattgttctctgtgtacttcaggctctatctgaaaccttcacaagatgttcatagagttttagtggctagaataattcatgctgttaccaaaggatgctgttctcagactgacggattaaattccaaatttttggactttttttccaaggctattcagtgtgcgagacaagaaaagagctcttcaggtctaaatcatatcttagcagctcttactatcttcctcaagactttggctgtcaactttcgaattcgagtgtgtgaattaggagatgaaattcttcccactttgctttatatttggactcaacataggcttaatgattctttaaaagaagtcattattgaattatttcaactgcaaatttatatccatcatccgaaaggagccaaaacccaagaaaaaggtgcttatgaatcaacaaaatggagaagtattttatacaacttatatgatctgctagtgaatgagataagtcatataggaagtagaggaaagtattcttcaggatttcgtaatattgccgtcaaagaaaatttgattgaattgatggcagatatctgtcaccaggtttttaatgaagataccagatccttggagatttctcaatcttacactactacacaaagagaatctagtgattacagtgtcccttgcaaaaggaagaaaatagaactaggctgggaagtaataaaagatcaccttcagaagtcacagaatgattttgatcttgtgccttggctacagattgcaacccaattaatatcaaagtatcctgcaagtttacctaactgtgagctgtctccattactgatgatactatctcagcttctaccccaacagcgacatggggaacgtacaccatatgtgttacgatgccttacggaagttgcattgtgtcaagacaagaggtcaaacctagaaagctcacaaaagtcagatttattaaaactctggaataaaatttggtgtattacctttcgtggtataagttctgagcaaatacaagctgaaaactttggcttacttggagccataattcagggtagtttagttgaggttgacagagaattctggaagttatttactgggtcagcctgcagaccttcatgtcctgcagtatgctgtttgactttggcactgaccaccagtatagttccaggaacggtaaaaatgggaatagagcaaaatatgtgtgaagtaaatagaagcttttctttaaaggaatcaataatgaaatggctcttattctatcagttagagggtgacttagaaaatagcacagaagtgcctccaattcttcacagtaattttcctcatcttgtactggagaaaattcttgtgagtctcactatgaaaaactgtaaagctgcaatgaattttttccaaagcgtgccagaatgtgaacaccaccaaaaagataaagaagaactttcattctcagaagtagaagaactatttcttcagacaacttttgacaagatggactttttaaccattgtgagagaatgtggtatagaaaagcaccagtccagtattggcttctctgtccaccagaatctcaaggaatcactggatcgctgtcttctgggattatcagaacagcttctgaataattactcatctgagattacaaattcagaaactcttgtccggtgttcacgtcttttggtgggtgtccttggctgctactgttacatgggtgtaatagctgaagaggaagcatataagtcagaattattccagaaagccaagtctctaatgcaatgtgcaggagaaagtatcactctgtttaaaaataagacaaatgaggaattcagaattggttccttgagaaatatgatgcagctatgtacacgttgcttgagcaactgtaccaagaagagtccaaataagattgcatctggctttttcctgcgattgttaacatcaaagctaatgaatgacattgcagatatttgtaaaagtttagcatccttcatcaaaaagccatttgaccgtggagaagtagaatcaatggaagatgatactaatggaaatctaatggaggtggaggatcagtcatccatgaatctatttaacgattaccctgatagtagtgttagtgatgcaaacgaacctggagagagccaaagtaccataggtgccattaatcctttagctgaagaatatctgtcaaagcaagatctacttttcttagacatgctcaagttcttgtgtttgtgtgtaactactgctcagaccaatactgtgtcctttagggcagctgatattcggaggaaattgttaatgttaattgattctagcacgctagaacctaccaaatccctccacctgcatatgtatctaatgcttttaaaggagcttcctggagaagagtaccccttgccaatggaagatgttcttgaacttctgaaaccactatccaatgtgtgttctttgtatcgtcgtgaccaagatgtttgtaaaactattttaaaccatgtccttcatgtagtgaaaaacctaggtcaaagcaatatggactctgagaacacaagggatgctcaaggacagtttcttacagtaattggagcattttggcatctaacaaaggagaggaaatatatattctctgtaagaatggccctagtaaattgccttaaaactttgcttgaggctgatccttattcaaaatgggccattcttaatgtaatgggaaaagactttcctgtaaatgaagtatttacacaatttcttgctgacaatcatcaccaagttcgcatgttggctgcagagtcaatcaatagattgttccaggacacgaagggagattcttccaggttactgaaagcacttcctttgaagcttcagcaaacagcttttgaaaatgcatacttgaaagctcaggaaggaatgagagaaatgtcccatagtgctgagaaccctgaaactttggatgaaatttataatagaaaatctgttttactgacgttgatagctgtggttttatcctgtagccctatctgcgaaaaacaggctttgtttgccctgtgtaaatctgtgaaagagaatggattagaacctcaccttgtgaaaaaggttttagagaaagtttctgaaacttttggatatagacgtttagaagactttatggcatctcatttagattatctggttttggaatggctaaatcttcaagatactgaatacaacttatcttcttttccttttattttattaaactacacaaatattgaggatttctatagatcttgttataaggttttgattccacatctggtgattagaagtcattttgatgaggtgaagtccattgctaatcagattcaagaggactggaaaagtcttctaacagactgctttccaaagattcttgtaaatattcttccttattttgcctatgagggtaccagagacagtgggatggcacagcaaagagagactgctaccaaggtctatgatatgcttaaaagtgaaaacttattgggaaaacagattgatcacttattcattagtaatttaccagagattgtggtggagttattgatgacgttacatgagccagcaaattctagtgccagtcagagcactgacctctgtgacttttcaggggatttggatcctgctcctaatccacctcattttccatcgcatgtgattaaagcaacatttgcctatatcagcaattgtcataaaaccaagttaaaaagcattttagaaattctttccaaaagccctgattcctatcagaaaattcttcttgccatatgtgagcaagcagctgaaacaaataatgtttataagaagcacagaattcttaaaatatatcacctgtttgttagtttattactgaaagatataaaaagtggcttaggaggagcttgggcctttgttcttcgagacgttatttatactttgattcactatatcaaccaaaggccttcttgtatcatggatgtgtcattacgtagcttctccctttgttgtgacttattaagtcaggtttgccagacagccgtgacttactgtaaggatgctctagaaaaccatcttcatgttattgttggtacacttataccccttgtgtatgagcaggtggaggttcagaaacaggtattggacttgttgaaatacttagtgatagataacaaggataatgaaaacctctatatcacgattaagcttttagatccttttcctgaccatgttgtttttaaggatttgcgtattactcagcaaaaaatcaaatacagtagaggacccttttcactcttggaggaaattaaccattttctctcagtaagtgtttatgatgcacttccattgacaagacttgaaggactaaaggatcttcgaagacaactggaactacataaagatcagatggtggacattatgagagcttctcaggataatccgcaagatgggattatggtgaaactagttgtcaatttgttgcagttatccaagatggcaataaaccacactggtgaaaaagaagttctagaggctgttggaagctgcttgggagaagtgggtcctatagatttctctaccatagctatacaacatagtaaagatgcatcttataccaaggcccttaagttatttgaagataaagaacttcagtggaccttcataatgctgacctacctgaataacacactggtagaagattgtgtcaaagttcgatcagcagctgttacctgtttgaaaaacattttagccacaaagactggacatagtttctgggagatttataagatgacaacagatccaatgctggcctatctacagccttttagaacatcaagaaaaaagtttttagaagtacccagatttgacaaagaaaacccttttgaaggcctggatgatataaatctgtggattcctctaagtgaaaatcatgacatttggataaagacactgacttgtgcttttttggacagtggaggcacaaaatgtgaaattcttcaattattaaagccaatgtgtgaagtgaaaactgacttttgtcagactgtacttccatacttgattcatgatattttactccaagatacaaatgaatcatggagaaatctgctttctacacatgttcagggatttttcaccagctgtcttcgacacttctcgcaaacgagccgatccacaacccctgcaaacttggattcagagtcagagcactttttccgatgctgtttggataaaaaatcacaaagaacaatgcttgctgttgtggactacatgagaagacaaaagagaccttcttcaggaacaatttttaatgatgctttctggctggatttaaattatctagaagttgccaaggtagctcagtcttgtgctgctcactttacagctttactctatgcagaaatctatgcagataagaaaagtatggatgatcaagagaaaagaagtcttgcatttgaagaaggaagccagagtacaactatttctagcttgagtgaaaaaagtaaagaagaaactggaataagtttacaggatcttctcttagaaatctacagaagtataggggagccagatagtttgtatggctgtggtggagggaagatgttacaacccattactagactacgaacatatgaacacgaagcaatgtggggcaaagccctagtaacatatgacctcgaaacagcaatcccctcatcaacacgccaggcaggaatcattcaggccttgcagaatttgggactctgccatattctttccgtctatttaaaaggattggattatgaaaataaagactggtgtcctgaactagaagaacttcattaccaagcagcatggaggaatatgcagtgggaccattgcacttccgtcagcaaagaagtagaaggaaccagttaccatgaatcattgtacaatgctctacaatctctaagagacagagaattctctacattttatgaaagtctcaaatatgccagagtaaaagaagtggaagagatgtgtaagcgcagccttgagtctgtgtattcgctctatcccacacttagcaggttgcaggccattggagagctggaaagcattggggagcttttctcaagatcagtcacacatagacaactctctgaagtatatattaagtggcagaaacactcccagcttctcaaggacagtgattttagttttcaggagcctatcatggctctacgcacagtcattttggagatcctgatggaaaaggaaatggacaactcacaaagagaatgtattaaggacattctcaccaaacaccttgtagaactctctatactggccagaactttcaagaacactcagctccctgaaagggcaatatttcaaattaaacagtacaattcagttagctgtggagtctctgagtggcagctggaagaagcacaagtattctgggcaaaaaaggagcagagtcttgccctgagtattctcaagcaaatgatcaagaagttggatgccagctgtgcagcgaacaatcccagcctaaaacttacatacacagaatgtctgagggtttgtggcaactggttagcagaaacgtgcttagaaaatcctgcggtcatcatgcagacctatctagaaaaggcagtagaagttgctggaaattatgatggagaaagtagtgatgagctaagaaatggaaaaatgaaggcatttctctcattagcccggttttcagatactcaataccaaagaattgaaaactacatgaaatcatcggaatttgaaaacaagcaagctctcctgaaaagagccaaagaggaagtaggtctccttagggaacataaaattcagacaaacagatacacagtaaaggttcagcgagagctggagttggatgaattagccctgcgtgcactgaaagaggatcgtaaacgcttcttatgtaaagcagttgaaaattatatcaactgcttattaagtggagaagaacatgatatgtgggtattccgactttgttccctctggcttgaaaattctggagtttctgaagtcaatggcatgatgaagagagacggaatgaagattccaacatataaatttttgcctcttatgtaccaattggctgctagaatggggaccaagatgatgggaggcctaggatttcatgaagtcctcaataatctaatctctagaatttcaatggatcacccccatcacactttgtttattatactggccttagcaaatgcaaacagagatgaatttctgactaaaccagaggtagccagaagaagcagaataactaaaaatgtgcctaaacaaagctctcagcttgatgaggatcgaacagaggctgcaaatagaataatatgtactatcagaagtaggagacctcagatggtcagaagtgttgaggcactttgtgatgcttatattatattagcaaacttagatgccactcagtggaagactcagagaaaaggcataaatattccagcagaccagccaattactaaacttaagaatttagaagatgttgttgtccctactatggaaattaaggtggaccacacaggagaatatggaaatctggtgactatacagtcatttaaagcagaatttcgcttagcaggaggtgtaaatttaccaaaaataatagattgtgtaggttccgatggcaaggagaggagacagcttgttaagggccgtgatgacctgagacaagatgctgtcatgcaacaggtcttccagatgtgtaatacattactgcagagaaacacggaaactaggaagaggaaattaactatctgtacttataaggtggttcccctctctcagcgaagtggtgttcttgaatggtgcacaggaactgtccccattggtgaatttcttgttaacaatgaagatggtgctcataaaagatacaggccaaatgatttcagtgcctttcagtgccaaaagaaaatgatggaggtgcaaaaaaagtcttttgaagagaaatatgaagtcttcatggatgtttgccaaaattttcaaccagttttccgttacttctgcatggaaaaattcttggatccagctatttggtttgagaagcgattggcttatacgcgcagtgtagctacttcttctattgttggttacatacttggacttggtgatagacatgtacagaatatcttgataaatgagcagtcagcagaacttgtacatatagatctaggtgttgcttttgaacagggcaaaatccttcctactcctgagacagttccttttagactcaccagagatattgtggatggcatgggcattacgggtgttgaaggtgtcttcagaagatgctgtgagaaaaccatggaagtgatgagaaactctcaggaaactctgttaaccattgtagaggtccttctatatgatccactctttgactggaccatgaatcctttgaaagctttgtatttacagcagaggccggaagatgaaactgagcttcaccctactctgaatgcagatgaccaagaatgcaaacgaaatctcagtgatattgaccagagtttcaacaaagtagctgaacgtgtcttaatgagactacaagagaaactgaaaggagtggaagaaggcactgtgctcagtgttggtggacaagtgaatttgctcatacagcaggccatagaccccaaaaatctcagccgacttttcccaggatggaaagcttgggtgtgatcttcagtatatgaattaccctttcattcagcctttagaaattatattttagcctttatttttaacctgccaacatactttaagtagggattaatatttaagtgaactattgtgggtttttttgaatgttggttttaatacttgatttaatcaccactcaaaaatgttttgatggtcttaaggaacatctctgctttcactctttagaaataatggtcattcgggctgggcgcagcggctcacgcctgtaatcccagcactttgggaggccgaggtgagcggatcacaaggtcaggagttcgagaccagcctggccaagagaccagcctggccagtatggtgaaaccctgtctctactaaaaatacaaaaattagccgagcatggtggcgggcacctgtaatcccagctactcgagaggctgaggcaggagaatctcttgaacctgggaggtgaaggttgctgtgggccaaaatcatgccattgcactccagcctgggtgacaagagcgaaactccatctcaaaaaaaaaaaaaaaaaaacagaaacgtatttggatttttcctagtaagatcactcagtgttactaaataatgaagttgttatggagaacaaatttcaaagacacagttagtgtagttactatttttttaagtgtgtattaaaacttctcattctattctctttatcttttaagcccttctgtactgtccatgtatgttatctttctgtgataacttcatagattgccttctagttcatgaattctcttgtcagatgtatataatctcttttaccctatccattgggcttcttctttcagaaattgtttttcatttctaattatgcatcatttttcagatctctgtttcttgatgtcatttttaatgtttttttaatgttttttatgtcactaattattttaaatgtctgtacttgatagacactgtaatagttctattaaatttagttcctgctgtttatatctgttgatttttgtatttgataggctgttcatccagttttgtctttttgaaaagtgagtttattttcagcaaggctttatctatgggaatcttgagtgtctgtttatgtcatattcccagggctgttgctgcacacaagcccattcttattttaatttcttggctttagggtttccatacctgaagtgtagcataaatactgataggagatttcccaggccaaggcaaacacacttcctcctcatctccttgtgctagtgggcagaatatttgattgatgcctttttcactgagagtataagcttccatgtgtcccacctttatggcaggggtggaaggaggtacatttaattcccactgcctgcctttggcaagccctgggttctttgctccccatatagatgtctaagctaaaagccgtgggttaatgagactggcaaattgttccaggacagctacagcatcagctcacatattcacctctctggtttttcattcccctcatttttttctgagacagagtcttgctctgtcacccaggctggagtgcagtggcatgatctcagctcactgaaacctctgcctcctgggttcaagcaattctcctgcctcagcctcccgagtagctgggactacaggcgtgtgccaacacgcccggctaattttttgtatttttattagagacggagtttcaccgtgttagccaggatggtctcgatcgcttgacctcgtgatccaccctcctcggcctcccaaagtgctgggattacaggtgtgagccaccgcgcccggcctcattcccctcatttttgaccgtaaggatttcccctttcttgtaagttctgctatgtatttaaaagaatgttttctacattttatccagcatttctctgtgttctgttggaagggaagggcttaggtatctagtttgatacataggtagaagtggaacatttctctgtcccccagctgtcatcatataagataaacatcagataaaaagccacctgaaagtaaaactactgactcgtgtattagtgagtataatctcttctccatccttaggaaaatgttcatcccagctgcggagattaacaaatgggtgattgagctttctcctcgtatttggaccttgaaggttatataaatttttttcttatgaagagttggcatttctttttattgccaatggcaggcactcattcatatttgatctcctcaccttcccctcccctaaaaccaatctccagaactttttggactataaatttcttggtttgacttctggagaactgttcagaatattactttgcatttcaaattacaaacttaccttggtgtatctttttcttacaagctgcctaaatgaatatttggtatatattggtagttttattactatagtaaatcaaggaaatgcagtaaacttaaaatgtctttaagaaagccctgaaatcttcatgggtgaaattagaaattatcaactagataatagtatagataaatgaatttgtagctaattcttgctagttgttgcatccagagagctttgaataacatcattaatctactctttagccttgcatggtatgctatgaggctcctgttctgttcaagtattctaatcaatggctttgaaaagtttatcaaatttacatacagatcacaagcctaggagaaataactaattcacagatgacagaattaagattataaaagattttttttttgtaattttagtagagacagggttgccattgtattccagccttggcgacagagcaagactctgcctcaaaaaaaaaaaaaaaaaggttttggcaagctggaactctttctgcaaatgactaagatagaaaactgccaaggacaaatgaggagtagttagattttgaaaatattaatcatagaatagttgttgtatgctaagtcactgacccatattatgtacagcatttctgatctttactttgcaagattagtgatactatcccaatacactgctggagaaatcagaatttggagaaataagttgtccaaggcaagaagatagtaaattataagtacaagtgtaatatggacagtatctaacttgaaaagatttcaggcgaaaagaatctggggtttgccagtcagttgctcaaaaggtcaatgaaaaccaaatagtgaagctatcagagaagctaataaattatagactgcttgaacagttgtgtccagattaagggagataatagctttcccaccctactttgtgcaggtcatacctccccaaagtgtttacctaatcagtaggttcacaaactcttggtcattatagtatatgcctaaaatgtatgcacttaggaatgctaaaaatttaaatatggtctaaagcaaataaaagcaaagaggaaaaactttggacagcgtaaagactagaatagtcttttaaaaagaaagccagtatattggtttgaaatatagagatgtgtcccaatttcaagtattttaattgcaccttaatgaaattatctattttctatagattttagtactattgaatgtattactttactgttacctgaatttattataaagtgtttttgaataaataattctaaaagc

SEQ ID NO: 109441 - DNA, 12954 bp, Homo sapiens
  Payload ID: 1490
  Gene Symbol: ATM
  Gene Name: ATM serine/threonine kinase
  Uniprot ID: Q13315
  ENST ID: ENST00000452508
  CDS Start-End: 190-9360
gcgagaggagtcgggatctgcgctgcagccaccgccgcggttgatactactttgaccttccgagtgcagtgaggcatacatcacaatttggaattatgcattggtttatcaatttacttgtttattgtcaccctgctgcccagatatgacttcatgaggacagtgatgtgtgttctgaaattgtgaaccatgagtctagtacttaatgatctgcttatctgctgccgtcaactagaacatgatagagctacagaacgaaagaaagaagttgagaaatttaagcgcctgattcgagatcctgaaacaattaaacatctagatcggcattcagattccaaacaaggaaaatatttgaattgggatgctgtttttagatttttacagaaatatattcagaaagaaacagaatgtctgagaatagcaaaaccaaatgtatcagcctcaacacaagcctccaggcagaaaaagatgcaggaaatcagtagtttggtcaaatacttcatcaaatgtgcaaacagaagagcacctaggctaaaatgtcaagaactcttaaattatatcatggatacagtgaaagattcatctaatggtgctatttacggagctgattgtagcaacatactactcaaagacattctttctgtgagaaaatactggtgtgaaatatctcagcaacagtggttagaattgttctctgtgtacttcaggctctatctgaaaccttcacaagatgttcatagagttttagtggctagaataattcatgctgttaccaaaggatgctgttctcagactgacggattaaattccaaatttttggactttttttccaaggctattcagtgtgcgagacaagaaaagagctcttcaggtctaaatcatatcttagcagctcttactatcttcctcaagactttggctgtcaactttcgaattcgagtgtgtgaattaggagatgaaattcttcccactttgctttatatttggactcaacataggcttaatgattctttaaaagaagtcattattgaattatttcaactgcaaatttatatccatcatccgaaaggagccaaaacccaagaaaaaggtgcttatgaatcaacaaaatggagaagtattttatacaacttatatgatctgctagtgaatgagataagtcatataggaagtagaggaaagtattcttcaggatttcgtaatattgccgtcaaagaaaatttgattgaattgatggcagatatctgtcaccaggtttttaatgaagataccagatccttggagatttctcaatcttacactactacacaaagagaatctagtgattacagtgtcccttgcaaaaggaagaaaatagaactaggctgggaagtaataaaagatcaccttcagaagtcacagaatgattttgatcttgtgccttggctacagattgcaacccaattaatatcaaagtatcctgcaagtttacctaactgtgagctgtctccattactgatgatactatctcagcttctaccccaacagcgacatggggaacgtacaccatatgtgttacgatgccttacggaagttgcattgtgtcaagacaagaggtcaaacctagaaagctcacaaaagtcagatttattaaaactctggaataaaatttggtgtattacctttcgtggtataagttctgagcaaatacaagctgaaaactttggcttacttggagccataattcagggtagtttagttgaggttgacagagaattctggaagttatttactgggtcagcctgcagaccttcatgtcctgcagtatgctgtttgactttggcactgaccaccagtatagttccaggaacggtaaaaatgggaatagagcaaaatatgtgtgaagtaaatagaagcttttctttaaaggaatcaataatgaaatggctcttattctatcagttagagggtgacttagaaaatagcacagaagtgcctccaattcttcacagtaattttcctcatcttgtactggagaaaattcttgtgagtctcactatgaaaaactgtaaagctgcaatgaattttttccaaagcgtgccagaatgtgaacaccaccaaaaagataaagaagaactttcattctcagaagtagaagaactatttcttcagacaacttttgacaagatggactttttaaccattgtgagagaatgtggtatagaaaagcaccagtccagtattggcttctctgtccaccagaatctcaaggaatcactggatcgctgtcttctgggattatcagaacagcttctgaataattactcatctgagattacaaattcagaaactcttgtccggtgttcacgtcttttggtgggtgtccttggctgctactgttacatgggtgtaatagctgaagaggaagcatataagtcagaattattccagaaagccaagtctctaatgcaatgtgcaggagaaagtatcactctgtttaaaaataagacaaatgaggaattcagaattggttccttgagaaatatgatgcagctatgtacacgttgcttgagcaactgtaccaagaagagtccaaataagattgcatctggctttttcctgcgattgttaacatcaaagctaatgaatgacattgcagatatttgtaaaagtttagcatccttcatcaaaaagccatttgaccgtggagaagtagaatcaatggaagatgatactaatggaaatctaatggaggtggaggatcagtcatccatgaatctatttaacgattaccctgatagtagtgttagtgatgcaaacgaacctggagagagccaaagtaccataggtgccattaatcctttagctgaagaatatctgtcaaagcaagatctacttttcttagacatgctcaagttcttgtgtttgtgtgtaactactgctcagaccaatactgtgtcctttagggcagctgatattcggaggaaattgttaatgttaattgattctagcacgctagaacctaccaaatccctccacctgcatatgtatctaatgcttttaaaggagcttcctggagaagagtaccccttgccaatggaagatgttcttgaacttctgaaaccactatccaatgtgtgttctttgtatcgtcgtgaccaagatgtttgtaaaactattttaaaccatgtccttcatgtagtgaaaaacctaggtcaaagcaatatggactctgagaacacaagggatgctcaaggacagtttcttacagtaattggagcattttggcatctaacaaaggagaggaaatatatattctctgtaagaatggccctagtaaattgccttaaaactttgcttgaggctgatccttattcaaaatgggccattcttaatgtaatgggaaaagactttcctgtaaatgaagtatttacacaatttcttgctgacaatcatcaccaagttcgcatgttggctgcagagtcaatcaatagattgttccaggacacgaagggagattcttccaggttactgaaagcacttcctttgaagcttcagcaaacagcttttgaaaatgcatacttgaaagctcaggaaggaatgagagaaatgtcccatagtgctgagaaccctgaaactttggatgaaatttataatagaaaatctgttttactgacgttgatagctgtggttttatcctgtagccctatctgcgaaaaacaggctttgtttgccctgtgtaaatctgtgaaagagaatggattagaacctcaccttgtgaaaaaggttttagagaaagtttctgaaacttttggatatagacgtttagaagactttatggcatctcatttagattatctggttttggaatggctaaatcttcaagatactgaatacaacttatcttcttttccttttattttattaaactacacaaatattgaggatttctatagatcttgttataaggttttgattccacatctggtgattagaagtcattttgatgaggtgaagtccattgctaatcagattcaagaggactggaaaagtcttctaacagactgctttccaaagattcttgtaaatattcttccttattttgcctatgagggtaccagagacagtgggatggcacagcaaagagagactgctaccaaggtctatgatatgcttaaaagtgaaaacttattgggaaaacagattgatcacttattcattagtaatttaccagagattgtggtggagttattgatgacgttacatgagccagcaaattctagtgccagtcagagcactgacctctgtgacttttcaggggatttggatcctgctcctaatccacctcattttccatcgcatgtgattaaagcaacatttgcctatatcagcaattgtcataaaaccaagttaaaaagcattttagaaattctttccaaaagccctgattcctatcagaaaattcttcttgccatatgtgagcaagcagctgaaacaaataatgtttataagaagcacagaattcttaaaatatatcacctgtttgttagtttattactgaaagatataaaaagtggcttaggaggagcttgggcctttgttcttcgagacgttatttatactttgattcactatatcaaccaaaggccttcttgtatcatggatgtgtcattacgtagcttctccctttgttgtgacttattaagtcaggtttgccagacagccgtgacttactgtaaggatgctctagaaaaccatcttcatgttattgttggtacacttataccccttgtgtatgagcaggtggaggttcagaaacaggtattggacttgttgaaatacttagtgatagataacaaggataatgaaaacctctatatcacgattaagcttttagatccttttcctgaccatgttgtttttaaggatttgcgtattactcagcaaaaaatcaaatacagtagaggacccttttcactcttggaggaaattaaccattttctctcagtaagtgtttatgatgcacttccattgacaagacttgaaggactaaaggatcttcgaagacaactggaactacataaagatcagatggtggacattatgagagcttctcaggataatccgcaagatgggattatggtgaaactagttgtcaatttgttgcagttatccaagatggcaataaaccacactggtgaaaaagaagttctagaggctgttggaagctgcttgggagaagtgggtcctatagatttctctaccatagctatacaacatagtaaagatgcatcttataccaaggcccttaagttatttgaagataaagaacttcagtggaccttcataatgctgacctacctgaataacacactggtagaagattgtgtcaaagttcgatcagcagctgttacctgtttgaaaaacattttagccacaaagactggacatagtttctgggagatttataagatgacaacagatccaatgctggcctatctacagccttttagaacatcaagaaaaaagtttttagaagtacccagatttgacaaagaaaacccttttgaaggcctggatgatataaatctgtggattcctctaagtgaaaatcatgacatttggataaagacactgacttgtgcttttttggacagtggaggcacaaaatgtgaaattcttcaattattaaagccaatgtgtgaagtgaaaactgacttttgtcagactgtacttccatacttgattcatgatattttactccaagatacaaatgaatcatggagaaatctgctttctacacatgttcagggatttttcaccagctgtcttcgacacttctcgcaaacgagccgatccacaacccctgcaaacttggattcagagtcagagcactttttccgatgctgtttggataaaaaatcacaaagaacaatgcttgctgttgtggactacatgagaagacaaaagagaccttcttcaggaacaatttttaatgatgctttctggctggatttaaattatctagaagttgccaaggtagctcagtcttgtgctgctcactttacagctttactctatgcagaaatctatgcagataagaaaagtatggatgatcaagagaaaagaagtcttgcatttgaagaaggaagccagagtacaactatttctagcttgagtgaaaaaagtaaagaagaaactggaataagtttacaggatcttctcttagaaatctacagaagtataggggagccagatagtttgtatggctgtggtggagggaagatgttacaacccattactagactacgaacatatgaacacgaagcaatgtggggcaaagccctagtaacatatgacctcgaaacagcaatcccctcatcaacacgccaggcaggaatcattcaggccttgcagaatttgggactctgccatattctttccgtctatttaaaaggattggattatgaaaataaagactggtgtcctgaactagaagaacttcattaccaagcagcatggaggaatatgcagtgggaccattgcacttccgtcagcaaagaagtagaaggaaccagttaccatgaatcattgtacaatgctctacaatctctaagagacagagaattctctacattttatgaaagtctcaaatatgccagagtaaaagaagtggaagagatgtgtaagcgcagccttgagtctgtgtattcgctctatcccacacttagcaggttgcaggccattggagagctggaaagcattggggagcttttctcaagatcagtcacacatagacaactctctgaagtatatattaagtggcagaaacactcccagcttctcaaggacagtgattttagttttcaggagcctatcatggctctacgcacagtcattttggagatcctgatggaaaaggaaatggacaactcacaaagagaatgtattaaggacattctcaccaaacaccttgtagaactctctatactggccagaactttcaagaacactcagctccctgaaagggcaatatttcaaattaaacagtacaattcagttagctgtggagtctctgagtggcagctggaagaagcacaagtattctgggcaaaaaaggagcagagtcttgccctgagtattctcaagcaaatgatcaagaagttggatgccagctgtgcagcgaacaatcccagcctaaaacttacatacacagaatgtctgagggtttgtggcaactggttagcagaaacgtgcttagaaaatcctgcggtcatcatgcagacctatctagaaaaggcagtagaagttgctggaaattatgatggagaaagtagtgatgagctaagaaatggaaaaatgaaggcatttctctcattagcccggttttcagatactcaataccaaagaattgaaaactacatgaaatcatcggaatttgaaaacaagcaagctctcctgaaaagagccaaagaggaagtaggtctccttagggaacataaaattcagacaaacagatacacagtaaaggttcagcgagagctggagttggatgaattagccctgcgtgcactgaaagaggatcgtaaacgcttcttatgtaaagcagttgaaaattatatcaactgcttattaagtggagaagaacatgatatgtgggtattccgactttgttccctctggcttgaaaattctggagtttctgaagtcaatggcatgatgaagagagacggaatgaagattccaacatataaatttttgcctcttatgtaccaattggctgctagaatggggaccaagatgatgggaggcctaggatttcatgaagtcctcaataatctaatctctagaatttcaatggatcacccccatcacactttgtttattatactggccttagcaaatgcaaacagagatgaatttctgactaaaccagaggtagccagaagaagcagaataactaaaaatgtgcctaaacaaagctctcagcttgatgaggatcgaacagaggctgcaaatagaataatatgtactatcagaagtaggagacctcagatggtcagaagtgttgaggcactttgtgatgcttatattatattagcaaacttagatgccactcagtggaagactcagagaaaaggcataaatattccagcagaccagccaattactaaacttaagaatttagaagatgttgttgtccctactatggaaattaaggtggaccacacaggagaatatggaaatctggtgactatacagtcatttaaagcagaatttcgcttagcaggaggtgtaaatttaccaaaaataatagattgtgtaggttccgatggcaaggagaggagacagcttgttaagggccgtgatgacctgagacaagatgctgtcatgcaacaggtcttccagatgtgtaatacattactgcagagaaacacggaaactaggaagaggaaattaactatctgtacttataaggtggttcccctctctcagcgaagtggtgttcttgaatggtgcacaggaactgtccccattggtgaatttcttgttaacaatgaagatggtgctcataaaagatacaggccaaatgatttcagtgcctttcagtgccaaaagaaaatgatggaggtgcaaaaaaagtcttttgaagagaaatatgaagtcttcatggatgtttgccaaaattttcaaccagttttccgttacttctgcatggaaaaattcttggatccagctatttggtttgagaagcgattggcttatacgcgcagtgtagctacttcttctattgttggttacatacttggacttggtgatagacatgtacagaatatcttgataaatgagcagtcagcagaacttgtacatatagatctaggtgttgcttttgaacagggcaaaatccttcctactcctgagacagttccttttagactcaccagagatattgtggatggcatgggcattacgggtgttgaaggtgtcttcagaagatgctgtgagaaaaccatggaagtgatgagaaactctcaggaaactctgttaaccattgtagaggtccttctatatgatccactctttgactggaccatgaatcctttgaaagctttgtatttacagcagaggccggaagatgaaactgagcttcaccctactctgaatgcagatgaccaagaatgcaaacgaaatctcagtgatattgaccagagtttcaacaaagtagctgaacgtgtcttaatgagactacaagagaaactgaaaggagtggaagaaggcactgtgctcagtgttggtggacaagtgaatttgctcatacagcaggccatagaccccaaaaatctcagccgacttttcccaggatggaaagcttgggtgtgatcttcagtatatgaattaccctttcattcagcctttagaaattatattttagcctttatttttaacctgccaacatactttaagtagggattaatatttaagtgaactattgtgggtttttttgaatgttggttttaatacttgatttaatcaccactcaaaaatgttttgatggtcttaaggaacatctctgctttcactctttagaaataatggtcattcgggctgggcgcagcggctcacgcctgtaatcccagcactttgggaggccgaggtgagcggatcacaaggtcaggagttcgagaccagcctggccaagagaccagcctggccagtatggtgaaaccctgtctctactaaaaatacaaaaattagccgagcatggtggcgggcacctgtaatcccagctactcgagaggctgaggcaggagaatctcttgaacctgggaggtgaaggttgctgtgggccaaaatcatgccattgcactccagcctgggtgacaagagcgaaactccatctcaaaaaaaaaaaaaaaaaaacagaaacgtatttggatttttcctagtaagatcactcagtgttactaaataatgaagttgttatggagaacaaatttcaaagacacagttagtgtagttactatttttttaagtgtgtattaaaacttctcattctattctctttatcttttaagcccttctgtactgtccatgtatgttatctttctgtgataacttcatagattgccttctagttcatgaattctcttgtcagatgtatataatctcttttaccctatccattgggcttcttctttcagaaattgtttttcatttctaattatgcatcatttttcagatctctgtttcttgatgtcatttttaatgtttttttaatgttttttatgtcactaattattttaaatgtctgtacttgatagacactgtaatagttctattaaatttagttcctgctgtttatatctgttgatttttgtatttgataggctgttcatccagttttgtctttttgaaaagtgagtttattttcagcaaggctttatctatgggaatcttgagtgtctgtttatgtcatattcccagggctgttgctgcacacaagcccattcttattttaatttcttggctttagggtttccatacctgaagtgtagcataaatactgataggagatttcccaggccaaggcaaacacacttcctcctcatctccttgtgctagtgggcagaatatttgattgatgcctttttcactgagagtataagcttccatgtgtcccacctttatggcaggggtggaaggaggtacatttaattcccactgcctgcctttggcaagccctgggttctttgctccccatatagatgtctaagctaaaagccgtgggttaatgagactggcaaattgttccaggacagctacagcatcagctcacatattcacctctctggtttttcattcccctcatttttttctgagacagagtcttgctctgtcacccaggctggagtgcagtggcatgatctcagctcactgaaacctctgcctcctgggttcaagcaattctcctgcctcagcctcccgagtagctgggactacaggcgtgtgccaacacgcccggctaattttttgtatttttattagagacggagtttcaccgtgttagccaggatggtctcgatcgcttgacctcgtgatccaccctcctcggcctcccaaagtgctgggattacaggtgtgagccaccgcgcccggcctcattcccctcatttttgaccgtaaggatttcccctttcttgtaagttctgctatgtatttaaaagaatgttttctacattttatccagcatttctctgtgttctgttggaagggaagggcttaggtatctagtttgatacataggtagaagtggaacatttctctgtcccccagctgtcatcatataagataaacatcagataaaaagccacctgaaagtaaaactactgactcgtgtattagtgagtataatctcttctccatccttaggaaaatgttcatcccagctgcggagattaacaaatgggtgattgagctttctcctcgtatttggaccttgaaggttatataaatttttttcttatgaagagttggcatttctttttattgccaatggcaggcactcattcatatttgatctcctcaccttcccctcccctaaaaccaatctccagaactttttggactataaatttcttggtttgacttctggagaactgttcagaatattactttgcatttcaaattacaaacttaccttggtgtatctttttcttacaagctgcctaaatgaatatttggtatatattggtagttttattactatagtaaatcaaggaaatgcagtaaacttaaaatgtctttaagaaagccctgaaatcttcatgggtgaaattagaaattatcaactagataatagtatagataaatgaatttgtagctaattcttgctagttgttgcatccagagagctttgaataacatcattaatctactctttagccttgcatggtatgctatgaggctcctgttctgttcaagtattctaatcaatggctttgaaaagtttatcaaatttacatacagatcacaagcctaggagaaataactaattcacagatgacagaattaagattataaaagattttttttttgtaattttagtagagacagggttgccattgtattccagccttggcgacagagcaagactctgcctcaaaaaaaaaaaaaaaaaggttttggcaagctggaactctttctgcaaatgactaagatagaaaactgccaaggacaaatgaggagtagttagattttgaaaatattaatcatagaatagttgttgtatgctaagtcactgacccatattatgtacagcatttctgatctttactttgcaagattagtgatactatcccaatacactgctggagaaatcagaatttggagaaataagttgtccaaggcaagaagatagtaaattataagtacaagtgtaatatggacagtatctaacttgaaaagatttcaggcgaaaagaatctggggtttgccagtcagttgctcaaaaggtcaatgaaaaccaaatagtgaagctatcagagaagctaataaattatagactgcttgaacagttgtgtccagattaagggagataatagctttcccaccctactttgtgcaggtcatacctccccaaagtgtttacctaatcagtaggttcacaaactcttggtcattatagtatatgcctaaaatgtatgcacttaggaatgctaaaaatttaaatatggtctaaagcaaataaaagcaaagaggaaaaactttggacagcgtaaagactagaatagtcttttaaaaagaaagccagtatattggtttgaaatatagagatgtgtcccaatttcaagtattttaattgcaccttaatgaaattatctattttctatagattttagtactattgaatgtattactttactgttacctgaatttattataaagtgtttttgaataaataattctaaaagcata

SEQ ID NO: 109442 - DNA, 481 bp, Homo sapiens
  Payload ID: 1490
  Gene Symbol: ATM
  Gene Name: ATM serine/threonine kinase
  ENST ID: ENST00000532931
  CDS Start-End: 202-481
aaaagaagccgtggccgcgggaggaggcgagaggagtcgggatctgcgctgcagccaccgccgcggttgatactactttgaccttccgagtgcagtgtctcgctctgtcgcccatgctggagtgcaattgcgtgatctcagctaactgcactttccgcctcctgggttcaaacagtgatgtgtgttctgaaattgtgaaccatgagtctagtacttaatgatctgcttatctgctgccgtcaactagaacatgatagagctacagaacgaaagaaagaagttgagaaatttaagcgcctgattcgagatcctgaaacaattaaacatctagatcggcattcagattccaaacaaggaaaatatttgaattgggatgctgtttttagatttttacagaaatatattcagaaagaaacagaatgtctgagaatagcaaaaccaaatgtatcagcctcaacacaagcctccaggcagaaaaaga

SEQ ID NO: 109443 - DNA, 595 bp, Homo sapiens
  Payload ID: 1490
  Gene Symbol: ATM
  Gene Name: ATM serine/threonine kinase
  ENST ID: ENST00000527891
  CDS Start-End: 133-595
cggagaaaagaagccgtggccgcgggaggaggcgagaggagtcgggatctgcgctgcagccaccgccgcggttgatactactttgaccttccgagtgcagtgacagtgatgtgtgttctgaaattgtgaaccatgagtctagtacttaatgatctgcttatctgctgccgtcaactagaacatgatagagctacagaacgaaagaaagaagttgagaaatttaagcgcctgattcgagatcctgaaacaattaaacatctagatcggcattcagattccaaacaaggaaaatatttgaattgggatgctgtttttagatttttacagaaatatattcagaaagaaacagaatgtctgagaatagcaaaaccaaatgtatcagcctcaacacaagcctccaggcagaaaaagatgcaggaaatcagtagtttggtcaaatacttcatcaaatgtgcaaacagaaaattgttctctgtgtacttcaggctctatctgaaaccttcacaagatgttcatagagttttagtggctagaataattcatgctgttaccaaaggatgctgttctcagactgacggattaaattccaaatttt

SEQ ID NO: 109444 - DNA, 1513 bp, Homo sapiens
  Payload ID: 1490
  Gene Symbol: ATM
  Gene Name: ATM serine/threonine kinase
  ENST ID: ENST00000531525
  CDS Start-End: 1-468
attgatcacttattcattagtaatttaccagagattgtggtggagttattgatgacgttacatgagccagcaaattctagtgccagtcagagcactgacctctgtgacttttcaggggatttggatcctgctcctaatccacctcattttccatcgcatgtgattaaagcaacatttgcctatatcagcaattgtcataaaaccaagttaaaaagcattttagaaattctttccaaaagccctgattcctatcagaaaattcttcttgccatatgtgagcaagcagctgaaacaaataatgtttataagaagcacagaattcttaaaatatatcacctgtttgttagtttattactgaaagatataaaaagtggcttaggaggagcttgggcctttgttcttcgagacgttatttatactttgattcactatatcaaccaaaggaaattaaccattttctctcagtaagtgtttatgatgcacttccattgacaagacttgaaggactaaaggatcttcgaagacaactggaactacataaagatcagatggtggacattatgagagcttctcagggtgctaattttaaatgacatgggctatttctacctgtttctttttgaaagaatattttgcaaagtcttgctcttggtttcattgtcacagacttagttcagactctcatcatttagttcagaccctcatttctcatctaactgtaaaactggtcctaactggtcttctcaccctgaactcttcctgttttattcatcctctgccagatgatttctctaaacccaaatatgatcatgtttttctactgcctaaattttttttttaagagacagagtttttttttttttttaagagtctcactctgtcacctaggctggagtgtagtggcaccatcataacttactatgaccttgaattcctgggtacaaggaattctcctgtctcagccttctgaatagctggaacaacaggcacacaccactacacctagctactttatttattttttttattttttgtagggacaggggtcccactatgttgcctaggttggtctcgaattcttggcctcaagtgatcctcctgccttagcctcacaaagcattgggattagaggtgtgagccacggcatctagccatgcttaaacatttttcatttctttttctttttttttaagacggagtttcgctcttgttgcccaggctggaatgcagtggcactatcttagctcactgcaacctccacctcctgagctcagattctcgtgcctcagccttcctagtagctaggattacaggcacctgccaccatgcctggctaattttttgtattttttttagtagagacggggtttcaccatgttggccagggtggtctcaaactcctgagctcaggcaatccgcccacctcagcctcccaaagtgctgggattacaggcatgagccaccgcggctggcccatgcttaaacatttttaacaccttccaaccatgtaaaa

SEQ ID NO: 109445 - DNA, 502 bp, Homo sapiens
  Payload ID: 1490
  Gene Symbol: ATM
  Gene Name: ATM serine/threonine kinase
  ENST ID: ENST00000529588
  CDS Start-End: 1-233
tgtgtgaagtgaaaactgacttttgtcagactgtacttccatacttgattcatgatattttactccaagatacaaatgaatcatggagaaatctgctttctacacatgttcagggatttttcaccagctgtcttcgacacttctcgcaaacgagccgatccacaacccctgcaaacttggattcagaccttcttcaggaacaatttttaatgatgctttctggctggatttaaattatctagaagttgccaaggtagctcagtcttgtgctgctcactttacagctttactctatgcagaaatctatgcagataagaaaagtatggatgatcaagagaaaagaagtcttgcatttgaagaaggaagccagagtacaactatttctagcttgagtgaaaaaagtaaagaagaaactggaataagtttacaggatcttctcttagaaatctacagaagtataggggagccagatagtttgtatggctgtggtggagggaagatg

SEQ ID NO: 109446 - DNA, 4841 bp, Homo sapiens
  Payload ID: 1490
  Gene Symbol: ATM
  Gene Name: ATM serine/threonine kinase
  ENST ID: ENST00000527805
  CDS Start-End: 734-4841
ccgcgtccgcgcttacccaatacaagccgggctacgtccgagggtaacaacatgatcaaaaccacagcaggaaccacaataaggaacaagactcaggttaaagcaaacacagcgacagctcctgcgccgcatctcctggttccagtggcggcactgaactcgcggcaatttgtcccgcctctttcgcttcacggcagccaatcgcttccgccagagaaagaaaggcgccgaaatgaaacccgcctccgttcgccttcggaactgtcgtcacttccgtcctcagacttggaggggcggggatgaggagggcggggaggacgacgagggcgaagagggtgggtgagagccccggagcccgagccgaagggcgagccgcaaacgctaagtcgctggccattggtggacatggcgcaggcgcgtttgctccgacgggccgaatgttttggggcagtgttttgagcgcggagaccgcgtgatactggatgcgcatgggcataccgtgctctgcggctgcttggcgttgcttcttcctccagaagtgggcgctgggcagtcacgcagggtttgaaccggaagcgggagtaggtagctgcgtggctaacggagaaaagaagccgtggccgcgggaggaggcgagaggagtcgggatctgcgctgcagccaccgccgcggttgatactactttgaccttccgagtgcagtgacagtgatgtgtgttctgaaattgtgaaccatgagtctagtacttaatgatctgcttatctgctgccgtcaactagaacatgatagagctacagaacgaaagaaagaagttgagaaatttaagcgcctgattcgagatcctgaaacaattaaacatctagatcggcattcagattccaaacaaggaaaatatttgaattgggatgctgtttttagatttttacagaaatatattcagaaagaaacagaatgtctgagaatagcaaaaccaaatgtatcagcctcaacacaagcctccaggcagaaaaagatgcaggaaatcagtagtttggtcaaatacttcatcaaatgtgcaaacagaagagcacctaggctaaaatgtcaagaactcttaaattatatcatggatacagtgaaagattcatctaatggtgctatttacggagctgattgtagcaacatactactcaaagacattctttctgtgagaaaatactggtgtgaaatatctcagcaacagtggttagaattgttctctgtgtacttcaggctctatctgaaaccttcacaagatgttcatagagttttagtggctagaataattcatgctgttaccaaaggatgctgttctcagactgacggattaaattccaaatttttggactttttttccaaggctattcagtgtgcgagacaagaaaagagctcttcaggtctaaatcatatcttagcagctcttactatcttcctcaagactttggctgtcaactttcgaattcgagtgtgtgaattaggagatgaaattcttcccactttgctttatatttggactcaacataggcttaatgattctttaaaagaagtcattattgaattatttcaactgcaaatttatatccatcatccgaaaggagccaaaacccaagaaaaaggtgcttatgaatcaacaaaatggagaagtattttatacaacttatatgatctgctagtgaatgagataagtcatataggaagtagaggaaagtattcttcaggatttcgtaatattgccgtcaaagaaaatttgattgaattgatggcagatatctgtcaccaggtttttaatgaagataccagatccttggagatttctcaatcttacactactacacaaagagaatctagtgattacagtgtcccttgcaaaaggaagaaaatagaactaggctgggaagtaataaaagatcaccttcagaagtcacagaatgattttgatcttgtgccttggctacagattgcaacccaattaatatcaaagtatcctgcaagtttacctaactgtgagctgtctccattactgatgatactatctcagcttctaccccaacagcgacatggggaacgtacaccatatgtgttacgatgccttacggaagttgcattgtgtcaagacaagaggtcaaacctagaaagctcacaaaagtcagatttattaaaactctggaataaaatttggtgtattacctttcgtggtataagttctgagcaaatacaagctgaaaactttggcttacttggagccataattcagggtagtttagttgaggttgacagagaattctggaagttatttactgggtcagcctgcagaccttcatgtcctgcagtatgctgtttgactttggcactgaccaccagtatagttccaggaacggtaaaaatgggaatagagcaaaatatgtgtgaagtaaatagaagcttttctttaaaggaatcaataatgaaatggctcttattctatcagttagagggtgacttagaaaatagcacagaagtgcctccaattcttcacagtaattttcctcatcttgtactggagaaaattcttgtgagtctcactatgaaaaactgtaaagctgcaatgaattttttccaaagcgtgccagaatgtgaacaccaccaaaaagataaagaagaactttcattctcagaagtagaagaactatttcttcagacaacttttgacaagatggactttttaaccattgtgagagaatgtggtatagaaaagcaccagtccagtattggcttctctgtccaccagaatctcaaggaatcactggatcgctgtcttctgggattatcagaacagcttctgaataattactcatctgagattacaaattcagaaactcttgtccggtgttcacgtcttttggtgggtgtccttggctgctactgttacatgggtgtaatagctgaagaggaagcatataagtcagaattattccagaaagccaagtctctaatgcaatgtgcaggagaaagtatcactctgtttaaaaataagacaaatgaggaattcagaattggttccttgagaaatatgatgcagctatgtacacgttgcttgagcaactgtaccaagaagagtccaaataagattgcatctggctttttcctgcgattgttaacatcaaagctaatgaatgacattgcagatatttgtaaaagtttagcatccttcatcaaaaagccatttgaccgtggagaagtagaatcaatggaagatgatactaatggaaatctaatggaggtggaggatcagtcatccatgaatctatttaacgattaccctgatagtagtgttagtgatgcaaacgaacctggagagagccaaagtaccataggtgccattaatcctttagctgaagaatatctgtcaaagcaagatctacttttcttagacatgctcaagttcttgtgtttgtgtgtaactactgctcagaccaatactgtgtcctttagggcagctgatattcggaggaaattgttaatgttaattgattctagcacgctagaacctaccaaatccctccacctgcatatgtatctaatgcttttaaaggagcttcctggagaagagtaccccttgccaatggaagatgttcttgaacttctgaaaccactatccaatgtgtgttctttgtatcgtcgtgaccaagatgtttgtaaaactattttaaaccatgtccttcatgtagtgaaaaacctaggtcaaagcaatatggactctgagaacacaagggatgctcaaggacagtttcttacagtaattggagcattttggcatctaacaaaggagaggaaatatatattctctgtaagaatggccctagtaaattgccttaaaactttgcttgaggctgatccttattcaaaatgggccattcttaatgtaatgggaaaagactttcctgtaaatgaagtatttacacaatttcttgctgacaatcatcaccaagttcgcatgttggctgcagagtcaatcaatagattgttccaggacacgaagggagattcttccaggttactgaaagcacttcctttgaagcttcagcaaacagcttttgaaaatgcatacttgaaagctcaggaaggaatgagagaaatgtcccatagtgctgagaaccctgaaactttggatgaaatttataatagaaaatctgttttactgacgttgatagctgtggttttatcctgtagccctatctgcgaaaaacaggctttgtttgccctgtgtaaatctgtgaaagagaatggattagaacctcaccttgtgaaaaaggttttagagaaagtttctgaaacttttggatatagacgtttagaagactttatggcatctcatttagattatctggttttggaatggctaaatcttcaagatactgaatacaacttatcttcttttccttttattttattaaactacacaaatattgaggatttctatagatcttgttataaggttttgattccacatctggtgattagaagtcattttgatgaggtgaagtccattgctaatcagattcaagaggactggaaaagtcttctaacagactgctttccaaagattcttgtaaatattcttccttattttgcctatgagggtaccagagacagtgggatggcacagcaaagagagactgctaccaaggtctatgatatgcttaaaagtgaaaacttattgggaaaacagattgatcacttattcattagtaatttaccagagattgtggtggagttattgatgacgttacatgagccagcaaattctagtgccagtcagagcactgacctctgtgacttttcag

SEQ ID NO: 109447 - DNA, 582 bp, Homo sapiens
  Payload ID: 1490
  Gene Symbol: ATM
  Gene Name: ATM serine/threonine kinase
  ENST ID: ENST00000601453
  CDS Start-End: 178-582
atttgctgtgtttcaggcactgtaagcatgtatatgggtccttaaagggactcatagagaggcatacatcacaatttggaattatgcattggtttatcaatttacttgtttattgtcaccctgctgcccagatatgacttcatgaggacagtgatgtgtgttctgaaattgtgaaccatgagtctagtacttaatgatctgcttatctgctgccgtcaactagaacatgatagagctacagaacgaaagaaagaagttgagaaatttaagcgcctgattcgagatcctgaaacaattaaacatctagatcggcattcagattccaaacaaggaaaatatttgaattgggatgctgtttttagatttttacagaaatatattcagaaagaaacagaatgtctgagaatagcaaaaccaaatgtatcagcctcaacacaagcctccaggcagaaaaagatgcaggaaatcagtagtttggtcaaatacttcatcaaatgtgcaaacagaagagcacctaggctaaaatgtcaagaactcttaaattatatcatggatacagtgaaagattcatctaatggtgct

SEQ ID NO: 109448 - DNA, 560 bp, Homo sapiens
  Payload ID: 1490
  Gene Symbol: ATM
  Gene Name: ATM serine/threonine kinase
  ENST ID: ENST00000526567
  CDS Start-End: 189-527
acttcagcctcgcggttaagagcttgggctctggaatcatacggctggaattggaattctgtcagtcgtgtggccgctctctactgtcttgtgaagataagtgagataatcttgacctgtggtgagcactcgtgagcgttagctgctgtatttaccagacagtgatgtgtgttctgaaattgtgaaccatgagtctagtacttaatgatctgcttatctgctgccgtcaactagaacatgatagagctacagaacgaaagaaagaagttgagaaatttaagcgcctgattcgagatcctgaaacaattaaacatctagatcggcattcagattccaaacaaggaaaatatttgaattgggatgctgtttttagatttttacagaaatatattcagaaagaaacagaatgtctgagaatagcaaaaccaaatgtatcagcctcaacacaagcctccaggcagaaaaagatgcaggaaatcagtagtttggtcaaatacttcatcaaatgtgcaaacagaagtaagtgatgttataaattataaataaatggcttaacagat

SEQ ID NO: 109449 - DNA, 5718 bp, Homo sapiens
  Payload ID: 1490
  Gene Symbol: ATM
  Gene Name: ATM serine/threonine kinase
  ENST ID: ENST00000530958
  CDS Start-End: 4523-5029
gccgcgggaggaggcgagaggagtcgggatctgcgctgcagccaccgccgcggttgatactactttgaccttccgagtgcagtggtaggggcgcggaggcaacgcagcggcttctgcgctgggaaattcagtcgtgtgcgacccagtctgtcctctccccagaccgccaatctcatgcacccctccagagtggcccttgactcctccctctcctcactccatctttcctggcctctctccgggtgcttagcggacttggccaataacctcctccttttaaacgccctgaattgaaccctgcctcctgcgcatcctctttttgtgtcaccttagggttcagatttaactacgcgacttgactagtcatcttttgatctctctctcgtatttagtacttttagtcagcgagcatttattgatatttcaacttcagcctcgcggttaagagcttgggctctggaatcatacggctggaattggaattctgtcagtcgtgtggccgctctctactgtcttgtgaagataagtgagataatcttgacctgtggtgagcactcgtgagcgttagctgctgtatttaccaggtacagataagacaactacagtggatgataatgtatgtggtgataggggagtactctgatggtagaggagtgactttggttctctgcaaactcagcctgagactatcaattcagtttgtggtgagacctcgcagtgttaccttggcagatggtagaagccttccagatggaaggaaaaatgcgtgtaaaggcacaaagtgtagaaggaccctgaagctccagcgtgaggcctggcattgaatgaaatatattttgtgggttttcagctgctgaagtcataggaatggatgagaccaagaaaacaaagctgtttttgaggtatgagcggaagaagagatatcaggagactttcgaaacagtcataacggaagttaatatgatcattgctaacatttgctgtgtttcaggcactgtaagcatgtatatgggtccttaaagggactcatagaggtaggtactagtattgtttttccttttatcattgagaaactgaggtttgaagagattagtgaacttgctctagattatacagtttgtaagtggctgaaccaggatttgaactaatacaatctgactacagaggccacactccttagcactagaaaagaatggcatgccaagggcagagttatttctaggaagatgggatataagcgtcattgtcaagttgtgcaaaggggtcaacttggttgagatctaaaaaggaacactgaattcgtcaattcagaggctcgtaggaagtaggaaatccttatcttttcgtttgaaccttgagtggaacctagatattctggattaatgtataaatgaagttcatctttatatggtgacactcatactctagttgactacctaatagttcctctgccttctttcagttccgccaacatactgtgttctttaacattgtagaaccctttggctatgctagtctccttccctgaagtgttggtcctctagccctttttttgattggcaccagttagttcagatcttggctttattataaactcctctgagatatatgttccctgacagtttatctaaaatgattctctctacagttattttctattactgtgtttttgtttcctcagaggcatacatcacaatttggaattatgcattggtttatcaatttacttgtttattgtcaccctgctgcccagatatgacttcatgagggtaggatttgtatctgtttagttcattatttgtctagctataagtagtaaatattgtttgcatctatcagtgaatgagcatcttctgtttatgtagataatactgaactgttttgttttcttcaaagtaatcattaagctgaaggtaagaaaaacaagttcaaggaagtcacaccatggggaaaaaaaagtcaagtttagggctgcctcttccgggaagtgtcaaatctttagtatatttaggaataaaggtgccaaaccttatggttctttggatattgctaaggtattttcattggttagattaccagtttcattttccttattgactcaagagggctttaaactgagattgaagaagtaagaagattcctagataaaaccataaggaatggaaaaacaaaaatgataatacttgtccacaggaagtatataatcaaatgaaaagaactcaaataacaatctgtaatctatagcagagtaaagcggaagttgtaatagtgttgggggatgggggaagtcagaagaaccaccagtgaatataaaaggagaagagaatcagagccatctgctaataaaatgggtagtcagctctttttgttttttttgtcttgttttgttttgagacagtctcgctctgtcgcccatgctggagtgcaattgcgtgatctcagctaactgcactttccgcctcctgggttcaagtgagtctcctacctcagtctccccagtagctaggattgcaggcacatgctaccacacctggttaatttttgtatttttagtagagacggggtttcacgatgttggccaggctggctggtctcgaactcctgacctcgtggaacgcccacctcggcctcccagagtgctgggattacaggcatgagccaccacgcctagccccggtagtcagctcttactgagaatattcaaagacagggcattcattttgtaagagacattccttccttcataggaagattggacctggtcttttagttcctcccaattttgagattctgtgagattgaatcggggcagagaaacatacttaatcttgaaagattaagtagaatttagatggatggataggagaaggactttccctacctttttacttcttgagatatagttatttgtaggtataatatacataaatatatgtattttttctctgtttacagacattcatagtttaataaaaaacttctttgtattatataaaggtttagatcagaactagtaaaacagaatgctgtttctttttttttcttttctattttactttaggttctgtgggtagatgtgcgggtttgttacatgggtaaattgcatgttgctgaggcttggtgtacgaatgatcctgtcactcaggtagtgagcatagtacctgataggtagcccttcaagccatacctccctttctttccaaccctcaaacagtccccagtctctgttcttcccatctttgtgtccatgttgaaatgctgttcttactacatttttttgaaggacatcaaaagagagtttgattatatcagaagcccccaaaagaagagagctactcagtggaatcaaggcatagtaaaatatagttgatccttgatatttgcaaaggataccaccatagcatagaatttgcttcatttccttttaaaacagaaatgtcattttactcctattgttatgtgttaaataagaaccttaataccagttgagatggaagtggtagacaaagcttactagctctgataacctcctacttatcagctccaaagcatgttttaagcctttggctcagcaaaatgacatgtctctccatataagcaagagtgcttttttttttttctttgagacggagtcttgctctgtcaccaggctggagtgcagtggcgcgatctccgctcactgcaacctctgcctcctgggttcaagcgattctcctacctcagcctcctgagtagctgggactacaagagcacactaccacgcctggccaagagtgcttttaaatagttcattgtcaatgttaaatccttgagtgctcatttccttatttacctggctgttttctattcatctttcatgtctcaatttaaatgtcatgtttctttggtctcagagtaataaaaagtaaatatacttcccccatctcccgccccgcagagccttcctctgttgcccaggctggagtacagtggctcgatcttggctcactgaaagctctgcctcccagattcaagcgattctcctgcctcagcctcctgagtagctgggattacaggcgcgcgccaccaagcccggctaatttttgtatttttagtagagacagggtttcaccatgttggtcaggctggtcgaactcctgaccttgtgatcctcccaccttggcctcccaaagtgctgggattacaggcgtgagccactgcgtccagtgtaaattatacttttattttaatcctgctactactgcaagcaaggcaaacatttttgtgttacagcattacttgtatagattttaagaaaatctcattttaaatacggaaatgttaagaaaaattattgtgcctttgaccagaatgtgcctctaattgtacagttaaatctaactataaatactgcagtataaaataattatatacacattttttcacacctctttctctctatatatgcatatatacatatacatatatatacctatatgtattttttttacagacagtgatgtgtgttctgaaattgtgaaccatgagtctagtacttaatgatctgcttatctgctgccgtcaactagaacatgatagagctacagaacgaaagaaagaagttgagaaatttaagcgcctgattcgagatcctgaaacaattaaacatctagatcggcattcagattccaaacaaggaaaatatttgaattgggatgctgtttttagatttttacagaaatatattcagaaagaaacagaatgtctgagaatagcaaaaccaaatgtatcagcctcaacacaagcctccaggcagaaaaagatgcaggaaatcagtagtttggtcaaatacttcatcaaatgtgcaaacagaagagcacctaggctaaaatgtcaagaactcttaaattatatcatggatacagtgaaagattcatctaatggtgctatttacggagctgattgtagcaacatactactcaaagacattctttctgtgagaaaatactggtgtgaaatatctcagcaacagtggttaggtatgttttgaaggttgttgtttgtgaatttttcctcatgaaatgaaacttcaccaaagaaagcactctgtctgtatctgtctatatcccccaagtgacctgacagtttaacagtactttagtaaaattatatggttatcgaactgacccttaatttttatttattatgtagcttttgaataaagtcatgaataatatatcaggtgcctgatatcagagccggaattacagttgaaaaataccatctccatcgtcaaggagttgacagtggcagaagaaaacccaagtaaaccagagttcataatgtgctgtgatacagacatatttgggttcagtaggtatacaaaacaatgacacctaaactcaaccatgatttaagtagaaagggagaaaaccaagagagggaagtaccataaaagtgaaagcaggcagggtgcagtggctcacgcctgtaatcctagcactttgggaggccaaggccggtggattgcttgagctcaggagttcaagaccagcctgggcaacatggtgaaactctgtctttaaaaaaatagcggaggtaatggctcttgcttgtagtcccagttacttgggaggctgaggcaggaggatcacctgagccctggaggttaaggctgcagtgagctgtgatcacactgcactccggcctccatgacagagtgagaccctgtttccattt

SEQ ID NO: 109450 - DNA, 2212 bp, Homo sapiens
  Payload ID: 1491
  Gene Symbol: ATOH1
  Gene Name: atonal bHLH transcription factor 1
  Uniprot ID: Q92858
  ENST ID: ENST00000306011
  CDS Start-End: 175-1239
ggagaagcatagttgcacgcgacctggtgtgtgatctccgagtgggtgggggagggtcgaggagggaaaaaaaaataagacgttgcagaagagacccggaaagggccttttttttggttgagctggtgtcccagtgctgcctccgatcctgagcctccgagcctttgcagtgcaatgtcccgcctgctgcatgcagaagagtgggctgaagtgaaggagttgggagaccaccatcgccagccccagccgcatcatctcccgcaaccgccgccgccgccgcagccacctgcaactttgcaggcgagagagcatcccgtctacccgcctgagctgtccctcctggacagcaccgacccacgcgcctggctggctcccactttgcagggcatctgcacggcacgcgccgcccagtatttgctacattccccggagctgggtgcctcagaggccgctgcgccccgggacgaggtggacggccggggggagctggtaaggaggagcagcggcggtgccagcagcagcaagagccccgggccggtgaaagtgcgggaacagctgtgcaagctgaaaggcggggtggtggtagacgagctgggctgcagccgccaacgggccccttccagcaaacaggtgaatggggtgcagaagcagagacggctagcagccaacgccagggagcggcgcaggatgcatgggctgaaccacgccttcgaccagctgcgcaatgttatcccgtcgttcaacaacgacaagaagctgtccaaatatgagaccctgcagatggcccaaatctacatcaacgccttgtccgagctgctacaaacgcccagcggaggggaacagccaccgccgcctccagcctcctgcaaaagcgaccaccaccaccttcgcaccgcggcctcctatgaagggggcgcgggcaacgcgaccgcagctggggctcagcaggcttccggagggagccagcggccgaccccgcccgggagttgccggactcgcttctcagccccagcttctgcgggagggtactcggtgcagctggacgctctgcacttctcgactttcgaggacagcgccctgacagcgatgatggcgcaaaagaatttgtctccttctctccccgggagcatcttgcagccagtgcaggaggaaaacagcaaaacttcgcctcggtcccacagaagcgacggggaattttccccccattcccattacagtgactcggatgaggcaagttaggaaggtgacagaagcctgaaaactgagacagaaacaaaactgccctttcccagtgcgcgggaagccccgcggttaaagatccccgcaccctttaatttttgctctgcgatggtcgttgtttagcaacgacttggcttcagatggcagctacatttgatggtttgcaaatgccgccgctgttccaaacttcctacggtccatattgtttgatgaaaactttctgttaaaattgtgtcctttccgcccaccttctgctccccctttagatagatacggtataattgtaggtacccgtatatggcatcattattctagttccctgctgccaatacgctgctaaaacgtcgcatcttctctgtcactggtttgggtttaatttattttacgccctgggcatccatccttgtgtgttgcgcactcaagtgtgggagatttagtcttccgaagttgttttccaaaatgcacaatgaaacgcaaaattagtgcttccaaagtggataacttttgactatggaattgttagaaaacaagaaactttaaggtttatatattgtataaacatacccagtatgtgcatccgatcgcgagaacgttggcgtcttttaggaaactccgcgcacgcactttatcagccgctgctgcggtggtggctccaggagaaactcaactgccaattgcagaccagtttttttttttttaaacacagccacttataattcttaagctctttgcaaatgtttgtttaaaaaatgaaaaattaaaaaaaatctagtagtgtcaaacgcatttggtcaattttattttgctttgttaatattagaaaacttatttattattgtttgctaccatttctacttatcttgattcattttttacgttttctactcgagatcattttattttaatttagcaaagccaactgcccttgtttaatgtattttgttttgcaaatgattaaaataaatgtgaaaag

SEQ ID NO: 109451 - DNA, 1480 bp, Homo sapiens
  Payload ID: 1492
  Gene Symbol: ATOH7
  Gene Name: atonal bHLH transcription factor 7
  Uniprot ID: Q8N100
  ENST ID: ENST00000373673
  CDS Start-End: 427-885
cgacagctactgcgctaaaagcgctccttccctgagcttcgggaaagagttcatcttcctgcaaaggagtctcaggctttcccagaggacttgaaaggccttcctcgaaccagccacaccaaactctgctgcagaaggtttccttctctttttcaacttcatgttgagaaaatgactttctcttgagcatctcattttcccctaaatttgggcaagtgaagagatatcagcctggtcatccagtagaacagaaggccgagtcccgcactcccccactgtaaactatttgattgcacgtgagttgctttgtttatgacttatttgctcagaagaggcacgttgggaagcggctcgagagaccagcccacgcgcaggtcctgagcgggcgggcgtgcgaggtcggcgcctcgctgcttggggccggggatgaagtcctgcaagcccagcggcccgccggcgggagcgcgcgttgcacccccgtgcgcgggcggcaccgagtgcgcgggcacgtgcgccggggccgggcggctggagagcgcggcgcgcaggcgcctggcggccaacgcgcgcgagcgccgccgcatgcaggggctcaacactgccttcgaccgcttacgcagggtggttccccagtggggccaggataaaaagctgtccaagtacgagaccctgcagatggccctgagctacatcatggctctgacccggatcctggccgaggccgagcgattcggctcggagcgggactgggtgggtctccactgtgagcacttcggccgcgaccactacctcccgttcccgggcgcgaagctgccgggcgagagcgagctgtacagccagagactcttcggcttccagcccgagcccttccagatggccacctagggcgcgcgcctccgcgggggtgggtgtccggcagccgctccgagcctcggccctgccccaagtagcccagaagcctccggcggcccaggattctaaggatgcaatcctcgaggaaaattagtcgattctcagattacctttattcgcatcatcagacctatggacgcaatcatttaattgcctttcttttcccctcctcctttgtattttgtagatttcattaatggatcttgtgaatgggttgattgctgtgaaaataatgccccctttccccttttctgggctactttgagggaaaacaatcttaagaaaaataggattaagctattctgttccagtcctcagagaaataatcactttcttaaactttgtgagtttgtcctgttcgggtgaagttacagtatccattacttgtgtttgctcacaacagagctaccttcctgttgtgtaaatgcgtttttgctttagtgcattgtgtgtgcaagcatgaagtagaaacactttttttttctgggtacagtacatgggtatcggtgctctgtatttttttaaactgtgtacacattattaaaatatacattttataaaatataaa

SEQ ID NO: 109452 - DNA, 2438 bp, Homo sapiens
  Payload ID: 1493
  Gene Symbol: ATOH8
  Gene Name: atonal bHLH transcription factor 8
  Uniprot ID: Q96SQ7
  ENST ID: ENST00000306279
  CDS Start-End: 297-1262
ctcgcgaactgggcttctgtgtaaactgaggctaaacaaacacagatggagcgcagcgggcgttctccagaaatgctggcaaggaggcagcgacttcagatgacactctgagcgctccgggaacggacagcccggcggcttcccgaagccggcggcgcagctgcccggggcgagggggagaaagggagagagggagggggagggcgggcgaagcgggagagccagagactcctcggcgctgagcgcggcggcggcccgggcagccccacgcccctgcctcgcgcgccgcccgcgccatgaagcacatcccggtcctcgaggacgggccgtggaagaccgtgtgcgtgaaggagctgaacggccttaagaagctcaagcggaaaggcaaggagccggcgcggcgcgcgaacggctataaaactttccgactggacttggaagcgcccgagccccgcgccgtagccaccaacgggctgcgggacaggacccatcggctgcagccggtcccggtaccggtgccggtgccagtcccagtggcgccggccgttcccccaagagggggcacggacacagccggggagcgcgggggctctcgggcgcccgaggtctccgacgcgcggaaacgctgcttcgccctaggcgcagtggggccaggactccccacgccgccgccgccgccgcctcctgcgccccagagccaggcacctgggggcccagaggcacagcctttccgggagccgggtctgcgtcctcgcatcttgctgtgcgcaccgcccgcgcgccccgcgccgtcagcacccccagcaccgccagcgcccccggagtccactgtgcgccctgcgcccccgacgcgccccggggaaagttcctactcgtcaatttcacacgtaatttacaataaccaccaggattcctccgcgtcgcctaggaaacgaccgggcgaagcgactgccgcctcctccgagatcaaagccctgcagcagacccggaggctcctggcgaacgccagggagcggacgcgggtgcacaccatcagcgcagccttcgaggcgctcaggaagcaggtgccgtgctactcatatgggcagaagctgtccaaactggccatcctgaggatcgcctgtaactacatcctgtccctggcgcggctggctgaccttgactacagtgccgaccacagcaacctcagcttctccgagtgtgtgcagcgctgcacccgcaccctgcaggccgagggacgtgccaagaagcgcaaggagtgactggctgcaggcaagaccaaggccaccactgtgggccctccttccagtcaggcctgaggacaaggtgagctcgctgagtccagcctcgtggtcttctccaagatgccgccagatgcccagcctacagcctctcagggtcggatcggagcacgcctgcctccctctcccctccgccctcacccagccaatccgaggctgcttcgcactttgccctctgcctggtggggaggggagagctcagcccccgactcactcagaccccaaggcccactgtccagctgcagaaattcgttgccaaagattggacagagacaccgaaggaaatggggtggtgaaaccccacagcgaaaagccacaccgttgctctgtgacttttgctcctcctgttgcctgagccccatctcaagccaaagatgagtcagtggttctgctaggaactcatggaatggatgggcatttgatgacccctgggggtcatcttggccctctgacctggtgctctctctccactgggccttgtgctggctgagtgcaagacaagccttaggggctgtgagagggaggctggggtgcctgggcggggctgggagtgggacctgagatccctgcccactctctccccttcattggctgcccaggccactggccccagttctcagtgtcccttgggtccaggctccttgggccctaagcatcaccagaagggagtaagcagggagagaagcaatattactccctcccctacaccagggacttgccccagggcagctacctatgggtctttgcttccccagccagcctctcctcactgtgacccacccccatgggcccccgtcccaggcagccagcaccatgggcaggccctgccatggacagaaaaagagtttttctcttgttcagcctgcacgtggcctgaggaaggagtagaggctgggttggctggagccgtcctactgggcaagatggcgccccacttggagggcggtggtctgttacagggtgtgcaggggcagagaaggaagggaccaggggactgggccagtatgtggaggatggggcctgcgtgttcaaagccaaggcccgccccttccttgtgctcaaatggccaaagctgttcacgtctgtgctcaaccatctgcttcaaattgaagtaaaagccccaaaatgtcaagaaaa

SEQ ID NO: 109453 - DNA, 4339 bp, Homo sapiens
  Payload ID: 1494
  Gene Symbol: ACLY
  Gene Name: ATP citrate lyase
  Uniprot ID: P53396
  ENST ID: ENST00000352035
  CDS Start-End: 132-3437
ccgggacaaaagccggatcccgggaagctaccggctgctggggtgctccggattttgcggggttcgtcgggcctgtggaagaagcgccgcgcacggacttcggcagaggtagagcaggtctctctgcagccatgtcggccaaggcaatttcagagcagacgggcaaagaactcctttacaagttcatctgtaccacctcagccatccagaatcggttcaagtatgctcgggtcactcctgacacagactgggcccgcttgctgcaggaccacccctggctgctcagccagaacttggtagtcaagccagaccagctgatcaaacgtcgtggaaaacttggtctcgttggggtcaacctcactctggatggggtcaagtcctggctgaagccacggctgggacaggaagccacagttggcaaggccacaggcttcctcaagaactttctgatcgagcccttcgtcccccacagtcaggctgaggagttctatgtctgcatctatgccacccgagaaggggactacgtcctgttccaccacgaggggggtgtggacgtgggtgatgtggacgccaaggcccagaagctgcttgttggcgtggatgagaaactgaatcctgaggacatcaaaaaacacctgttggtccacgcccctgaagacaagaaagaaattctggccagttttatctccggcctcttcaatttctacgaggacttgtacttcacctacctcgagatcaatccccttgtagtgaccaaagatggagtctatgtccttgacttggcggccaaggtggacgccactgccgactacatctgcaaagtgaagtggggtgacatcgagttccctccccccttcgggcgggaggcatatccagaggaagcctacattgcagacctcgatgccaaaagtggggcaagcctgaagctgaccttgctgaaccccaaagggaggatctggaccatggtggccgggggtggcgcctctgtcgtgtacagcgataccatctgtgatctagggggtgtcaacgagctggcaaactatggggagtactcaggcgcccccagcgagcagcagacctatgactatgccaagactatcctctccctcatgacccgagagaagcacccagatggcaagatcctcatcattggaggcagcatcgcaaacttcaccaacgtggctgccacgttcaagggcatcgtgagagcaattcgagattaccagggccccctgaaggagcacgaagtcacaatctttgtccgaagaggtggccccaactatcaggagggcttacgggtgatgggagaagtcgggaagaccactgggatccccatccatgtctttggcacagagactcacatgacggccattgtgggcatggccctgggccaccggcccatccccaaccagccacccacagcggcccacactgcaaacttcctcctcaacgccagcgggagcacatcgacgccagcccccagcaggacagcatctttttctgagtccagggccgatgaggtggcgcctgcaaagaaggccaagcctgccatgccacaagattcagtcccaagtccaagatccctgcaaggaaagagcaccaccctcttcagccgccacaccaaggccattgtgtggggcatgcagacccgggccgtgcaaggcatgctggactttgactatgtctgctcccgagacgagccctcagtggctgccatggtctaccctttcactggggaccacaagcagaagttttactgggggcacaaagagatcctgatccctgtcttcaagaacatggctgatgccatgaggaagcatccggaggtagatgtgctcatcaactttgcctctctccgctctgcctatgacagcaccatggagaccatgaactatgcccagatccggaccatcgccatcatagctgaaggcatccctgaggccctcacgagaaagctgatcaagaaggcggaccagaagggagtgaccatcatcggacctgccactgttggaggcatcaagcctgggtgctttaagattggcaacacaggtgggatgctggacaacatcctggcctccaaactgtaccgcccaggcagcgtggcctatgtctcacgttccggaggcatgtccaacgagctcaacaatatcatctctcggaccacggatggcgtctatgagggcgtggccattggtggggacaggtacccgggctccacattcatggatcatgtgttacgctatcaggacactccaggagtcaaaatgattgtggttcttggagagattgggggcactgaggaatataagatttgccggggcatcaaggagggccgcctcactaagcccatcgtctgctggtgcatcgggacgtgtgccaccatgttctcctctgaggtccagtttggccatgctggagcttgtgccaaccaggcttctgaaactgcagtagccaagaaccaggctttgaaggaagcaggagtgtttgtgccccggagctttgatgagcttggagagatcatccagtctgtatacgaagatctcgtggccaatggagtcattgtacctgcccaggaggtgccgcccccaaccgtgcccatggactactcctgggccagggagcttggtttgatccgcaaacctgcctcgttcatgaccagcatctgcgatgagcgaggacaggagctcatctacgcgggcatgcccatcactgaggtcttcaaggaagagatgggcattggcggggtcctcggcctcctctggttccagaaaaggttgcctaagtactcttgccagttcattgagatgtgtctgatggtgacagctgatcacgggccagccgtctctggagcccacaacaccatcatttgtgcgcgagctgggaaagacctggtctccagcctcacctcggggctgctcaccatcggggatcggtttgggggtgccttggatgcagcagccaagatgttcagtaaagcctttgacagtggcattatccccatggagtttgtgaacaagatgaagaaggaagggaagctgatcatgggcattggtcaccgagtgaagtcgataaacaacccagacatgcgagtgcagatcctcaaagattacgtcaggcagcacttccctgccactcctctgctcgattatgcactggaagtagagaagattaccacctcgaagaagccaaatcttatcctgaatgtagatggtctcatcggagtcgcatttgtagacatgcttagaaactgtgggtcctttactcgggaggaagctgatgaatatattgacattggagccctcaatggcatctttgtgctgggaaggagtatggggttcattggacactatcttgatcagaagaggctgaagcaggggctgtatcgtcatccgtgggatgatatttcatatgttcttccggaacacatgagcatgtaacagagccaggaaccctactgcagtaaactgaagacaagatctcttcccccaagaaaaagtgtacagacagctggcagtggagcctgctttatttagcaggggcctggaatgtaaacagccactggggtacaggcaccgaagaccaacatccacaggctaacaccccttcagtccacacaaagaagcttcatattttttttataagcatagaaataaaaaccaagccaatatttgtgactttgctctgctacctgctgtatttattatatggaagcatctaagtactgtcaggatggggtcttcctcattgtagggcgttaggatgttgctttctttttccattagttaaacatttttttctcctttggaggaagggaatgaaacatttatggcctcaagatactatacatttaaagcaccccaatgtctctctttttttttttttacttccctttcttcttccttatataacatgaagaacattgtattaatctgatttttaaagatctttttgtatgttacgtgttaagggcttgtttggtatcccactgaaatgttctgtgttgcagaccagagtctgtttatgtcagggggatggggccattgcatccttagccattgtcacaaaatatgtggagtagtaacttaatatgtaaagttgtaacatacatacatttaaaatggaaatgcagaaagctgtgaaatgtcttgtgtcttatgttctctgtatttatgcagctgatttgtctgtctgtaactgaagtgtgggtccaaggactcctaactactttgcatctgtaatccacaaagattctgggcagctgccacctcagtctcttctctgtattatcatagtctggtttaaataaactatatagtaacaatgaaggcatactgctggc

SEQ ID NO: 109454 - DNA, 4318 bp, Homo sapiens
  Payload ID: 1494
  Gene Symbol: ACLY
  Gene Name: ATP citrate lyase
  Uniprot ID: P53396
  ENST ID: ENST00000353196
  CDS Start-End: 164-3439
agccgatgggggcggggaaaagtccggctgggccgggacaaaagccggatcccgggaagctaccggctgctggggtgctccggattttgcggggttcgtcgggcctgtggaagaagcgccgcgcacggacttcggcagaggtagagcaggtctctctgcagccatgtcggccaaggcaatttcagagcagacgggcaaagaactcctttacaagttcatctgtaccacctcagccatccagaatcggttcaagtatgctcgggtcactcctgacacagactgggcccgcttgctgcaggaccacccctggctgctcagccagaacttggtagtcaagccagaccagctgatcaaacgtcgtggaaaacttggtctcgttggggtcaacctcactctggatggggtcaagtcctggctgaagccacggctgggacaggaagccacagttggcaaggccacaggcttcctcaagaactttctgatcgagcccttcgtcccccacagtcaggctgaggagttctatgtctgcatctatgccacccgagaaggggactacgtcctgttccaccacgaggggggtgtggacgtgggtgatgtggacgccaaggcccagaagctgcttgttggcgtggatgagaaactgaatcctgaggacatcaaaaaacacctgttggtccacgcccctgaagacaagaaagaaattctggccagttttatctccggcctcttcaatttctacgaggacttgtacttcacctacctcgagatcaatccccttgtagtgaccaaagatggagtctatgtccttgacttggcggccaaggtggacgccactgccgactacatctgcaaagtgaagtggggtgacatcgagttccctccccccttcgggcgggaggcatatccagaggaagcctacattgcagacctcgatgccaaaagtggggcaagcctgaagctgaccttgctgaaccccaaagggaggatctggaccatggtggccgggggtggcgcctctgtcgtgtacagcgataccatctgtgatctagggggtgtcaacgagctggcaaactatggggagtactcaggcgcccccagcgagcagcagacctatgactatgccaagactatcctctccctcatgacccgagagaagcacccagatggcaagatcctcatcattggaggcagcatcgcaaacttcaccaacgtggctgccacgttcaagggcatcgtgagagcaattcgagattaccagggccccctgaaggagcacgaagtcacaatctttgtccgaagaggtggccccaactatcaggagggcttacgggtgatgggagaagtcgggaagaccactgggatccccatccatgtctttggcacagagactcacatgacggccattgtgggcatggccctgggccaccggcccatccccaaccagccacccacagcggcccacactgcaaacttcctcctcaacgccagcgggagcacatcgacgccagcccccagcaggacagcatctttttctgagtccagggccgatgaggtggcgcctgcaaagaaggccaagcctgccatgccacaaggaaagagcaccaccctcttcagccgccacaccaaggccattgtgtggggcatgcagacccgggccgtgcaaggcatgctggactttgactatgtctgctcccgagacgagccctcagtggctgccatggtctaccctttcactggggaccacaagcagaagttttactgggggcacaaagagatcctgatccctgtcttcaagaacatggctgatgccatgaggaagcatccggaggtagatgtgctcatcaactttgcctctctccgctctgcctatgacagcaccatggagaccatgaactatgcccagatccggaccatcgccatcatagctgaaggcatccctgaggccctcacgagaaagctgatcaagaaggcggaccagaagggagtgaccatcatcggacctgccactgttggaggcatcaagcctgggtgctttaagattggcaacacaggtgggatgctggacaacatcctggcctccaaactgtaccgcccaggcagcgtggcctatgtctcacgttccggaggcatgtccaacgagctcaacaatatcatctctcggaccacggatggcgtctatgagggcgtggccattggtggggacaggtacccgggctccacattcatggatcatgtgttacgctatcaggacactccaggagtcaaaatgattgtggttcttggagagattgggggcactgaggaatataagatttgccggggcatcaaggagggccgcctcactaagcccatcgtctgctggtgcatcgggacgtgtgccaccatgttctcctctgaggtccagtttggccatgctggagcttgtgccaaccaggcttctgaaactgcagtagccaagaaccaggctttgaaggaagcaggagtgtttgtgccccggagctttgatgagcttggagagatcatccagtctgtatacgaagatctcgtggccaatggagtcattgtacctgcccaggaggtgccgcccccaaccgtgcccatggactactcctgggccagggagcttggtttgatccgcaaacctgcctcgttcatgaccagcatctgcgatgagcgaggacaggagctcatctacgcgggcatgcccatcactgaggtcttcaaggaagagatgggcattggcggggtcctcggcctcctctggttccagaaaaggttgcctaagtactcttgccagttcattgagatgtgtctgatggtgacagctgatcacgggccagccgtctctggagcccacaacaccatcatttgtgcgcgagctgggaaagacctggtctccagcctcacctcggggctgctcaccatcggggatcggtttgggggtgccttggatgcagcagccaagatgttcagtaaagcctttgacagtggcattatccccatggagtttgtgaacaagatgaagaaggaagggaagctgatcatgggcattggtcaccgagtgaagtcgataaacaacccagacatgcgagtgcagatcctcaaagattacgtcaggcagcacttccctgccactcctctgctcgattatgcactggaagtagagaagattaccacctcgaagaagccaaatcttatcctgaatgtagatggtctcatcggagtcgcatttgtagacatgcttagaaactgtgggtcctttactcgggaggaagctgatgaatatattgacattggagccctcaatggcatctttgtgctgggaaggagtatggggttcattggacactatcttgatcagaagaggctgaagcaggggctgtatcgtcatccgtgggatgatatttcatatgttcttccggaacacatgagcatgtaacagagccaggaaccctactgcagtaaactgaagacaagatctcttcccccaagaaaaagtgtacagacagctggcagtggagcctgctttatttagcaggggcctggaatgtaaacagccactggggtacaggcaccgaagaccaacatccacaggctaacaccccttcagtccacacaaagaagcttcatattttttttataagcatagaaataaaaaccaagccaatatttgtgactttgctctgctacctgctgtatttattatatggaagcatctaagtactgtcaggatggggtcttcctcattgtagggcgttaggatgttgctttctttttccattagttaaacatttttttctcctttggaggaagggaatgaaacatttatggcctcaagatactatacatttaaagcaccccaatgtctctctttttttttttttacttccctttcttcttccttatataacatgaagaacattgtattaatctgatttttaaagatctttttgtatgttacgtgttaagggcttgtttggtatcccactgaaatgttctgtgttgcagaccagagtctgtttatgtcagggggatggggccattgcatccttagccattgtcacaaaatatgtggagtagtaacttaatatgtaaagttgtaacatacatacatttaaaatggaaatgcagaaagctgtgaaatgtcttgtgtcttatgttctctgtatttatgcagctgatttgtctgtctgtaactgaagtgtgggtccaaggactcctaactactttgcatctgtaatccacaaagattctgggcagctgccacctcagtctcttctctgtattatcatagtctggtttaaataaactatatagt

SEQ ID NO: 109455 - DNA, 3682 bp, Homo sapiens
  Payload ID: 1494
  Gene Symbol: ACLY
  Gene Name: ATP citrate lyase
  Uniprot ID: P53396
  ENST ID: ENST00000393896
  CDS Start-End: 171-3446
gcgagccgatgggggcggggaaaagtccggctgggccgggacaaaagccggatcccgggaagctaccggctgctggggtgctccggattttgcggggttcgtcgggcctgtggaagaagcgccgcgcacggacttcggcagagacaggtagagcaggtctctctgcagccatgtcggccaaggcaatttcagagcagacgggcaaagaactcctttacaagttcatctgtaccacctcagccatccagaatcggttcaagtatgctcgggtcactcctgacacagactgggcccgcttgctgcaggaccacccctggctgctcagccagaacttggtagtcaagccagaccagctgatcaaacgtcgtggaaaacttggtctcgttggggtcaacctcactctggatggggtcaagtcctggctgaagccacggctgggacaggaagccacagttggcaaggccacaggcttcctcaagaactttctgatcgagcccttcgtcccccacagtcaggctgaggagttctatgtctgcatctatgccacccgagaaggggactacgtcctgttccaccacgaggggggtgtggacgtgggtgatgtggacgccaaggcccagaagctgcttgttggcgtggatgagaaactgaatcctgaggacatcaaaaaacacctgttggtccacgcccctgaagacaagaaagaaattctggccagttttatctccggcctcttcaatttctacgaggacttgtacttcacctacctcgagatcaatccccttgtagtgaccaaagatggagtctatgtccttgacttggcggccaaggtggacgccactgccgactacatctgcaaagtgaagtggggtgacatcgagttccctccccccttcgggcgggaggcatatccagaggaagcctacattgcagacctcgatgccaaaagtggggcaagcctgaagctgaccttgctgaaccccaaagggaggatctggaccatggtggccgggggtggcgcctctgtcgtgtacagcgataccatctgtgatctagggggtgtcaacgagctggcaaactatggggagtactcaggcgcccccagcgagcagcagacctatgactatgccaagactatcctctccctcatgacccgagagaagcacccagatggcaagatcctcatcattggaggcagcatcgcaaacttcaccaacgtggctgccacgttcaagggcatcgtgagagcaattcgagattaccagggccccctgaaggagcacgaagtcacaatctttgtccgaagaggtggccccaactatcaggagggcttacgggtgatgggagaagtcgggaagaccactgggatccccatccatgtctttggcacagagactcacatgacggccattgtgggcatggccctgggccaccggcccatccccaaccagccacccacagcggcccacactgcaaacttcctcctcaacgccagcgggagcacatcgacgccagcccccagcaggacagcatctttttctgagtccagggccgatgaggtggcgcctgcaaagaaggccaagcctgccatgccacaaggaaagagcaccaccctcttcagccgccacaccaaggccattgtgtggggcatgcagacccgggccgtgcaaggcatgctggactttgactatgtctgctcccgagacgagccctcagtggctgccatggtctaccctttcactggggaccacaagcagaagttttactgggggcacaaagagatcctgatccctgtcttcaagaacatggctgatgccatgaggaagcatccggaggtagatgtgctcatcaactttgcctctctccgctctgcctatgacagcaccatggagaccatgaactatgcccagatccggaccatcgccatcatagctgaaggcatccctgaggccctcacgagaaagctgatcaagaaggcggaccagaagggagtgaccatcatcggacctgccactgttggaggcatcaagcctgggtgctttaagattggcaacacaggtgggatgctggacaacatcctggcctccaaactgtaccgcccaggcagcgtggcctatgtctcacgttccggaggcatgtccaacgagctcaacaatatcatctctcggaccacggatggcgtctatgagggcgtggccattggtggggacaggtacccgggctccacattcatggatcatgtgttacgctatcaggacactccaggagtcaaaatgattgtggttcttggagagattgggggcactgaggaatataagatttgccggggcatcaaggagggccgcctcactaagcccatcgtctgctggtgcatcgggacgtgtgccaccatgttctcctctgaggtccagtttggccatgctggagcttgtgccaaccaggcttctgaaactgcagtagccaagaaccaggctttgaaggaagcaggagtgtttgtgccccggagctttgatgagcttggagagatcatccagtctgtatacgaagatctcgtggccaatggagtcattgtacctgcccaggaggtgccgcccccaaccgtgcccatggactactcctgggccagggagcttggtttgatccgcaaacctgcctcgttcatgaccagcatctgcgatgagcgaggacaggagctcatctacgcgggcatgcccatcactgaggtcttcaaggaagagatgggcattggcggggtcctcggcctcctctggttccagaaaaggttgcctaagtactcttgccagttcattgagatgtgtctgatggtgacagctgatcacgggccagccgtctctggagcccacaacaccatcatttgtgcgcgagctgggaaagacctggtctccagcctcacctcggggctgctcaccatcggggatcggtttgggggtgccttggatgcagcagccaagatgttcagtaaagcctttgacagtggcattatccccatggagtttgtgaacaagatgaagaaggaagggaagctgatcatgggcattggtcaccgagtgaagtcgataaacaacccagacatgcgagtgcagatcctcaaagattacgtcaggcagcacttccctgccactcctctgctcgattatgcactggaagtagagaagattaccacctcgaagaagccaaatcttatcctgaatgtagatggtctcatcggagtcgcatttgtagacatgcttagaaactgtgggtcctttactcgggaggaagctgatgaatatattgacattggagccctcaatggcatctttgtgctgggaaggagtatggggttcattggacactatcttgatcagaagaggctgaagcaggggctgtatcgtcatccgtgggatgatatttcatatgttcttccggaacacatgagcatgtaacagagccaggaaccctactgcagtaaactgaagacaagatctcttcccccaagaaaaagtgtacagacagctggcagtggagcctgctttatttagcaggggcctggaatgtaaacagccactggggtacaggcaccgaagaccaacatccacaggctaacaccccttcagtccacacaaagaagcttcatattttttttataagcatagaaataaaaaccaagccaatatttgtg

SEQ ID NO: 109456 - DNA, 2974 bp, Homo sapiens
  Payload ID: 1494
  Gene Symbol: ACLY
  Gene Name: ATP citrate lyase
  Uniprot ID: P53396
  ENST ID: ENST00000537919
  CDS Start-End: 128-2620
gacaaaagccggatcccgggaagctaccggctgctggggtgctccggattttgcggggttcgtcgggcctgtggaagaagcgccgcgcacggacttcggcagaggtagagcaggtctctctgcagccatgtcggccaaggcaatttcagagcagacgggcaaagaactcctttacaagttcatctgtaccacctcagccatccagaatcggttcaagtatgctcgggtcactcctgacacagactgggcccgcttgctgcaggaccacccctggctgctcagccagaacttggtagtcaagccagaccagctgatcaaacgtcgtggaaaacttggtctcgttggggtcaacctcactctggatggggtcaagtcctggctgaagccacggctgggacaggaagccacaggcatcgtgagagcaattcgagattaccagggccccctgaaggagcacgaagtcacaatctttgtccgaagaggtggccccaactatcaggagggcttacgggtgatgggagaagtcgggaagaccactgggatccccatccatgtctttggcacagagactcacatgacggccattgtgggcatggccctgggccaccggcccatccccaaccagccacccacagcggcccacactgcaaacttcctcctcaacgccagcgggagcacatcgacgccagcccccagcaggacagcatctttttctgagtccagggccgatgaggtggcgcctgcaaagaaggccaagcctgccatgccacaaggaaagagcaccaccctcttcagccgccacaccaaggccattgtgtggggcatgcagacccgggccgtgcaaggcatgctggactttgactatgtctgctcccgagacgagccctcagtggctgccatggtctaccctttcactggggaccacaagcagaagttttactgggggcacaaagagatcctgatccctgtcttcaagaacatggctgatgccatgaggaagcatccggaggtagatgtgctcatcaactttgcctctctccgctctgcctatgacagcaccatggagaccatgaactatgcccagatccggaccatcgccatcatagctgaaggcatccctgaggccctcacgagaaagctgatcaagaaggcggaccagaagggagtgaccatcatcggacctgccactgttggaggcatcaagcctgggtgctttaagattggcaacacaggtgggatgctggacaacatcctggcctccaaactgtaccgcccaggcagcgtggcctatgtctcacgttccggaggcatgtccaacgagctcaacaatatcatctctcggaccacggatggcgtctatgagggcgtggccattggtggggacaggtacccgggctccacattcatggatcatgtgttacgctatcaggacactccaggagtcaaaatgattgtggttcttggagagattgggggcactgaggaatataagatttgccggggcatcaaggagggccgcctcactaagcccatcgtctgctggtgcatcgggacgtgtgccaccatgttctcctctgaggtccagtttggccatgctggagcttgtgccaaccaggcttctgaaactgcagtagccaagaaccaggctttgaaggaagcaggagtgtttgtgccccggagctttgatgagcttggagagatcatccagtctgtatacgaagatctcgtggccaatggagtcattgtacctgcccaggaggtgccgcccccaaccgtgcccatggactactcctgggccagggagcttggtttgatccgcaaacctgcctcgttcatgaccagcatctgcgatgagcgaggacaggagctcatctacgcgggcatgcccatcactgaggtcttcaaggaagagatgggcattggcggggtcctcggcctcctctggttccagaaaaggttgcctaagtactcttgccagttcattgagatgtgtctgatggtgacagctgatcacgggccagccgtctctggagcccacaacaccatcatttgtgcgcgagctgggaaagacctggtctccagcctcacctcggggctgctcaccatcggggatcggtttgggggtgccttggatgcagcagccaagatgttcagtaaagcctttgacagtggcattatccccatggagtttgtgaacaagatgaagaaggaagggaagctgatcatgggcattggtcaccgagtgaagtcgataaacaacccagacatgcgagtgcagatcctcaaagattacgtcaggcagcacttccctgccactcctctgctcgattatgcactggaagtagagaagattaccacctcgaagaagccaaatcttatcctgaatgtagatggtctcatcggagtcgcatttgtagacatgcttagaaactgtgggtcctttactcgggaggaagctgatgaatatattgacattggagccctcaatggcatctttgtgctgggaaggagtatggggttcattggacactatcttgatcagaagaggctgaagcaggggctgtatcgtcatccgtgggatgatatttcatatgttcttccggaacacatgagcatgtaacagagccaggaaccctactgcagtaaactgaagacaagatctcttcccccaagaaaaagtgtacagacagctggcagtggagcctgctttatttagcaggggcctggaatgtaaacagccactggggtacaggcaccgaagaccaacatccacaggctaacaccccttcagtccacacaaagaagcttcatattttttttataagcatagaaataaaaaccaagccaatatttgtgactttgctctgctacctgctgtatttattatatggaagcatctaagtactgtcaggatggggtcttcctcattgtagggcgttaggatgttgctttctttttccattagttaaacatt

SEQ ID NO: 109457 - DNA, 583 bp, Homo sapiens
  Payload ID: 1494
  Gene Symbol: ACLY
  Gene Name: ATP citrate lyase
  ENST ID: ENST00000590770
  CDS Start-End: 185-583
gctggggtgctccggattttgcggggttcgtcgggcctgtggaagaagcgccgcgcacggacttcggcagagcgataccatctgtgatctagggggtgtcaacgagctggcaaactatggggagtactcaggcgcccccagcgagcagcagacctatgactatgccaagactatcctctccctcatgacccgagagaagcacccagatggcaagatcctcatcattggaggcagcatcgcaaacttcaccaacgtggctgccacgttcaagggcatcgtgagagcaattcgagattaccagggccccctgaaggagcacgaagtcacaatctttgtccgaagaggtggccccaactatcaggagggcttacgggtgatgggagaagtcgggaagaccactgggatccccatccatgtctttggcacagagactcacatgacggccattgtgggcatggccctgggccaccggcccatccccaaccagccacccacagcggcccacactgcaaacttcctcctcaacgccagcgggagcacatcgacgccagcccccagcaggacagcatctttttctgagtcc

SEQ ID NO: 109458 - DNA, 4309 bp, Homo sapiens
  Payload ID: 1494
  Gene Symbol: ACLY
  Gene Name: ATP citrate lyase
  Uniprot ID: P53396
  ENST ID: ENST00000590151
  CDS Start-End: 111-3416
agctaccggctgctggggtgctccggattttgcggggttcgtcgggcctgtggaagaagcgccgcgcacggacttcggcagagacaggtagagcaggtctctctgcagccatgtcggccaaggcaatttcagagcagacgggcaaagaactcctttacaagttcatctgtaccacctcagccatccagaatcggttcaagtatgctcgggtcactcctgacacagactgggcccgcttgctgcaggaccacccctggctgctcagccagaacttggtagtcaagccagaccagctgatcaaacgtcgtggaaaacttggtctcgttggggtcaacctcactctggatggggtcaagtcctggctgaagccacggctgggacaggaagccacagttggcaaggccacaggcttcctcaagaactttctgatcgagcccttcgtcccccacagtcaggctgaggagttctatgtctgcatctatgccacccgagaaggggactacgtcctgttccaccacgaggggggtgtggacgtgggtgatgtggacgccaaggcccagaagctgcttgttggcgtggatgagaaactgaatcctgaggacatcaaaaaacacctgttggtccacgcccctgaagacaagaaagaaattctggccagttttatctccggcctcttcaatttctacgaggacttgtacttcacctacctcgagatcaatccccttgtagtgaccaaagatggagtctatgtccttgacttggcggccaaggtggacgccactgccgactacatctgcaaagtgaagtggggtgacatcgagttccctccccccttcgggcgggaggcatatccagaggaagcctacattgcagacctcgatgccaaaagtggggcaagcctgaagctgaccttgctgaaccccaaagggaggatctggaccatggtggccgggggtggcgcctctgtcgtgtacagcgataccatctgtgatctagggggtgtcaacgagctggcaaactatggggagtactcaggcgcccccagcgagcagcagacctatgactatgccaagactatcctctccctcatgacccgagagaagcacccagatggcaagatcctcatcattggaggcagcatcgcaaacttcaccaacgtggctgccacgttcaagggcatcgtgagagcaattcgagattaccagggccccctgaaggagcacgaagtcacaatctttgtccgaagaggtggccccaactatcaggagggcttacgggtgatgggagaagtcgggaagaccactgggatccccatccatgtctttggcacagagactcacatgacggccattgtgggcatggccctgggccaccggcccatccccaaccagccacccacagcggcccacactgcaaacttcctcctcaacgccagcgggagcacatcgacgccagcccccagcaggacagcatctttttctgagtccagggccgatgaggtggcgcctgcaaagaaggccaagcctgccatgccacaagattcagtcccaagtccaagatccctgcaaggaaagagcaccaccctcttcagccgccacaccaaggccattgtgtggggcatgcagacccgggccgtgcaaggcatgctggactttgactatgtctgctcccgagacgagccctcagtggctgccatggtctaccctttcactggggaccacaagcagaagttttactgggggcacaaagagatcctgatccctgtcttcaagaacatggctgatgccatgaggaagcatccggaggtagatgtgctcatcaactttgcctctctccgctctgcctatgacagcaccatggagaccatgaactatgcccagatccggaccatcgccatcatagctgaaggcatccctgaggccctcacgagaaagctgatcaagaaggcggaccagaagggagtgaccatcatcggacctgccactgttggaggcatcaagcctgggtgctttaagattggcaacacaggtgggatgctggacaacatcctggcctccaaactgtaccgcccaggcagcgtggcctatgtctcacgttccggaggcatgtccaacgagctcaacaatatcatctctcggaccacggatggcgtctatgagggcgtggccattggtggggacaggtacccgggctccacattcatggatcatgtgttacgctatcaggacactccaggagtcaaaatgattgtggttcttggagagattgggggcactgaggaatataagatttgccggggcatcaaggagggccgcctcactaagcccatcgtctgctggtgcatcgggacgtgtgccaccatgttctcctctgaggtccagtttggccatgctggagcttgtgccaaccaggcttctgaaactgcagtagccaagaaccaggctttgaaggaagcaggagtgtttgtgccccggagctttgatgagcttggagagatcatccagtctgtatacgaagatctcgtggccaatggagtcattgtacctgcccaggaggtgccgcccccaaccgtgcccatggactactcctgggccagggagcttggtttgatccgcaaacctgcctcgttcatgaccagcatctgcgatgagcgaggacaggagctcatctacgcgggcatgcccatcactgaggtcttcaaggaagagatgggcattggcggggtcctcggcctcctctggttccagaaaaggttgcctaagtactcttgccagttcattgagatgtgtctgatggtgacagctgatcacgggccagccgtctctggagcccacaacaccatcatttgtgcgcgagctgggaaagacctggtctccagcctcacctcggggctgctcaccatcggggatcggtttgggggtgccttggatgcagcagccaagatgttcagtaaagcctttgacagtggcattatccccatggagtttgtgaacaagatgaagaaggaagggaagctgatcatgggcattggtcaccgagtgaagtcgataaacaacccagacatgcgagtgcagatcctcaaagattacgtcaggcagcacttccctgccactcctctgctcgattatgcactggaagtagagaagattaccacctcgaagaagccaaatcttatcctgaatgtagatggtctcatcggagtcgcatttgtagacatgcttagaaactgtgggtcctttactcgggaggaagctgatgaatatattgacattggagccctcaatggcatctttgtgctgggaaggagtatggggttcattggacactatcttgatcagaagaggctgaagcaggggctgtatcgtcatccgtgggatgatatttcatatgttcttccggaacacatgagcatgtaacagagccaggaaccctactgcagtaaactgaagacaagatctcttcccccaagaaaaagtgtacagacagctggcagtggagcctgctttatttagcaggggcctggaatgtaaacagccactggggtacaggcaccgaagaccaacatccacaggctaacaccccttcagtccacacaaagaagcttcatattttttttataagcatagaaataaaaaccaagccaatatttgtgactttgctctgctacctgctgtatttattatatggaagcatctaagtactgtcaggatggggtcttcctcattgtagggcgttaggatgttgctttctttttccattagttaaacatttttttctcctttggaggaagggaatgaaacatttatggcctcaagatactatacatttaaagcaccccaatgtctctctttttttttttttacttccctttcttcttccttatataacatgaagaacattgtattaatctgatttttaaagatctttttgtatgttacgtgttaagggcttgtttggtatcccactgaaatgttctgtgttgcagaccagagtctgtttatgtcagggggatggggccattgcatccttagccattgtcacaaaatatgtggagtagtaacttaatatgtaaagttgtaacatacatacatttaaaatggaaatgcagaaagctgtgaaatgtcttgtgtcttatgttctctgtatttatgcagctgatttgtctgtctgtaactgaagtgtgggtccaaggactcctaactactttgcatctgtaatccacaaagattctgggcagctgccacctcagtctcttctctgtattatcatagtctggtttaaataaactatatagtaacaatgaaggcat

SEQ ID NO: 109459 - DNA, 540 bp, Homo sapiens
  Payload ID: 1494
  Gene Symbol: ACLY
  Gene Name: ATP citrate lyase
  ENST ID: ENST00000592970
  CDS Start-End: 213-540
tctgccgcgcactgggccagggagtgatgattgcgtggctgacggctgggctggttagtgtttgctgttgcacgctctggcggttctctctggagttgctgcctgaaaaggctcccttgtaagacagccaagaaaacaggaagagggttggaggcaaagttccgaatagggatgaggcatacgtgacaggtagagcaggtctctctgcagccatgtcggccaaggcaatttcagagcagacgggcaaagaactcctttacaagttcatctgtaccacctcagccatccagaatcggttcaagtatgctcgggtcactcctgacacagactgggcccgcttgctgcaggaccacccctggctgctcagccagaacttggtagtcaagccagaccagctgatcaaacgtcgtggaaaacttggtctcgttggggtcaacctcactctggatggggtcaagtcctggctgaagccacggctgggacaggaagccacagttggcaaggccacaggcttcctcaagaactttctgatcgagccct

SEQ ID NO: 109460 - DNA, 1241 bp, Homo sapiens
  Payload ID: 1495
  Gene Symbol: ATPAF1
  Gene Name: ATP synthase mitochondrial F1 complex assembly factor 1
  ENST ID: ENST00000329231
  CDS Start-End: 37-888
ggtgccggagcgcgggcgcggcgcactcggagcgggatggagcgggcgcgcgggccgcgggccgaggccgacgcgcctgaggaggaggaggaggcgggggcggccatggctgctgtggtggtggcggctgcgggtggcgcgggaccggcggtcctgcaggtggccggtctctaccggggcctgtgcgcggtgcgcagccgcgccctgggcctggggctcgtgtcacccgcgcagctgcgcgtcttcccagtgcgccccggctcgggccggcccgaggggggcgccgacagcagcggggtcggggccgaggccgagctccaggccaaccctttctacgaccgctaccgcgacaagatccagctgctgcgcaggtcagacccagctgcttttgagtcccgcctggagaaacgcagtgaatttcggaagcagccagtggggcattccaggcaaggtgattttatcaaatgtgtggaacagaagacagatgccttggggaaacagtctgtgaacagaggattcactaaggacaagactctcagttcaatctttaacattgagatggtaaaagaaaaaactgcagaagaaataaaacagatttggcagcaatattttgcagcaaaagatacagtctacgcagttattcctgcagaaaagtttgatttgatctggaaccgggctcagtcctgtccaacaaatgttgctgaggcacagtgcatcgccaaccaagttcagctcttctacgctactgatcggaaagagacctacgggttagtggagacctttaacctcagaccaaatgagttcaaatatatgtctgtcatcgctgaattggagcaaagcggacttggagcagaactgaaatgtgcccagaaccaaaataagacttagaactgtacaggttggcccttcacctagttgactcagccctcgatagtctagagcccaccccctcctcaggaactcaagagctcagcatttataatgagcagttggtaatgagttgccctatgtgcttgtcgcaagcagtcacagagatgagccctattacttgatattcaggaacaaaggtacctgaacattctgataattatctcagcatacttgaggtttccttttttaagtgttcgaggttataacaagagacagccaaggacctacaagacagttgacttgattttgcacagtgtaacagcgcagttgcattctggccactttgaccttatagctcccaaatgatgagt

SEQ ID NO: 109461 - DNA, 1827 bp, Homo sapiens
  Payload ID: 1495
  Gene Symbol: ATPAF1
  Gene Name: ATP synthase mitochondrial F1 complex assembly factor 1
  ENST ID: ENST00000371937
  CDS Start-End: 37-1092
ggtgccggagcgcgggcgcggcgcactcggagcgggatggagcgggcgcgcgggccgcgggccgaggccgacgcgcctgaggaggaggaggaggcgggggcggccatggctgctgtggtggtggcggctgcgggtggcgcgggaccggcggtcctgcaggtggccggtctctaccggggcctgtgcgcggtgcgcagccgcgccctgggcctggggctcgtgtcacccgcgcagctgcgcgtcttcccagtgcgccccggctcgggccggcccgaggggggcgccgacagcagcggggtcggggccgaggccgagctccaggccaaccctttctacgaccgctaccgcgacaagatccagctgctgcgcaggtcagacccagctgcttttgagtcccgcctggagaaacgcagtgaatttcggaagcagccagtggggcattccaggcaaggtgattttatcaaatgtgtggaacagaagacagatgccttggggaaacagtctgtgaacagaggattcactaaggacaagactctcagttcaatctttaacattgagatggtaaaagaaaaaactgcagaagaaataaaacagatttggcagcaatattttgcagcaaaagatacagtctacgcagttattcctgcagaaaagtttgatttgatctggaaccgggctcagtcctgtccaacatttctatgtgctctgccaagaagggaaggttatgagttttttgtaggacaatggacaggtactgaactccacttcactgcacttataaatattcagacccgaggggaagctgcagccagccagctgattttatatcactatcctgaacttaaggaagaaaagggcatagtgctgatgactgcagaaatggattccacatttctgaatgttgctgaggcacagtgcatcgccaaccaagttcagctcttctacgctactgatcggaaagagacctacgggttagtggagacctttaacctcagaccaaatgagttcaaatatatgtctgtcatcgctgaattggagcaaagcggacttggagcagaactgaaatgtgcccagaaccaaaataagacttagaactgtacaggttggcccttcacctagttgactcagccctcgatagtctagagcccaccccctcctcaggaactcaagagctcagcatttataatgagcagttggtaatgagttgccctatgtgcttgtcgcaagcagtcacagagatgagccctattacttgatattcaggaacaaaggtacctgaacattctgataattatctcagcatacttgaggtttccttttttaagtgttcgaggttataacaagagacagccaaggacctacaagacagttgacttgattttgcacagtgtaacagcgcagttgcattctggccactttgaccttatagctcccaaatgatgagtttgtcatctttatgaactcatgacaggataataagcttgaagacctgctgtagttagatatgggctttaatccttcccaggcaccagtcagctgaacaaaagcataagccaaacatcctgtttaaactgtagaataaccagatattcccatcaggttaaagacttcatctagatgatgccccccagagatgcctttagtgtaagtagctggcttggggtatcagcaaatttcaggtatagttagataaacaggtacagggcctgcatactattaaaccatagtttgtggcacccgcttttctaactccacctgttagaagctatgtgtttgaaggaatgaatcagtgcagtataaataaaattcttttgtaaggagaagatt

SEQ ID NO: 109462 - DNA, 429 bp, Homo sapiens
  Payload ID: 1495
  Gene Symbol: ATPAF1
  Gene Name: ATP synthase mitochondrial F1 complex assembly factor 1
  ENST ID: ENST00000492233
  CDS Start-End: 1-342
tttctatgtgctctgccaagaagggaaggttatgagttttttgtaggacaatggacaggtactgaactccacttcactgcacttataaatattcagacccgaggggaagctgcagccagccagctgattttatatcactatcctgaacttaaggaagaaaagggcatagtgctgatgactgcagaaatggattccacatttctgaatgttgctgaggcacagtgcatcgccaaccaagttcagctcttctacgctactgatcggaaagagacctacggatgggcccagttattagccatacatagtacattgatacacctccaccagcgggtgaggaaatgatggaaaaaggagtaagaagtggccattcgttttaatcattcctcctggatttgtcctcagtccccaactgccaagtaggatgtgtcc

SEQ ID NO: 109463 - DNA, 693 bp, Homo sapiens
  Payload ID: 1495
  Gene Symbol: ATPAF1
  Gene Name: ATP synthase mitochondrial F1 complex assembly factor 1
  ENST ID: ENST00000534216
  CDS Start-End: 1-551
tggggaaacagtctgtgaacagaggattcactaaggacaagactctcagttcaatctttaacattgagatggtaaaagaaaaaactgcagaagaaataaaacaggcagaaaagtttgatttgatctggaaccgggctcagtcctgtccaacatttctatgtgctctgccaagaagggaaggttatgagttttttgtaggacaatggacaggtactgaactccacttcactgcacttataaatattcagacccgaggggaagctgcagccagccagctgattttatatcactatcctgaacttaaggaagaaaagggcatagtgctgatgactgcagaaatggattccacatttctgaatgttgctgaggcacagtgcatcgccaaccaagttcagctcttctacgctactgatcggaaagagacctacgggttagtggagacctttaacctcagaccaaatgagttcaaatatatgtctgtcatcgctgaattggagcaaagcggacttggagcagaactgaaatgtgcccagaaccaaaataagacttagaactgtacaggttggcccttcacctagttgactcagccctcgatagtctagagcccaccccctcctcaggaactcaagagctcagcatttataatgagcagttggtaatgagttgccctatgtgcttgtcgcaagcagtcac

SEQ ID NO: 109464 - DNA, 513 bp, Homo sapiens
  Payload ID: 1495
  Gene Symbol: ATPAF1
  Gene Name: ATP synthase mitochondrial F1 complex assembly factor 1
  ENST ID: ENST00000487193
  CDS Start-End: 1-259
agtgcgccccggctcgggccggcccgaggggggcgccgacagcagcggggtcggggccgaggccgagctccaggccaaccctttctacgaccgctaccgcgacaagatccagctgctgcgcaggtcagacccagctgcttttgagtcccgcctggagaaacgcagtgaatttcggaagcagccagtggggcattccaggcaaggtgattttatcaaatgtgtggaacagaaggatggtgcacagaacaaactggtgtaggagaggccagcgccagggagaatatggagtaatccaggtgtgggctgcagaagcctgaattaagacagatgccttggggaaacagtctgtgaacagaggattcactaaggacaagactctcagttcaatctttaacattgagatggtaaaagaaaaaactgcagaagaaataaaacagatttggcagcaatattttgcagcaaaagatacagtctacgcagttattcctgcagaaaagtttgatttgatctgga

SEQ ID NO: 109465 - DNA, 998 bp, Homo sapiens
  Payload ID: 1495
  Gene Symbol: ATPAF1
  Gene Name: ATP synthase mitochondrial F1 complex assembly factor 1
  Uniprot ID: Q5TC12
  ENST ID: ENST00000532925
  CDS Start-End: 208-930
agatgctaaatcttctgcaaaataggctacctaaagcctctgaatcaccaggatctgaataaagcagatgtttaacctggttggggggacatattttcaagaactggatgtattcaagtaaaagcttgacacctagtaaggaggctataggattcttgtctgaagaggtgatccagcaagatgacctcaaaattctaagtaccctgaatgtcagacccagctgcttttgagtcccgcctggagaaacgcagtgaatttcggaagcagccagtggggcattccaggcaaggtgattttatcaaatgtgtggaacagaagacagatgccttggggaaacagtctgtgaacagaggattcactaaggacaagactctcagttcaatctttaacattgagatggtaaaagaaaaaactgcagaagaaataaaacagatttggcagcaatattttgcagcaaaagatacagtctacgcagttattcctgcagaaaagtttgatttgatctggaaccgggctcagtcctgtccaacatttctatgtgctctgccaagaagggaaggttatgagttttttgtaggacaatggacaggtactgaactccacttcactgcacttataaatattcagacccgaggggaagctgcagccagccagctgattttatatcactatcctgaacttaaggaagaaaagggcatagtgctgatgactgcagaaatggattccacatttctgaatgttgctgaggcacagtgcatcgccaaccaagttcagctcttctacgctactgatcggaaagagacctacgggttagtggagacctttaacctcagaccaaatgagttcaaatatatgtctgtcatcgctgaattggagcaaagcggacttggagcagaactgaaatgtgcccagaaccaaaataagacttagaactgtacaggttggcccttcacctagttgactcagccctcgatagtctagagcccaccccctcctca

SEQ ID NO: 109466 - DNA, 1471 bp, Homo sapiens
  Payload ID: 1495
  Gene Symbol: ATPAF1
  Gene Name: ATP synthase mitochondrial F1 complex assembly factor 1
  ENST ID: ENST00000529214
  CDS Start-End: 208-345
agatgctaaatcttctgcaaaataggctacctaaagcctctgaatcaccaggatctgaataaagcagatgtttaacctggttggggggacatattttcaagaactggatgtattcaagtaaaagcttgacacctagtaaggaggctataggattcttgtctgaagaggtgatccagcaagatgacctcaaaattctaagtaccctgaatgtcagacccagctgcttttgagtcccgcctggagaaacgcagtgaatttcggaagcagccagtggggcattccaggcaaggtgattttatcaaatgtgtggaacagaaggatggtgcacagaacaaactggtgtaggagaggccagcgccagggagaatatggagtaatccaggtgtgggctgcagaagcctgaattaagacagatgccttggggaaacagtctgtgaacagaggattcactaaggacaagactctcagttcaatctttaacattgagatggtaaaagaaaaaactgcagaagaaataaaacagatttggcagcaatattttgcagcaaaagatacagtctacgcagttattcctgcagaaaagtttgatttgatctggaaccgggctcagtcctgtccaacatttctatgtgctctgccaagaagggaaggttatgagttttttgtaggacaatggacaggtactgaactccacttcactgcacttataaatattcagacccgaggggaagctgcagccagccagctgattttatatcactatcctgaacttaaggaagaaaagggcatagtgctgatgactgcagaaatggattccacatttctgaatgttgctgaggcacagtgcatcgccaaccaagttcagctcttctacgctactgatcggaaagagacctacgggttagtggagacctttaacctcagaccaaatgagttcaaatatatgtctgtcatcgctgaattggagcaaagcggacttggagcagaactgaaatgtgcccagaaccaaaataagacttagaactgtacaggttggcccttcacctagttgactcagccctcgatagtctagagcccaccccctcctcaggaactcaagagctcagcatttataatgagcagttggtaatgagttgccctatgtgcttgtcgcaagcagtcacagagatgagccctattacttgatattcaggaacaaaggtacctgaacattctgataattatctcagcatacttgaggtttccttttttaagtgttcgaggttataacaagagacagccaaggacctacaagacagttgacttgattttgcacagtgtaacagcgcagttgcattctggccactttgaccttatagctcccaaatgatgagtttgtcatctttatgaactcatgacaggataataagcttgaagacctgctgtagttagatatgggctttaatccttcccaggcaccagtcagctgaac

SEQ ID NO: 109467 - DNA, 1222 bp, Homo sapiens
  Payload ID: 1495
  Gene Symbol: ATPAF1
  Gene Name: ATP synthase mitochondrial F1 complex assembly factor 1
  ENST ID: ENST00000526821
  CDS Start-End: 1-525
ctgatcaggtcagacccagctgcttttgagtcccgcctggagaaacgcagtgaatttcggaagcagccagtggggcattccaggcaaggtgattttatcaaatgtgtggaacagaagacagatgccttggggaaacagtctgtgaacagaggattcactaaggacaagactctcagttcaatctttaacattgagatggtaaaagaaaaaactgcagaagaaataaaacagatttggcagcaatattttgcagcaaaagatacagtctacgcagttattcctgcagaaaagtttgatttgatctggaaccgggctcagtcctgtccaacaaatgttgctgaggcacagtgcatcgccaaccaagttcagctcttctacgctactgatcggaaagagacctacgggttagtggagacctttaacctcagaccaaatgagttcaaatatatgtctgtcatcgctgaattggagcaaagcggacttggagcagaactgaaatgtgcccagaaccaaaataagacttagaactgtacaggttggcccttcacctagttgactcagccctcgatagtctagagcccaccccctcctcaggaactcaagagctcagcatttataatgagcagttggtaatgagttgccctatgtgcttgtcgcaagcagtcacagagatgagccctattacttgatattcaggaacaaaggtacctgaacattctgataattatctcagcatacttgaggtttccttttttaagtgttcgaggttataacaagagacagccaaggacctacaagacagttgacttgattttgcacagtgtaacagcgcagttgcattctggccactttgaccttatagctcccaaatgatgagtttgtcatctttatgaactcatgacaggataataagcttgaagacctgctgtagttagatatgggctttaatccttcccaggcaccagtcagctgaacaaaagcataagccaaacatcctgtttaaactgtagaataaccagatattcccatcaggttaaagacttcatctagatgatgccccccagagatgcctttagtgtaagtagctggcttggggtatcagcaaatttcaggtatagttagataaacaggtacagggcctgcatactattaaaccatagtttgtggcacccgcttttctaactccacctgttagaagctatgtgtttgaaggaatgaatca

SEQ ID NO: 109468 - DNA, 1779 bp, Homo sapiens
  Payload ID: 1495
  Gene Symbol: ATPAF1
  Gene Name: ATP synthase mitochondrial F1 complex assembly factor 1
  Uniprot ID: Q5TC12
  ENST ID: ENST00000542495
  CDS Start-End: 511-1044
gagggtaggttagggagatactcagatgctaaatcttctgcaaaataggctacctaaagcctctgaatcaccaggatctgaataaagcagatgtttaacctggttggggggacatattttcaagaactggatgtattcaagtaaaagcttgacacctagtaaggaggctataggattcttgtctgaagaggtgatccagcaagatgacctcaaaattctaagtaccctgaatgtcagacccagctgcttttgagtcccgcctggagaaacgcagtgaatttcggaagcagccagtggggcattccaggcaaggtgattttatcaaatgtgtggaacagaaggatggtgcacagaacaaactggtgtaggagaggccagcgccagggagaatatggagtaatccaggtgtgggctgcagaagcctgaattaagacagatgccttggggaaacagtctgtgaacagaggattcactaaggacaagactctcagttcaatctttaacattgagatggtaaaagaaaaaactgcagaagaaataaaacagatttggcagcaatattttgcagcaaaagatacagtctacgcagttattcctgcagaaaagtttgatttgatctggaaccgggctcagtcctgtccaacatttctatgtgctctgccaagaagggaaggttatgagttttttgtaggacaatggacaggtactgaactccacttcactgcacttataaatattcagacccgaggggaagctgcagccagccagctgattttatatcactatcctgaacttaaggaagaaaagggcatagtgctgatgactgcagaaatggattccacatttctgaatgttgctgaggcacagtgcatcgccaaccaagttcagctcttctacgctactgatcggaaagagacctacgggttagtggagacctttaacctcagaccaaatgagttcaaatatatgtctgtcatcgctgaattggagcaaagcggacttggagcagaactgaaatgtgcccagaaccaaaataagacttagaactgtacaggttggcccttcacctagttgactcagccctcgatagtctagagcccaccccctcctcaggaactcaagagctcagcatttataatgagcagttggtaatgagttgccctatgtgcttgtcgcaagcagtcacagagatgagccctattacttgatattcaggaacaaaggtacctgaacattctgataattatctcagcatacttgaggtttccttttttaagtgttcgaggttataacaagagacagccaaggacctacaagacagttgacttgattttgcacagtgtaacagcgcagttgcattctggccactttgaccttatagctcccaaatgatgagtttgtcatctttatgaactcatgacaggataataagcttgaagacctgctgtagttagatatgggctttaatccttcccaggcaccagtcagctgaacaaaagcataagccaaacatcctgtttaaactgtagaataaccagatattcccatcaggttaaagacttcatctagatgatgccccccagagatgcctttagtgtaagtagctggcttggggtatcagcaaatttcaggtatagttagataaacaggtacagggcctgcatactattaaaccatagtttgtggcacccgcttttctaactccacctgttagaagctatgtgtttgaaggaatgaatcagtgcagtataaataaaattcttttgtaaggagaagatt

SEQ ID NO: 109469 - DNA, 1760 bp, Homo sapiens
  Payload ID: 1495
  Gene Symbol: ATPAF1
  Gene Name: ATP synthase mitochondrial F1 complex assembly factor 1
  Uniprot ID: Q5TC12
  ENST ID: ENST00000574428
  CDS Start-End: 43-1029
gaggccgacgcgcctgaggaggaggaggaggcgggggcggccatggctgctgtggtggtggcggctgcgggtggcgcgggaccggcggtcctgcaggtggccggtctctaccggggcctgtgcgcggtgcgcagccgcgccctgggcctggggctcgtgtcacccgcgcagctgcgcgtcttcccagtgcgccccggctcgggccggcccgaggggggcgccgacagcagcggggtcggggccgaggccgagctccaggccaaccctttctacgaccgctaccgcgacaagatccagctgctgcgcaggtcagacccagctgcttttgagtcccgcctggagaaacgcagtgaatttcggaagcagccagtggggcattccaggcaaggtgattttatcaaatgtgtggaacagaagacagatgccttggggaaacagtctgtgaacagaggattcactaaggacaagactctcagttcaatctttaacattgagatggtaaaagaaaaaactgcagaagaaataaaacagatttggcagcaatattttgcagcaaaagatacagtctacgcagttattcctgcagaaaagtttgatttgatctggaaccgggctcagtcctgtccaacatttctatgtgctctgccaagaagggaaggttatgagttttttgtaggacaatggacaggtactgaactccacttcactgcacttataaatattcagacccgaggggaagctgcagccagccagctgattttatatcactatcctgaacttaaggaagaaaagggcatagtgctgatgactgcagaaatggattccacatttctgaatgttgctgaggcacagtgcatcgccaaccaagttcagctcttctacgctactgatcggaaagagacctacgggttagtggagacctttaacctcagaccaaatgagttcaaatatatgtctgtcatcgctgaattggagcaaagcggacttggagcagaactgaaatgtgcccagaaccaaaataagacttagaactgtacaggttggcccttcacctagttgactcagccctcgatagtctagagcccaccccctcctcaggaactcaagagctcagcatttataatgagcagttggtaatgagttgccctatgtgcttgtcgcaagcagtcacagagatgagccctattacttgatattcaggaacaaaggtacctgaacattctgataattatctcagcatacttgaggtttccttttttaagtgttcgaggttataacaagagacagccaaggacctacaagacagttgacttgattttgcacagtgtaacagcgcagttgcattctggccactttgaccttatagctcccaaatgatgagtttgtcatctttatgaactcatgacaggataataagcttgaagacctgctgtagttagatatgggctttaatccttcccaggcaccagtcagctgaacaaaagcataagccaaacatcctgtttaaactgtagaataaccagatattcccatcaggttaaagacttcatctagatgatgccccccagagatgcctttagtgtaagtagctggcttggggtatcagcaaatttcaggtatagttagataaacaggtacagggcctgcatactattaaaccatagtttgtggcacccgcttttctaactccacctgttagaagctatgtgtttgaaggaatgaatcagtgcagtataaataaaattcttttgtaaggagaa

SEQ ID NO: 109470 - DNA, 4158 bp, Homo sapiens
  Payload ID: 1495
  Gene Symbol: ATPAF1
  Gene Name: ATP synthase mitochondrial F1 complex assembly factor 1
  ENST ID: ENST00000576409
  CDS Start-End: 64-1119
cccggaaccttgggcgcgcggaacctcggtgccggagcgcgggcgcggcgcactcggagcgggatggagcgggcgcgcgggccgcgggccgaggccgacgcgcctgaggaggaggaggaggcgggggcggccatggctgctgtggtggtggcggctgcgggtggcgcgggaccggcggtcctgcaggtggccggtctctaccggggcctgtgcgcggtgcgcagccgcgccctgggcctggggctcgtgtcacccgcgcagctgcgcgtcttcccagtgcgccccggctcgggccggcccgaggggggcgccgacagcagcggggtcggggccgaggccgagctccaggccaaccctttctacgaccgctaccgcgacaagatccagctgctgcgcaggtcagacccagctgcttttgagtcccgcctggagaaacgcagtgaatttcggaagcagccagtggggcattccaggcaaggtgattttatcaaatgtgtggaacagaagacagatgccttggggaaacagtctgtgaacagaggattcactaaggacaagactctcagttcaatctttaacattgagatggtaaaagaaaaaactgcagaagaaataaaacagatttggcagcaatattttgcagcaaaagatacagtctacgcagttattcctgcagaaaagtttgatttgatctggaaccgggctcagtcctgtccaacatttctatgtgctctgccaagaagggaaggttatgagttttttgtaggacaatggacaggtactgaactccacttcactgcacttataaatattcagacccgaggggaagctgcagccagccagctgattttatatcactatcctgaacttaaggaagaaaagggcatagtgctgatgactgcagaaatggattccacatttctgaatgttgctgaggcacagtgcatcgccaaccaagttcagctcttctacgctactgatcggaaagagacctacgggttagtggagacctttaacctcagaccaaatgagttcaaatatatgtctgtcatcgctgaattggagcaaagcggacttggagcagaactgaaatgtgcccagaaccaaaataagacttagaactgtacaggttggcccttcacctagttgactcagccctcgatagtctagagcccaccccctcctcaggaactcaagagctcagcatttataatgagcagttggtaatgagttgccctatgtgcttgtcgcaagcagtcacagagatgagccctattacttgatattcaggaacaaaggtacctgaacattctgataattatctcagcatacttgaggtttccttttttaagtgttcgaggttataacaagagacagccaaggacctacaagacagttgacttgattttgcacagtgtaacagcgcagttgcattctggccactttgaccttatagctcccaaatgatgagtttgtcatctttatgaactcatgacaggataataagcttgaagacctgctgtagttagatatgggctttaatccttcccaggcaccagtcagctgaacaaaagcataagccaaacatcctgtttaaactgtagaataaccagatattcccatcaggttaaagacttcatctagatgatgccccccagagatgcctttagtgtaagtagctggcttggggtatcagcaaatttcaggtatagttagataaacaggtacagggcctgcatactattaaaccatagtttgtggcacccgcttttctaactccacctgttagaagctatgtgtttgaaggaatgaatcagtgcagtataaataaaattcttttgtaaggagaagattaatcctggtttgcatgatttttttaaaaacaactctaaacatgatacgaaaaagtggatgaaagcaaatgttcccagattggatgtggggaaaatatagcaataattttttttttaagtctggcttacaatgtttgttatacaaaataatgaaatctgagttatgtactgtccattgtgtcagggctatgggctgattttatcaaaactcatcttgggactgaaaaattgtttggaatgccagaaataagaaagttgttctccagagctggaaacccatctttcgtttgtagtgtcactgttgtggctccaagctcagtgataggaaaggacggtggttacacaccagccttctgaacccaaggcccccagtattgttgtcagctgcctttaccatggcatttctttctctttctttttttcctgagatgaagtcttgctctgtcttgcccaggctggagtacagtagcgtgatctcagctcgctgcaacctctacctccctggttcaagtgattctgctgcgtcagcctcctgaggagctaggattacaggcgcatgccaccatacctggcttatttttgtattgttgtagagacagggtttcactttgttggccaggctggctggtctcgaactcctggcctcaagtgatccaccaccttggcctcccaaagtgctgggattacaggtgtgagccaccgtgcctggcctgacatttctttattgatctaacatgctccactctgctgctcctgcctaagatctggttatatgacactgaatgtggtgagtgggaatttaagcagtattcgcagtttgtgtgtgtgtgttttcttccttccagaagaatttttataggttgggcctgtccctaagctctttaaatagggtggacatcccactattctctgagccgtgtctattttgttgcacctttgagtctatgtattgagagagacagatagtatttttttaaactggggaagctgctatcctttcactatttctctaaaggttgagctgttaactaatgtaaattctggacctgcttctggtcctggcagtttatcttttgagaaacttgagtcttatctgccctgccattttcattaaatgccttctgaccttctgaatgttttgggtcccaagaatttttgacatcagatggggttgtttttattggtatccagttatgtttgcttgtctttccagatgggcccagttattagccatacatagtacattgatacacctccaccagcgggtgaggaaatgatggaaaaaggagtaagaagtggccattcgttttaatcattcctcctggatttgtcctcagtccccaactgccaagtaggatgtgtccatggataaatgtgtggggcatgactaaagtaccacgtagctgttctttatatttatttacctagaaagatctggcaaagaactcaaagaaaattgtaccatttaatcagtaaatttgtcccctggtgctagcatggtgttatagaaagtggacaggctttagagttaagtgaatctgggttcatatgttagtgttgctattcattagctctatactgttgaacaaattgcttaaactatctaattttggggttttttttccatctaaaatagggataataatatctacctcataggattattgtgagaattaaattaacttcactatagtagaaaatatcaactaccatccttttctctacttcccttgcccctcattaaagactaatacaagttagcatttcagatgtgtagatcattctttattccagttaaaagaacaaactttatctcatcagttctgaaactttaagatgcagtagcatcacctaaagtgcttttaaaatgcagattctcaggcctcaaccgtacaccacccccccacacacgtactaaatcaagaatatgtgcagaaggtactgggaatctacttgttaatatgtgctccaaatgattctgatgtaggtaattagccagccacactttgagaaccactgccttatctattctttacaaaaatgtacattgccaggtctttctttcctgtggatgctaactataggatatttaggttcctctgttctttgtctcccatagtggccccctttgcaaactccaaatacattatatttatttattcttgtgtcttttttcccccactagactgtgagctccttgagggccaggacttatctctgttcgcagtgccaaggacatggcctggaccatagaagatactcagttttttgttgaataaataggtaatatggatttcaaccaaaa

SEQ ID NO: 109471 - DNA, 685 bp, Homo sapiens
  Payload ID: 1496
  Gene Symbol: ATPAF2
  Gene Name: ATP synthase mitochondrial F1 complex assembly factor 2
  ENST ID: ENST00000444058
  CDS Start-End: 70-685
gcgcaggaggcgcgcggcggcgacggcgcgccgtttcgcgtctcgcatcttcccagaccctcgggcgcgatgtggaggagctgcctccggctgcgggacgggggacgccgtctcctgaatcggccggcgggtggccccagcgcttctatgagtccggggccaaccatcccgtctccagcccgggcttacgccccgccgacagaaaggaagaggttttatcagaatgtcagcatcacacagggtgaaggtggctttgagataaacctggaccacaggaagctgaaaactccccaagccaagctctttaccgtccccagcgaggccctggccattgcagtggctactgagtgggattcccagcaggataccatcaagtactacaccatgcacctgaccacattgtgcaacacatcattggacaacccaacccagagaaacaaggatcagctgatccgggcagccgtgaagtttctggacaccgacaccatctgctacagggtggaggagcccgagacattagtggaacttcaaaggaatgagtgggatccaatcatcgaatgggctgagaaaagatacggcgtggagatcagctcctccaccagcataatgggacccagcatccctgccaaaactcgggaggtgctcgtcagccacctggcatcttacaacacatgggctttacaag

SEQ ID NO: 109472 - DNA, 1564 bp, Homo sapiens
  Payload ID: 1496
  Gene Symbol: ATPAF2
  Gene Name: ATP synthase mitochondrial F1 complex assembly factor 2
  Uniprot ID: Q8N5M1
  ENST ID: ENST00000474627
  CDS Start-End: 156-1025
atgcggaagatggcggcgtccaagggaggttgagggctctgaggaggcgttgagaggtttccgtacagcccgaccgtgcggctttggggatcccatcgctctgtgtttcctgctccaggtttcgcgtctcgcatcttcccagaccctcgggcgcgatgtggaggagctgcctccggctgcgggacgggggacgccgtctcctgaatcggccggcgggtggccccagcgcttctatgagtccggggccaaccatcccgtctccagcccgggcttacgccccgccgacagaaaggaagaggttttatcagaatgtcagcatcacacagggtgaaggtggctttgagataaacctggaccacaggaagctgaaaactccccaagccaagctctttaccgtccccagcgaggccctggccattgcagtggctactgagtgggattcccagcaggataccatcaagtactacaccatgcacctgaccacattgtgcaacacatcattggacaacccaacccagagaaacaaggatcagctgatccgggcagccgtgaagtttctggacaccgacaccatctgctacagggtggaggagcccgagacattagtggaacttcaaaggaatgagtgggatccaatcatcgaatgggctgagaaaagatacggcgtggagatcagctcctccaccagcataatgggacccagcatccctgccaaaactcgggaggtgctcgtcagccacctggcatcttacaacacatgggctttacaagggattgagtttgtagctgcccagctcaagtccatggtgctaaccttgggcctgattgacctgcgcctgacagtggagcaggccgtgctgctgtcacgcctggaggaggagtaccagatccagaagtggggcaacattgagtgggcccatgactatgagctgcaggagctgcgggcccgcaccgccgccggcaccctcttcatccatctctgctccgagagcaccacagtcaagcacaagctcctgaaggagtgaggcctgggcagagcacactcagcaggatagaggcagtgcagccacagctcccccggccttcagggctccccagcctgtggggctggcttccttggcttttggggactcggcctcagcgtcaccctgagattccccccgagacacagtgcgctagtacggctgtccggaggtcagcctgatttcaacccaggtgcccctggcctggccagcagtgaatgtaggagatgaattgtgcaagtgactttctctcgactctgattttattaaatatttctccaccctggaaatgtgctgagccctgttttcacgtatgcctctgcacttctccattcttcctgttttgtctaggttccagagggttaaacagcttatctcccatggcgtgtttggatatctgctgcctgtggtcaggaaccttgcactggggaaacaatcatgtaatccacagacaactctatttgtgttcttcagcctcagcctgaaggcttttttttggctggcttttaatcaaacaatcttttgaaacaattgtggtctaa

SEQ ID NO: 109473 - DNA, 1298 bp, Homo sapiens
  Payload ID: 1496
  Gene Symbol: ATPAF2
  Gene Name: ATP synthase mitochondrial F1 complex assembly factor 2
  ENST ID: ENST00000584205
  CDS Start-End: 156-479
atgcggaagatggcggcgtccaagggaggttgagggctctgaggaggcgttgagaggtttccgtacagcccgaccgtgcggctttggggatcccatcgctctgtgtttcctgctccaggtttcgcgtctcgcatcttcccagaccctcgggcgcgatgtggaggagctgcctccggctgcgggacgggggacgccgtctcctgaatcggccggcgggtggccccagcgcttctatgagtccggggccaaccatcccgtctccagcccgggcttacgccccgccgacagaaaggaagaggttttatcagaatgtcagcatcacacagggtgaagaccacattgtgcaacacatcattggacaacccaacccagagaaacaaggatcagctgatccgggcagccgtgaagtttctggacaccgacaccatctgctacagggtggaggagcccgagacattagtggaacttcaaaggaatgagtgggatccaatcatcgaatgggctgagaaaagcttcctgaagccacctctcaaaccagccacctgcgtgcaagtccctgccttacctctgcttccagccagtttggggccagcttctcttacctgcaggacaccggcttcttgtctccttgtgccttgactatgggggtgtgtgctggtcactccaaagggaccacatctcgtctgtctctgttcccagtgagcacaggacatacgcccaacactaacagaatccggagcgtcgtggatattcaaatgatgaagacactaagtatgacgctttacaaacatctgtgctgctcctatgccttgtaacccaggtaggccctaatgctgatgtgggaacctcgaccgtggactttgcatggaatcctggggcttgaagatggagcagagaaagccagggagggcccaccctggccaccacccctgaaccttggatacatactccgaaagtccagctgcagggacaggacatccttgaagaggatgccctcctgcttggccagctgcccggcctcctcctgggggccctggtccccgacggccagcttgagcatgtcatcgtccatcaccctcggctccatcgagttgcacggctggttcatcttcccccacgttttccctaaaaaacaccgcattcttccttcacggcctgcttctttctctgtttgagggcagggtctggctgaggtttccccctgtagtgtcttgtggccactggcactctgaggaatgccccacgcccagccctgggtctgctgcatctcggggtttgtatacttacgccaaggctgc

SEQ ID NO: 109474 - DNA, 566 bp, Homo sapiens
  Payload ID: 1496
  Gene Symbol: ATPAF2
  Gene Name: ATP synthase mitochondrial F1 complex assembly factor 2
  ENST ID: ENST00000585101
  CDS Start-End: 156-479
atgcggaagatggcggcgtccaagggaggttgagggctctgaggaggcgttgagaggtttccgtacagcccgaccgtgcggctttggggatcccatcgctctgtgtttcctgctccaggtttcgcgtctcgcatcttcccagaccctcgggcgcgatgtggaggagctgcctccggctgcgggacgggggacgccgtctcctgaatcggccggcgggtggccccagcgcttctatgagtccggggccaaccatcccgtctccagcccgggcttacgccccgccgacagaaaggaagaggttttatcagaatgtcagcatcacacagggtgaagaccacattgtgcaacacatcattggacaacccaacccagagaaacaaggatcagctgatccgggcagccgtgaagtttctggacaccgacaccatctgctacagggtggaggagcccgagacattagtggaacttcaaaggaatgagtgggatccaatcatcgaatgggctgagaaaagggaggatttccatgtcagctagaaaagttcatccagcctgctaggatggcttgg

SEQ ID NO: 109475 - DNA, 1737 bp, Homo sapiens
  Payload ID: 1496
  Gene Symbol: ATPAF2
  Gene Name: ATP synthase mitochondrial F1 complex assembly factor 2
  ENST ID: ENST00000462733
  CDS Start-End: 63-386
catcgctctgtgtttcctgctccaggtttcgcgtctcgcatcttcccagaccctcgggcgcgatgtggaggagctgcctccggctgcgggacgggggacgccgtctcctgaatcggccggcgggtggccccagcgcttctatgagtccggggccaaccatcccgtctccagcccgggcttacgccccgccgacagaaaggaagaggttttatcagaatgtcagcatcacacagggtgaagaccacattgtgcaacacatcattggacaacccaacccagagaaacaaggatcagctgatccgggcagccgtgaagtttctggacaccgacaccatctgctacagggtggaggagcccgagacattagtggaacttcaaaggaatgagtgggatccaatcatcgaatgggctgagaaaagggattgagtttgtagctgcccagctcaagtccatggtgctaaccttgggcctgattgacctgcgcctgacagtggagcaggccgtgctgctgtcacgcctggaggaggagtaccagggaggatttccatgtcagctagaaaagttcatccagcctgctaggatggcttgggattgactcaccctgtctattaaacgtgtacaccaagagttgattctggtcaccagctcatcttctcgattgtcaatcttcaggaggtggatgtcgtgcgatgccccgacagcattaacaatcgtatctttatcgacaaaaagctggtgagtgaaaagaatccaatgagaaagtgtgtgtcattataccgtgaacacaaagggagctgaacagagaaggagcatttggaagtcccctggctgtgcaggccacactcagagcagagcccacctttgtatcagcgcactctgccgattcatctgtgaattcatctgtgacagccgcttccccaactgcacagggcaggtgttgtggggaaagggccaaccagggtgttactttgcagtccccgctggaagcatgtttcctccagggtgaaggcagatggctgcccagggggcacctcacccaggacatctgttctcacaatgcttctctctcaattactctcaagtctaacttgcccaaaacctctgcctgctgggtggaagcatgaggctggctgagggtctcgaggctgctctgaagacagcaggccctacaaactcatgggtgttcaccccacagttgtctctccactgccactcatgtcaacaaaaccaaactttggattccatttggagtatccttctgccttctcttgttcctgactttgctgtcttgtaaaaagttgttagaaacaaccaccttctaataggcctcactggttctaggtgttgacactgtggctattgttgcctgggatggttgaaatggagtcatttcccagagcagggcaaggccactgaagcactcagtaagcagttgcttccaccttgaagcagaggcgcttggtaaggcagagcacctgaatgctctgtattgcagggaggatttgcaagtggagtgtgcattttttgttctttcctgtagtggcagttaacttaatggtctctaaaacgttctgtgcaatcttaagatgttaatatttctgccaaaaaaagtattctttggtcaaatacatttgggaaagccagcacatcctaggcccctcctaaagatttgctgggcacaaagtattctgaaggctctacaaagtcctgtggaaaataaaccctttaagctttgtc

SEQ ID NO: 109476 - DNA, 471 bp, Homo sapiens
  Payload ID: 1496
  Gene Symbol: ATPAF2
  Gene Name: ATP synthase mitochondrial F1 complex assembly factor 2
  ENST ID: ENST00000581698
  CDS Start-End: 1-178
acttcaaaggaatgagtgggatccaatcatcgaatgggctgagaaaagatccagaagtggggcaacattgagtgggcccatgactatgagctgcaggagctgcgggcccgcaccgccgccggcaccctcttcatccatctctgctccgagagcaccacagtcaagcacaagctcctgaaggagtgaggcctgggcagagcacactcagcaggatagaggcagtgcagccacagctcccccggccttcagggctccccagcctgtggggctggcttccttggcttttggggactcggcctcagcgtcaccctgagattccccccgagacacagtgcgctagtacggctgtccggaggtcagcctgatttcaacccaggtgcccctggcctggccagcagtgaatgtaggagatgaattgtgcaagtgactttctctcgactctgattttattaaatatttctccaccctgga

SEQ ID NO: 109477 - DNA, 1945 bp, Homo sapiens
  Payload ID: 1497
  Gene Symbol: ATP5A1
  Gene Name: ATP synthase, H+ transporting, mitochondrial F1 complex, alpha subunit 1, cardiac muscle
  Uniprot ID: P25705
  ENST ID: ENST00000282050
  CDS Start-End: 146-1807
tctggcattgcaagcctcgcttcgttgccacttcccagctcttcccgccttccgcggtataatcaacactacgagagatagagccgcctagaaccagtccggaggctgcggctgcagaagtaccgcctgcggagtaactgcaaagatgctgtccgtgcgcgttgctgcggccgtggtccgcgcccttcctcggcgggccggactggtctccagaaatgctttgggttcatctttcattgctgcaaggaacttccatgcctctaacactcatcttcaaaagactgggactgctgagatgtcctctattcttgaagagcgtattcttggagctgatacctctgttgatcttgaagaaactgggcgtgtcttaagtattggtgatggtattgcccgcgtacatgggctgaggaatgttcaagcagaagaaatggtagagttttcttcaggcttaaagggtatgtccttgaacttggaacctgacaatgttggtgttgtcgtgtttggaaatgataaactaattaaggaaggagatatagtgaagaggacaggagccattgtggacgttccagttggtgaggagctgttgggtcgtgtagttgatgcccttggtaatgctattgatggaaagggtccaattggttccaagacgcgtaggcgagttggtctgaaagcccccggtatcattcctcgaatttcagtgcgggaaccaatgcagactggcattaaggctgtggatagcttggtgccaattggtcgtggtcagcgtgaactgattattggtgaccgacagactgggaaaacctcaattgctattgacacaatcattaaccagaaacgtttcaatgatggatctgatgaaaagaagaagctgtactgtatttatgttgctattggtcaaaagagatccactgttgcccagttggtgaagagacttacagatgcagatgccatgaagtacaccattgtggtgtcggctacggcctcggatgctgccccacttcagtacctggctccttactctggctgttccatgggagagtattttagagacaatggcaaacatgctttgatcatctatgacgacttatccaaacaggctgttgcttaccgtcagatgtctctgttgctccgccgaccccctggtcgtgaggcctatcctggtgatgtgttctacctacactcccggttgctggagagagcagccaaaatgaacgatgcttttggtggtggctccttgactgctttgccagtcatagaaacacaggctggtgatgtgtctgcttacattccaacaaatgtcatttccatcactgacggacagatcttcttggaaacagaattgttctacaaaggtatccgccctgcaattaacgttggtctgtctgtatctcgtgtcggatccgctgcccaaaccagggctatgaagcaggtagcaggtaccatgaagctggaattggctcagtatcgtgaggttgctgcttttgcccagttcggttctgacctcgatgctgccactcaacaacttttgagtcgtggcgtgcgtctaactgagttgctgaagcaaggacagtattctcccatggctattgaagaacaagtggctgttatctatgcgggtgtaaggggatatcttgataaactggagcccagcaagattacaaagtttgagaatgctttcttgtctcatgtcgtcagccagcaccaagccttgttgggcactatcagggctgatggaaagatctcagaacaatcagatgcaaagctgaaagagattgtaacaaatttcttggctggatttgaagcttaaactcctgtggattcacatcaaataccagttcagttttgtcattgttctagtaaattagttccatttgtaaaagggttactctcatactccttatgtacagaaatcacatgaaaaataaaggttccataatgcatagtt

SEQ ID NO: 109478 - DNA, 5818 bp, Homo sapiens
  Payload ID: 1497
  Gene Symbol: ATP5A1
  Gene Name: ATP synthase, H+ transporting, mitochondrial F1 complex, alpha subunit 1, cardiac muscle
  Uniprot ID: P25705
  ENST ID: ENST00000398752
  CDS Start-End: 123-1784
ggggcagtacttccgggtcaggtgggccggctgtcttgaccttctttgcggctcggccattttgtcccagtcagtccggaggctgcggctgcagaagtaccgcctgcggagtaactgcaaagatgctgtccgtgcgcgttgctgcggccgtggtccgcgcccttcctcggcgggccggactggtctccagaaatgctttgggttcatctttcattgctgcaaggaacttccatgcctctaacactcatcttcaaaagactgggactgctgagatgtcctctattcttgaagagcgtattcttggagctgatacctctgttgatcttgaagaaactgggcgtgtcttaagtattggtgatggtattgcccgcgtacatgggctgaggaatgttcaagcagaagaaatggtagagttttcttcaggcttaaagggtatgtccttgaacttggaacctgacaatgttggtgttgtcgtgtttggaaatgataaactaattaaggaaggagatatagtgaagaggacaggagccattgtggacgttccagttggtgaggagctgttgggtcgtgtagttgatgcccttggtaatgctattgatggaaagggtccaattggttccaagacgcgtaggcgagttggtctgaaagcccccggtatcattcctcgaatttcagtgcgggaaccaatgcagactggcattaaggctgtggatagcttggtgccaattggtcgtggtcagcgtgaactgattattggtgaccgacagactgggaaaacctcaattgctattgacacaatcattaaccagaaacgtttcaatgatggatctgatgaaaagaagaagctgtactgtatttatgttgctattggtcaaaagagatccactgttgcccagttggtgaagagacttacagatgcagatgccatgaagtacaccattgtggtgtcggctacggcctcggatgctgccccacttcagtacctggctccttactctggctgttccatgggagagtattttagagacaatggcaaacatgctttgatcatctatgacgacttatccaaacaggctgttgcttaccgtcagatgtctctgttgctccgccgaccccctggtcgtgaggcctatcctggtgatgtgttctacctacactcccggttgctggagagagcagccaaaatgaacgatgcttttggtggtggctccttgactgctttgccagtcatagaaacacaggctggtgatgtgtctgcttacattccaacaaatgtcatttccatcactgacggacagatcttcttggaaacagaattgttctacaaaggtatccgccctgcaattaacgttggtctgtctgtatctcgtgtcggatccgctgcccaaaccagggctatgaagcaggtagcaggtaccatgaagctggaattggctcagtatcgtgaggttgctgcttttgcccagttcggttctgacctcgatgctgccactcaacaacttttgagtcgtggcgtgcgtctaactgagttgctgaagcaaggacagtattctcccatggctattgaagaacaagtggctgttatctatgcgggtgtaaggggatatcttgataaactggagcccagcaagattacaaagtttgagaatgctttcttgtctcatgtcgtcagccagcaccaagccttgttgggcactatcagggctgatggaaagatctcagaacaatcagatgcaaagctgaaagagattgtaacaaatttcttggctggatttgaagcttaaactcctgtggattcacatcaaataccagttcagttttgtcattgttctagtaaattagttccatttgtaaaagggttactctcatactccttatgtacagaaatcacatgaaaaataaaggttccataatgcatagttgttttctgtcatttgtgttattctttaaaaccaagatcaaattgagaaattggtaagcaaatgcttcttgatctattttacttgaatattggtacagtcaactgggctagataattcaaggctgagctctttgtaagttttttttttgtttttttttttgagactgattctcactctgtcactgaggctggagtgcagtggcaccctgtcggcccactgcaacctccgtctccgggttcaagcaattctcttgcctcagcctcccacgtagctgggattacaggtgcccaccaccacgcctggctagttttttagtatttttagtagagacggggtttcaccatgttggccaggccggtcacgaactcctgacctcaggtgatccacctgccttggcctacctaccacagtgctgggattacaggtgtgagccaccgcacccggctgctctttgtaagtttctagagtactttgtgtttaagagaaattcctaaactggatatatgtggcaggctgacaatactgaagagcatagctggcttctctgcccagaggatgtacctgcataaagaggtactgtaggcaggaaaataataggacagttaaaattctcagggaaatgaaaaaattgctggaacaaaagctgagaagatagaatgcataggattatgaaaacttgtcaatatctcttttgtttgttttgtgacagggtctccatctctctcacccaggctggagtacagtggtgtgatctcagctcactgcagcttctgccacctgggttcaattgattcttccacctcagcctcctgagtagctggggttacaggcacataccaccacgcccagccaatttttctactttttgtagagggagggtcttgccatgttgtccaggctgatgatgaactccttggctcaagtgatcctcctgccttggtctcccaaagtgctgggattacaggtgtgaactaccatgcccggccatcttttaatattttcacagctactttatttcctctgttactagcttttcatagcctttgctcattcttactgcattaaattttttttactgatttatttatttttttgagacagagtcttgctctgtcacctaggctggagagcagtggcgtaatctcagctcactgcacctttcacctcctgggttcaagcgattctcctgccttagcctcccaattagctgggaccacaggcccatgccaccacacccggctaacattttgtatttttagtagagacaaggtttcaccatgttggccatgctgctcttgagctcctgacctcgtggtctgcccgcctcagcttcccaaagtgctgggattacaggtgtgagccaccacgcccagcctactgatttatttatttacttttaatttttcatagcctttgctcattcttaatgtgttacctttttttttacttagttatttatttatttgagatggagtctccgtcgtccaggctggagtgcagtgacctgatcttggctcactgcaacctctgcctccaggttcaagcaattctcctgcctcagcctcccgagaagctggaactacaggcacccaccaccatgccctgctaatttttgtatttttagtagaggcggggtttcaccatattggccaggctggtctcgaactcctgaccttgtgatctgcctgccttggcctcccacagtgctgggattacaggtgtgagccaccacacctggccttttttttttttttttgagacggagtctcactgtctcccaggctggagtgcagtggtgcgatgtcggctcactgcaagctctgccccctgggtttgcgccgttctcctgcctcagcctcccgattagctggtactacaggcgcctgccatcacgcccagctaatttttttttttttgtatttttagtagagacggggtttcaccatgttcgccaggatggtctcgatctcctgacctcatgatccacttacctcggcctcccaaagtgctgggattacaggcttgagccaccgcgcccggcctcttttttttttttttttttttactgatatataaaggcttttgtctgtaagggtcatacatggtcatgttctaaaatatttttcctagggttcccccttccttgccattttattttgttgatggggatttgctgtaccgaaacttcattcttatccatctctctgtctccagtaagtcaaaatatatttacatatgtgggctccaatatctttggtaggaaaaggagagttcttaaagtactcataagtccttttcagtacttagaggaacactaaacttgatagcagttggtcatttctgatcaactcttgctttctagctacttgagaaataacttctagatctgattttccttttctgaaataaggaagttacttttagttagaaggttctgcacatttcgttttttttttttttttttttttttgttttttttttttgagagttttgctcttgttgcccaggctggagtgcaatggcacgatctcggctcaccacaaccaccgcctcctggggtcaagcaattctcctgcctcaggctcctgagtagctgggattacaggcatgcaccaccacgcctggctaattttgtatttttagtagagatggggtttctccatgttggtcaggctggtctcaaactcctgaccttaggtggtccaccggcctcccaaagtactgggattacaggggtgagccactgcgcccggcttgttggagcattttatacctagtgtcagtggtgattactactttggagaaaaatactttggctaatggattggaattaatttattactgggagtatgtattgtttgtttgttgactggatctcgtagcccactcctggcacgtaaatgctcaataaacttctcaaatgaagacaaccatgtttgtccattataaatcaaattccaaatgttaactactggtctggtctgatgagatttttttttttttttttttttttgagacggagttttgtttttgttgcccaggctggagtgcaatggcgcgatctcggctcactgcaacctccacctcctgggttcaagtgattctcctacctcagcctcctgagtagctgtgattataggtgtgcaccaccatgcctggctaatttttgtatttttagtagagacggggtttcaccatgttggccaggctggtttcgaactcctgaccttagatgatccacgtgcctcgacctcctaaagtgctgggattacaggcgtgagccactgtgcctggcccacgccaggcacagtgatatttaaaaatgtgatttttaaatatcacatttaaaaatatgtgatatttttaaagaatatgatagcccaggcgcagtggcttacgcctgtaatctcagcactttgggacgatcacttgagcccaggagtttgaaacaggctgcagtcagctatgatcacgccactgcactccagcctaggtgacagagaccctgactcttaaaaaaagttgtgctagaagacttcaagatctcccctaaaactgtatagtcctttccctggtgtttttgctgagctatagagtccagccctttctgttacagcaatgaaccatgagattcaaatactgctttttactaagtacttacagactaatgacataggagacctcataggcacctggctgtttttaaccaggcaggcctaaatacactgcccaagtggcccttctgtgtggcaacaaaatggctgtcataaaattgtgtctgtgtgcatttatcttatcactgggggtggtgaacatttgagaaggcacttgacctttgaaatgtgaagttttatggatttcagacttgtattttaaaaactatttgttaactgtaa

SEQ ID NO: 109479 - DNA, 807 bp, Homo sapiens
  Payload ID: 1497
  Gene Symbol: ATP5A1
  Gene Name: ATP synthase, H+ transporting, mitochondrial F1 complex, alpha subunit 1, cardiac muscle
  ENST ID: ENST00000590324
  CDS Start-End: 374-807
tctggcattgcaagcctcgcttcgttgccacttcccagctcttcccgccttccgcggtataatcaacactacgagagatagagccgcctagaaccaggtctccagaaatgctttgggttcatctttcattgctgcaaggaacttccatgcctctaacactcatcttcaaaagactgtagagatgggattttgctgtgttggccaggctggtccaaactcttggcctcaagtggtccgcccgcctcccaaagtgctggtattactggcgtgagccactgcacccaacccctgtatgctaagatgaagaataccacctatactaccctgtgtgccttgaaagagaaagacacactttgttaacaggactgctgagatgtcctctattcttgaagagcgtattcttggagctgatacctctgttgatcttgaagaaactgggcgtgtcttaagtattggtgatggtattgcccgcgtacatgggctgaggaatgttcaagcagaagaaatggtagagttttcttcaggcttaaagggtatgtccttgaacttggaacctgacaatgttggtgttgtcgtgtttggaaatgataaactaattaaggaaggagatatagtgaagaggacaggagccattgtggacgttccagttggtgaggagctgttgggtcgtgtagttgatgcccttggtaatgctattgatggaaagggtccaattggttccaagacgcgtaggcgagttggtctgaaagcccccggtatcattcctcgaatttcagtgcgggaaccaatgcagactggcattaaggc

SEQ ID NO: 109480 - DNA, 2258 bp, Homo sapiens
  Payload ID: 1497
  Gene Symbol: ATP5A1
  Gene Name: ATP synthase, H+ transporting, mitochondrial F1 complex, alpha subunit 1, cardiac muscle
  Uniprot ID: P25705
  ENST ID: ENST00000593152
  CDS Start-End: 609-2120
ggggcagtacttccgggtcaggtgggccggctgtcttgaccttctttgcggctcggccattttgtcccagtcagtccggaggctgcggctgcagaagtaccgcctgcggagtaactgcaaagatgctgtccgtgcgcgttgctgcggccgtggtccgcgcccttcctcggcgggccggactggtgagcaccgaaggccggcatgatgcaggcggccgggtggggctgcagggtggtggtgcgccggctcgggcgctctctgcaggagggcgaggggctgtggcgaatgccgccatcttgcacccgtggcttctccggctggacagagcaggcgacacaggtgcccttttgctcgtcacctgcgcagaggcagaatggtacagggcagacagttaactcgatggtgtccagagacagggcctcaagattcctgtcttcggctgacagcggccctagaagggggatcttgggtgaaggtcagggcttgggcgctagctctccgaggcctgttctgaatcggtctccagaaatgctttgggttcatctttcattgctgcaaggaacttccatgcctctaacactcatcttcaaaagactgggactgctgagatgtcctctattcttgaagagcgtattcttggagctgatacctctgttgatcttgaagaaactgggcgtgtcttaagtattggtgatggtattgcccgcgtacatgggctgaggaatgttcaagcagaagaaatggtagagttttcttcaggcttaaagggtatgtccttgaacttggaacctgacaatgttggtgttgtcgtgtttggaaatgataaactaattaaggaaggagatatagtgaagaggacaggagccattgtggacgttccagttggtgaggagctgttgggtcgtgtagttgatgcccttggtaatgctattgatggaaagggtccaattggttccaagacgcgtaggcgagttggtctgaaagcccccggtatcattcctcgaatttcagtgcgggaaccaatgcagactggcattaaggctgtggatagcttggtgccaattggtcgtggtcagcgtgaactgattattggtgaccgacagactgggaaaacctcaattgctattgacacaatcattaaccagaaacgtttcaatgatggatctgatgaaaagaagaagctgtactgtatttatgttgctattggtcaaaagagatccactgttgcccagttggtgaagagacttacagatgcagatgccatgaagtacaccattgtggtgtcggctacggcctcggatgctgccccacttcagtacctggctccttactctggctgttccatgggagagtattttagagacaatggcaaacatgctttgatcatctatgacgacttatccaaacaggctgttgcttaccgtcagatgtctctgttgctccgccgaccccctggtcgtgaggcctatcctggtgatgtgttctacctacactcccggttgctggagagagcagccaaaatgaacgatgcttttggtggtggctccttgactgctttgccagtcatagaaacacaggctggtgatgtgtctgcttacattccaacaaatgtcatttccatcactgacggacagatcttcttggaaacagaattgttctacaaaggtatccgccctgcaattaacgttggtctgtctgtatctcgtgtcggatccgctgcccaaaccagggctatgaagcaggtagcaggtaccatgaagctggaattggctcagtatcgtgaggttgctgcttttgcccagttcggttctgacctcgatgctgccactcaacaacttttgagtcgtggcgtgcgtctaactgagttgctgaagcaaggacagtattctcccatggctattgaagaacaagtggctgttatctatgcgggtgtaaggggatatcttgataaactggagcccagcaagattacaaagtttgagaatgctttcttgtctcatgtcgtcagccagcaccaagccttgttgggcactatcagggctgatggaaagatctcagaacaatcagatgcaaagctgaaagagattgtaacaaatttcttggctggatttgaagcttaaactcctgtggattcacatcaaataccagttcagttttgtcattgttctagtaaattagttccatttgtaaaagggttactctcatactccttatgtacagaaatcacatgaaaaataaaggttccataatgcatagtt

SEQ ID NO: 109481 - DNA, 910 bp, Homo sapiens
  Payload ID: 1497
  Gene Symbol: ATP5A1
  Gene Name: ATP synthase, H+ transporting, mitochondrial F1 complex, alpha subunit 1, cardiac muscle
  ENST ID: ENST00000589869
  CDS Start-End: 289-910
gccgttggcacccgcccctcgccgggcccgggatttctgggagttgtggttttacctgagactcctggccgttgagcccctgtgcaaggctggtcgaaggctctggcattgcaagcctcgcttcgttgccacttcccagctcttcccgccttccgcggtataatcaacactacgagagatagagccgcctagaaccaggtctccagaaatgctttgggttcatctttcattgctgcaaggaacttccatgcctctaacactcatcttcaaaagactgggactgctgagatgtcctctattcttgaagagcgtattcttggagctgatacctctgttgatcttgaagaaactgggcgtgtcttaagtattggtgatggtattgcccgcgtacatgggctgaggaatgttcaagcagaagaaatggtagagttttcttcaggcttaaagggtatgtccttgaacttggaacctgacaatgttggtgttgtcgtgtttggaaatgataaactaattaaggaaggagatatagtgaagaggacaggagccattgtggacgttccagttggtgaggagctgttgggtcgtgtagttgatgcccttggtaatgctattgatggaaagggtccaattggttccaagacgcgtaggcgagttggtctgaaagcccccggtatcattcctcgaatttcagtgcgggaaccaatgcagactggcattaaggctgtggatagcttggtgccaattggtcgtggtcagcgtgaactgattattggtgaccgacagactgggaaaacctcaattgctattgacacaatcattaaccagaaacgtttcaatgatggatctgatgaaaagaagaagctgtactgtatttatgttgctattggtcaaaagagatccactgttgccc

SEQ ID NO: 109482 - DNA, 565 bp, Homo sapiens
  Payload ID: 1497
  Gene Symbol: ATP5A1
  Gene Name: ATP synthase, H+ transporting, mitochondrial F1 complex, alpha subunit 1, cardiac muscle
  ENST ID: ENST00000591981
  CDS Start-End: 66-200
cattttgtcccagtcagtccggaggctgcggctgcagaagtaccgcctgcggagtaactgcaaagatgctgtccgtgcgcgttgctgcggccgtggtccgcgcccttcctcggcgggccggactgaatacttttgcactaggtctccagaaatgctttgggttcatctttcattgctgcaaggaacttccatgcctctaacactcatcttcaaaagactgggactgctgagatgtcctctattcttgaagagcgtattcttggagctgatacctctgttgatcttgaagaaactgggcgtgtcttaagtattggtgatggtattgcccgcgtacatgggctgaggaatgttcaagcagaagaaatggtagagttttcttcaggcttaaagggtatgtccttgaacttggaacctgacaatgttggtgttgtcgtgtttggaaatgataaactaattaaggaaggagatatagtgaagaggacaggagccattgtggacgttccagttggtgaggagctgttgggtcgtgtagttgatgcccttggtaatgctattgatggaaagg

SEQ ID NO: 109483 - DNA, 2214 bp, Homo sapiens
  Payload ID: 1497
  Gene Symbol: ATP5A1
  Gene Name: ATP synthase, H+ transporting, mitochondrial F1 complex, alpha subunit 1, cardiac muscle
  ENST ID: ENST00000586592
  CDS Start-End: 85-357
accttctttgcggctcggccattttgtcccagtcagtccggaggctgcggctgcagaagtaccgcctgcggagtaactgcaaagatgctgtccgtgcgcgttgctgcggccgtggtccgcgcccttcctcggcgggccggactggtgagcaccgaaggccggcatgatgcaggcggccgggtggggctgcagggtggtggtgcgccggctcgggcgctctctgcaggagggcgaggggctgtggcgaatgccgccatcttgcacccgtggcttctccggctggacagagcaggcgacacaggtgcccttttgctcgtcacctgcgcagaggcagaatggtacagggcagacagttaactcgatggtgtccagagacagggcctcaagattcctgtcttcggctgacagcggccctagaagggggatcttgggtgaaggtcagggcttgggcgctagctctccgaggcctgttctgaatcggtctccagaaatgctttgggttcatctttcattgctgcaaggaacttccatgcctctaacactcatcttcaaaagactgggactgctgagatgtcctctattcttgaagagcgtattcttggagctgatacctctgttgatcttgaagaaactgggcgtgtcttaagtattggtgatggtattgcccgcgtacatgggctgaggaatgttcaagcagaagaaatggtagagttttcttcaggcttaaagggtatgtccttgaacttggaacctgacaatgttggtgttgtcgtgtttggaaatgataaactaattaaggaaggagatatagtgaagaggacaggagccattgtggacgttccagttggtgaggagctgttgggtcgtgtagttgatgcccttggtaatgctattgatggaaagggtccaattggttccaagacgcgtaggcgagttggtctgaaagcccccggtatcattcctcgaatttcagtgcgggaaccaatgcagactggcattaaggctgtggatagcttggtgccaattggtcgtggtcagcgtgaactgattattggtgaccgacagactgggaaaacctcaattgctattgacacaatcattaaccagaaacgtttcaatgatggatctgatgaaaagaagaagctgtactgtatttatgttgctattggtcaaaagagatccactgttgcccagttggtgaagagacttacagatgcagatgccatgaagtacaccattgtggtgtcggctacggcctcggatgctgccccacttcagtacctggctccttactctggctgttccatgggagagtattttagagacaatggcaaacatgctttgatcatctatgacgacttatccaaacaggctgttgcttaccgtcagatgtctctgttgctccgccgaccccctggtcgtgaggcctatcctggtgatgtgttctacctacactcccggttgctggagagagcagccaaaatgaacgatgcttttggtggtggctccttgactgctttgccagtcatagaaacacaggctggtgatgtgtctgcttacattccaacaaatgtcatttccatcactgacggacagatcttcttggaaacagaattgttctacaaaggtatccgccctgcaattaacgttggtctgtctgtatctcgtgtcggatccgctgcccaaaccagggctatgaagcaggtagcaggtaccatgaagctggaattggctcagtatcgtgaggttgctgcttttgcccagttcggttctgacctcgatgctgccactcaacaacttttgagtcgtggcgtgcgtctaactgagttgctgaagcaaggacagtattctcccatggctattgaagaacaagtggctgttatctatgcgggtgtaaggggatatcttgataaactggagcccagcaagattacaaagtttgagaatgctttcttgtctcatgtcgtcagccagcaccaagccttgttgggcactatcagggctgatggaaagatctcagaacaatcagatgcaaagctgaaagagattgtaacaaatttcttggctggatttgaagcttaaactcctgtggattcacatcaaataccagttcagttttgtcattgttctagtaaattagttccatttgtaaaagggttactctcatactccttatgtacagaaatcacatgaaaaataaaggttccataatgc

SEQ ID NO: 109484 - DNA, 1931 bp, Homo sapiens
  Payload ID: 1497
  Gene Symbol: ATP5A1
  Gene Name: ATP synthase, H+ transporting, mitochondrial F1 complex, alpha subunit 1, cardiac muscle
  ENST ID: ENST00000590156
  CDS Start-End: 65-241
attttgtcccagtcagtccggaggctgcggctgcagaagtaccgcctgcggagtaactgcaaagatgctgtccgtgcgcgttgctgcggccgtggtccgcgcccttcctcggcgggccggactggtctccagaaatgctttgggttcatctttcattgctgcaaggaacttccatgcctctaacactcatcttcaaaagactggtaagttattatttctcagtctacgccgcacttactagatgaagatataaattacatacatcgtataactgtgggactgctgagatgtcctctattcttgaagagcgtattcttggagctgatacctctgttgatcttgaagaaactgggcgtgtcttaagtattggtgatggtattgcccgcgtacatgggctgaggaatgttcaagcagaagaaatggtagagttttcttcaggcttaaagggtatgtccttgaacttggaacctgacaatgttggtgttgtcgtgtttggaaatgataaactaattaaggaaggagatatagtgaagaggacaggagccattgtggacgttccagttggtgaggagctgttgggtcgtgtagttgatgcccttggtaatgctattgatggaaagggtccaattggttccaagacgcgtaggcgagttggtctgaaagcccccggtatcattcctcgaatttcagtgcgggaaccaatgcagactggcattaaggctgtggatagcttggtgccaattggtcgtggtcagcgtgaactgattattggtgaccgacagactgggaaaacctcaattgctattgacacaatcattaaccagaaacgtttcaatgatggatctgatgaaaagaagaagctgtactgtatttatgttgctattggtcaaaagagatccactgttgcccagttggtgaagagacttacagatgcagatgccatgaagtacaccattgtggtgtcggctacggcctcggatgctgccccacttcagtacctggctccttactctggctgttccatgggagagtattttagagacaatggcaaacatgctttgatcatctatgacgacttatccaaacaggctgttgcttaccgtcagatgtctctgttgctccgccgaccccctggtcgtgaggcctatcctggtgatgtgttctacctacactcccggttgctggagagagcagccaaaatgaacgatgcttttggtggtggctccttgactgctttgccagtcatagaaacacaggctggtgatgtgtctgcttacattccaacaaatgtcatttccatcactgacggacagatcttcttggaaacagaattgttctacaaaggtatccgccctgcaattaacgttggtctgtctgtatctcgtgtcggatccgctgcccaaaccagggctatgaagcaggtagcaggtaccatgaagctggaattggctcagtatcgtgaggttgctgcttttgcccagttcggttctgacctcgatgctgccactcaacaacttttgagtcgtggcgtgcgtctaactgagttgctgaagcaaggacagtattctcccatggctattgaagaacaagtggctgttatctatgcgggtgtaaggggatatcttgataaactggagcccagcaagattacaaagtttgagaatgctttcttgtctcatgtcgtcagccagcaccaagccttgttgggcactatcagggctgatggaaagatctcagaacaatcagatgcaaagctgaaagagattgtaacaaatttcttggctggatttgaagcttaaactcctgtggattcacatcaaataccagttcagttttgtcattgttctagtaaattagttccatttgtaaaagggttactctcatactccttatgtacagaaatcacatgaaaaataaaggttccataatgc

SEQ ID NO: 109485 - DNA, 662 bp, Homo sapiens
  Payload ID: 1497
  Gene Symbol: ATP5A1
  Gene Name: ATP synthase, H+ transporting, mitochondrial F1 complex, alpha subunit 1, cardiac muscle
  ENST ID: ENST00000589252
  CDS Start-End: 65-662
attttgtcccagtcagtccggaggctgcggctgcagaagtaccgcctgcggagtaactgcaaagatgctgtccgtgcgcgttgctgcggccgtggtccgcgcccttcctcggcgggccggactggtctccagaaatgctttgggttcatctttcattgctgcaaggaacttccatgcctctaacactcatcttcaaaagactgccattgtggacgttccagttggtgaggagctgttgggtcgtgtagttgatgcccttggtaatgctattgatggaaagggtccaattggttccaagacgcgtaggcgagttggtctgaaagcccccggtatcattcctcgaatttcagtgcgggaaccaatgcagactggcattaaggctgtggatagcttggtgccaattggtcgtggtcagcgtgaactgattattggtgaccgacagactgggaaaacctcaattgctattgacacaatcattaaccagaaacgtttcaatgatggatctgatgaaaagaagaagctgtactgtatttatgttgctattggtcaaaagagatccactgttgcccagttggtgaagagacttacagatgcagatgccatgaagtacaccattgtggtgtcggctacggcctcggatgctgccccacttcagtacctgg

SEQ ID NO: 109486 - DNA, 1793 bp, Homo sapiens
  Payload ID: 1497
  Gene Symbol: ATP5A1
  Gene Name: ATP synthase, H+ transporting, mitochondrial F1 complex, alpha subunit 1, cardiac muscle
  Uniprot ID: P25705
  ENST ID: ENST00000590665
  CDS Start-End: 66-1661
cattttgtcccagtcagtccggaggctgcggctgcagaagtaccgcctgcggagtaactgcaaagatgctgtccgtgcgcgttgctgcggccgtggtccgcgcccttcctcggcgggccggactggtctccagaaatgctttgggttcatctttcattgctgcaaggaacttccatgcctctaacactcatcttcaaaagactgggactgctgagatgtcctctattcttgaagagcgtattcttggagctgatacctctgttgatcttgaagaaactgggcgtgtcttaagtattggtgatggtattgcccgcgtacatgggctgaggaatgttcaagcagaagaaatggtagagttttcttcaggcttaaagggtatgtccttgaacttggaacctgacaatgttggtgttgtcgtgtttggaaatgataaactaattaaggaaggagatatagtgaagaggacaggagccattgtggacggtccaattggttccaagacgcgtaggcgagttggtctgaaagcccccggtatcattcctcgaatttcagtgcgggaaccaatgcagactggcattaaggctgtggatagcttggtgccaattggtcgtggtcagcgtgaactgattattggtgaccgacagactgggaaaacctcaattgctattgacacaatcattaaccagaaacgtttcaatgatggatctgatgaaaagaagaagctgtactgtatttatgttgctattggtcaaaagagatccactgttgcccagttggtgaagagacttacagatgcagatgccatgaagtacaccattgtggtgtcggctacggcctcggatgctgccccacttcagtacctggctccttactctggctgttccatgggagagtattttagagacaatggcaaacatgctttgatcatctatgacgacttatccaaacaggctgttgcttaccgtcagatgtctctgttgctccgccgaccccctggtcgtgaggcctatcctggtgatgtgttctacctacactcccggttgctggagagagcagccaaaatgaacgatgcttttggtggtggctccttgactgctttgccagtcatagaaacacaggctggtgatgtgtctgcttacattccaacaaatgtcatttccatcactgacggacagatcttcttggaaacagaattgttctacaaaggtatccgccctgcaattaacgttggtctgtctgtatctcgtgtcggatccgctgcccaaaccagggctatgaagcaggtagcaggtaccatgaagctggaattggctcagtatcgtgaggttgctgcttttgcccagttcggttctgacctcgatgctgccactcaacaacttttgagtcgtggcgtgcgtctaactgagttgctgaagcaaggacagtattctcccatggctattgaagaacaagtggctgttatctatgcgggtgtaaggggatatcttgataaactggagcccagcaagattacaaagtttgagaatgctttcttgtctcatgtcgtcagccagcaccaagccttgttgggcactatcagggctgatggaaagatctcagaacaatcagatgcaaagctgaaagagattgtaacaaatttcttggctggatttgaagcttaaactcctgtggattcacatcaaataccagttcagttttgtcattgttctagtaaattagttccatttgtaaaagggttactctcatactccttatgtacagaaatcacatgaaaaataaaggttccataatgc

SEQ ID NO: 109487 - DNA, 553 bp, Homo sapiens
  Payload ID: 1497
  Gene Symbol: ATP5A1
  Gene Name: ATP synthase, H+ transporting, mitochondrial F1 complex, alpha subunit 1, cardiac muscle
  ENST ID: ENST00000592989
  CDS Start-End: 220-553
ctcctggccgttgagcccctgtgcaaggctggtcgaaggctctggcattgcaagcctcgcttcgttgccacttcccagctcttcccgccttccgcggtataatcaacactacgagagatagagccgcctagaaccagaaatgctttgggttcatctttcattgctgcaaggaacttccatgcctctaacactcatcttcaaaagactgggactgctgagatgtcctctattcttgaagagcgtattcttggagctgatacctctgttgatcttgaagaaactgggcgtgtcttaagtattggtgatggtattgcccgcgtacatgggctgaggaatgttcaagcagaagaaatggtagagttttcttcaggcttaaagggtatgtccttgaacttggaacctgacaatgttggtgttgtcgtgtttggaaatgataaactaattaaggaaggagatatagtgaagaggacaggagccattgtggacgttccagttggtgaggagctgttgggtcgtgtagttgatgcccttggtaatgctattgatggaaagg

SEQ ID NO: 109488 - DNA, 520 bp, Homo sapiens
  Payload ID: 1497
  Gene Symbol: ATP5A1
  Gene Name: ATP synthase, H+ transporting, mitochondrial F1 complex, alpha subunit 1, cardiac muscle
  ENST ID: ENST00000585650
  CDS Start-End: 13-249
aaaaatctcagtatggtaattctgtggagaaaaaaaaaaagcccatccaggtctccagaaatgctttgggttcatctttcattgctgcaaggaacttccatgcctctaacactcatcttcaaaagactgagatgggattttgctgtgttggccaggctggtccaaactcttggcctcaagtggtccgcccgcctcccaaagtgctggtattactggcgtgagccactgcacccaacccctgtatgctaagatgaagaataccacctatactaccctgtgtgccttgaaagagaaagacacactttgttaacaggactgctgagatgtcctctattcttgaagagcgtattcttggagctgatacctctgttgatcttgaagaaactgggcgtgtcttaagtattggtgatggtattgcccgcgtacatgggctgaggaatgttcaagcagaagaaatggtagagttttcttcaggcttaaagggtatgtccttgaacttggaacctgacaatgttggtgt

SEQ ID NO: 109489 - DNA, 756 bp, Homo sapiens
  Payload ID: 1497
  Gene Symbol: ATP5A1
  Gene Name: ATP synthase, H+ transporting, mitochondrial F1 complex, alpha subunit 1, cardiac muscle
  ENST ID: ENST00000590406
  CDS Start-End: 140-756
attgcaagcctcgcttcgttgccacttcccagctcttcccgccttccgcggtataatcaacactacgagagatagagccgcctagaaccagtccggaggctgcggctgcagaagtaccgcctgcggagtaactgcaaagatgctgtccgtgcgcgttgctgcggccgtggtccgcgcccttcctcggcgggccggactggtctccagaaatgctttgggttcatctttcattgctgcaaggaacttccatgcctctaacactcatcttcaaaagactgggactgctgagatgtcctctattcttgaagagcgtattcttggagctgatacctctgttgatcttgaagaaactgggcgtgtcttaagtattggtgatggtattgcccgcgtacatgggctgaggaatgttcaagcagaagaaatggtagagttttcttcaggcttaaagggtatgtccttgaacttggaacctgacaatgttggtgttgtcgtgtttggaaatgataaactaattaaggaaggagatatagtgaagaggacaggagccattgtggacgttccagttggtgaggagctgttgggtcgtgtagttgatgcccttggtaatgctattgatggaaagggtccaattggttccaagacgcgtaggcgagttggtctgaaagcccccggtatcattcctcgaatttcagtgcgggaaccaatgcagactggcattaaggctgtggatagcttggtgccaattggtcgtggtca

SEQ ID NO: 109490 - DNA, 576 bp, Homo sapiens
  Payload ID: 1497
  Gene Symbol: ATP5A1
  Gene Name: ATP synthase, H+ transporting, mitochondrial F1 complex, alpha subunit 1, cardiac muscle
  ENST ID: ENST00000592364
  CDS Start-End: 55-288
agtcagtccggaggctgcggctgcagaagtaccgcctgcggagtaactgcaaagatgctgtccgtgcgcgttgctgcggccgtggtccgcgcccttcctcggcgggccggactggtctccagaaatgctttgggttcatctttcattgctgcaaggaacttccatgcctctaacactcatcttcaaaagactgggactgctgagatgtcctctattcttgaagagcgtattcttggagctgatacctctgttgatcttgaagaaactgggcgtgtcttaagctggtgatgtgtctgcttacattccaacaaatgtcatttccatcactgacggacagatcttcttggaaacagaattgttctacaaaggtatccgccctgcaattaacgttggtctgtctgtatctcgtgtcggatccgctgcccaaaccagggctatgaagcaggtagcaggtaccatgaagctggaattggctcagtatcgtgaggttgctgcttttgcccagttcggttctgacctcgatgctgccactcaacaacttttgagtcgtggcgtgcgtctaactgagttgctgaa

SEQ ID NO: 109491 - DNA, 1839 bp, Homo sapiens
  Payload ID: 1498
  Gene Symbol: ATP5B
  Gene Name: ATP synthase, H+ transporting, mitochondrial F1 complex, beta polypeptide
  Uniprot ID: P06576
  ENST ID: ENST00000262030
  CDS Start-End: 106-1695
agttcacccaatggacctgcctactgcagcgtaggcctcgcctcaacggcaggagagcaggcggctgcggttgctgcagccttcagtctccacccggactacgccatgttggggtttgtgggtcgggtggccgctgctccggcctccggggccttgcggagactcaccccttcagcgtcgctgcccccagctcagctcttactgcgggccgctccgacggcggtccatcctgtcagggactatgcggcgcaaacatctccttcgccaaaagcaggcgccgccaccgggcgcatcgtggcggtcattggcgcagtggtggacgtccagtttgatgagggactaccaccaattctaaatgccctggaagtgcaaggcagggagaccagactggttttggaggtggcccagcatttgggtgagagcacagtaaggactattgctatggatggtacagaaggcttggttagaggccagaaagtactggattctggtgcaccaatcaaaattcctgttggtcctgagactttgggcagaatcatgaatgtcattggagaacctattgatgaaagaggtcccatcaaaaccaaacaatttgctcccattcatgctgaggctccagagttcatggaaatgagtgttgagcaggaaattctggtgactggtatcaaggttgtcgatctgctagctccctatgccaagggtggcaaaattgggctttttggtggtgctggagttggcaagactgtactgatcatggagttaatcaacaatgtcgccaaagcccatggtggttactctgtgtttgctggtgttggtgagaggacccgtgaaggcaatgatttataccatgaaatgattgaatctggtgttatcaacttaaaagatgccacctctaaggtagcgctggtatatggtcaaatgaatgaaccacctggtgctcgtgcccgggtagctctgactgggctgactgtggctgaatacttcagagaccaagaaggtcaagatgtactgctatttattgataacatctttcgcttcacccaggctggttcagaggtgtctgcattattgggccgaatcccttctgctgtgggctatcagcctaccctggccactgacatgggtactatgcaggaaagaattaccactaccaagaagggatctatcacctctgtacaggctatctatgtgcctgctgatgacttgactgaccctgcccctgctactacgtttgcccatttggatgctaccactgtactgtcgcgtgccattgctgagctgggcatctatccagctgtggatcctctagactccacctctcgtatcatggatcccaacattgttggcagtgagcattacgatgttgcccgtggggtgcaaaagatcctgcaggactacaaatccctccaggatatcattgccatcctgggtatggatgaactttctgaggaagacaagttgaccgtgtcccgtgcacggaaaatacagcgtttcttgtctcagccattccaggttgctgaggtcttcacaggtcatatggggaagctggtacccctgaaggagaccatcaaaggattccagcagattttggcaggtgaatatgaccatctcccagaacaggccttctatatggtgggacccattgaagaagctgtggcaaaagctgataagctggctgaagagcattcatcgtgaggggtctttgtcctctgtactgtctctctccttgcccctaacccaaaaagcttcatttttctgtgtaggctgcacaagagccttgattgaagatatattctttctgaacagtatttaaggtttccaataaaatgtacacccctc

SEQ ID NO: 109492 - DNA, 1085 bp, Homo sapiens
  Payload ID: 1498
  Gene Symbol: ATP5B
  Gene Name: ATP synthase, H+ transporting, mitochondrial F1 complex, beta polypeptide
  ENST ID: ENST00000552959
  CDS Start-End: 1-1085
gtttgtgggtcgggtggccgctgctccggcctccggggccttgcggagactcaccccttcagcgtcgctgcccccagctcagctcttactgcgggccgctccgacggcggtccatcctggtgagagcacagtaaggactattgctatggatggtacagaaggcttggttagaggccagaaagtactggattctggtgcaccaatcaaaattcctgttggtcctgagactttgggcagaatcatgaatgtcattggagaacctattgatgaaagaggtcccatcaaaaccaaacaatttgctcccattcatgctgaggctccagagttcatggaaatgagtgttgagcaggaaattctggtgactggtatcaaggttgtcgatctgctagctccctatgccaagggtggcaaaattgggctttttggtggtgctggagttggcaagactgtactgatcatggagttaatcaacaatgtcgccaaagcccatggtggttactctgtgtttgctggtgttggtgagaggacccgtgaaggcaatgatttataccatgaaatgattgaatctggtgttatcaacttaaaagatgccacctctaaggtagcgctggtatatggtcaaatgaatgaaccacctggtgctcgtgcccgggtagctctgactgggctgactgtggctgaatacttcagagaccaagaaggtcaagatgtactgctatttattgataacatctttcgcttcacccaggctggttcagaggtgtctgcattattgggccgaatcccttctgctgtgggctatcagcctaccctggccactgacatgggtactatgcaggaaagaattaccactaccaagaagggatctatcacctctgtacaggctatctatgtgcctgctgatgacttgactgaccctgcccctgctactacgtttgcccatttggatgctaccactgtactgtcgcgtgccattgctgagctgggcatctatccagctgtggatcctctagactccacctctcgtatcatggatcccaacattgttggcagtgagcattacgatgttgcccgtggggtgcaaa

SEQ ID NO: 109493 - DNA, 856 bp, Homo sapiens
  Payload ID: 1498
  Gene Symbol: ATP5B
  Gene Name: ATP synthase, H+ transporting, mitochondrial F1 complex, beta polypeptide
  ENST ID: ENST00000551020
  CDS Start-End: 5-856
cgccatgttggggtttgtgggtcgggtggccgctgctccggcctccggggccttgcggagactcaccccttcagcgtcgctgcccccagctcagctcttactgcgggccgctccgacggcggtccatcctggtgagagcacagtaaggactattgctatggatggtacagaaggcttggttagaggccagaaagtactggattctggtgcaccaatcaaaattcctgttggtcctgagactttgggcagaatcatgaatgtcattggagaacctattgatgaaagaggtcccatcaaaaccaaacaatttgctcccattcatgctgaggctccagagttcatggaaatgagtgttgagcaggaaattctggtgactggtatcaaggttgtcgatctgctagctccctatgccaagggtggcaaaattgggctttttggtggtgctggagttggcaagactgtactgatcatggagttaatcaacaatgtcgccaaagcccatggtggttactctgtgtttgctggtgttggtgagaggacccgtgaaggcaatgatttataccatgaaatgattgaatctggtgttatcaacttaaaagatgccacctctaaggtgtctgcattattgggccgaatcccttctgctgtgggctatcagcctaccctggccactgacatgggtactatgcaggaaagaattaccactaccaagaagggatctatcacctctgtacaggactacaaatccctccaggatatcattgccatcctgggtatggatgaactttctgaggaagacaagttgaccgtgtcccgtgcacggaaaatacagcgtttcttgtctcagccattccag

SEQ ID NO: 109494 - DNA, 814 bp, Homo sapiens
  Payload ID: 1498
  Gene Symbol: ATP5B
  Gene Name: ATP synthase, H+ transporting, mitochondrial F1 complex, beta polypeptide
  ENST ID: ENST00000553007
  CDS Start-End: 5-814
cgccatgttggggtttgtgggtcgggtggccgctgctccggcctccggggccttgcggagactcaccccttcagcgtcgctgcccccagctcagctcttactgcgggccgctccgacggcggtccatcctgtcagggactatgcggcgcaaacatctccttcgccaaaagcaggcgccgccaccgggcgcatcgtggcggtcattggcgcagtggtggacgtccagtttgatgagggactaccaccaattctaaatgccctggaagtgcaaggcagggagaccagactggttttggaggtggcccagcatttggggctttttggtggtgctggagttggcaagactgtactgatcatggagttaatcaacaatgtcgccaaagcccatggtggttactctgtgtttgctggtgttggtgagaggacccgtgaaggcaatgatttataccatgaaatgattgaatctggtgttatcaacttaaaagatgccacctctaaggtagcgctggtatatggtcaaatgaatgaaccacctggtgctcgtgcccgggtagctctgactgggctgactgtggctgaatacttcagagaccaagaaggtcaagatgtactgctatttattgataacatctttcgcttcacccaggctggttcagaggtgtctgcattattgggccgaatcccttctgctgtgggctatcagcctaccctggccactgacatgggtactatgcaggaaagaattaccactaccaagaagggatctatcacctctgtacaggctatctatgtgcctgctgatgacttgactgac

SEQ ID NO: 109495 - DNA, 399 bp, Homo sapiens
  Payload ID: 1498
  Gene Symbol: ATP5B
  Gene Name: ATP synthase, H+ transporting, mitochondrial F1 complex, beta polypeptide
  ENST ID: ENST00000551570
  CDS Start-End: 1-399
gctggagttggcaagactgtactgatcatggagttaatcaacaatgtcgccaaagcccatggtggttactctgtgtttgctggtgttggtgagaggacccgtgaaggcaatgatttataccatgaaatgattgaatctggtgttatcaacttaaaagatgccacctctaaggctggttcagaggtgtctgcattattgggccgaatcccttctgctgtgggctatcagcctaccctggccactgacatgggtactatgcaggaaagaattaccactaccaagaagggatctatcacctctgtacaggctatctatgtgcctgctgatgacttgactgaccctgcccctgctactacgtttgcccatttggatgctaccactgtactgtcgcgtgccatt

SEQ ID NO: 109496 - DNA, 997 bp, Homo sapiens
  Payload ID: 1499
  Gene Symbol: ATP5D
  Gene Name: ATP synthase, H+ transporting, mitochondrial F1 complex, delta subunit
  Uniprot ID: P30049
  ENST ID: ENST00000215375
  CDS Start-End: 102-608
cagacgtccctgcgcgtcgtcctcctcgccctccaggccgcccgcgccgcgccggagtccgctgtccgccagctacccgcttcctgccgcccgccgctgccatgctgcccgccgcgctgctccgccgcccgggacttggccgcctcgtccgccacgcccgtgcctatgccgaggccgccgccgccccggctgccgcctctggccccaaccagatgtccttcaccttcgcctctcccacgcaggtgttcttcaacggtgccaacgtccggcaggtggacgtgcccacgctgaccggagccttcggcatcctggcggcccacgtgcccacgctgcaggtcctgcggccggggctggtcgtggtgcatgcagaggacggcaccacctccaaatactttgtgagcagcggttccatcgcagtgaacgccgactcttcggtgcagttgttggccgaagaggccgtgacgctggacatgttggacctgggggcagccaaggcaaacttggagaaggcccaggcggagctggtggggacagctgacgaggccacgcgggcagagatccagatccgaatcgaggccaacgaggccctggtgaaggccctggagtaggcggtgcgtacccggtgtcccgaggcccggccaggggctgggcagggatgccaggtgggcccagccagctcctggggtcccggccacctggggaagccgcgcctgccaaggaggccaccagagggcagtgcaggcttctgcctgggccccaggccctgcctgtgttgaaagctctggggactgggccagggaagctcctcctcagctttgagctgtggctgccacccatggggctctccttccgcctctcaagatccccccagcctgacgggccgcttaccatcccctctgccctgcagagccagccgccaaggttgacctcagcttcggagccacctctggatgaactgcccccagcccccgccccattaaagacccggaagcctgac

SEQ ID NO: 109497 - DNA, 704 bp, Homo sapiens
  Payload ID: 1499
  Gene Symbol: ATP5D
  Gene Name: ATP synthase, H+ transporting, mitochondrial F1 complex, delta subunit
  Uniprot ID: P30049
  ENST ID: ENST00000395633
  CDS Start-End: 106-612
ctcccagacgtccctgcgcgtcgtcctcctcgccctccaggccgcccgcgccgcgccggagtccgctgtccgccagctacccgcttcctgccgcccgccgctgccatgctgcccgccgcgctgctccgccgcccgggacttggccgcctcgtccgccacgcccgtgcctatgccgaggccgccgccgccccggctgccgcctctggccccaaccagatgtccttcaccttcgcctctcccacgcaggtgttcttcaacggtgccaacgtccggcaggtggacgtgcccacgctgaccggagccttcggcatcctggcggcccacgtgcccacgctgcaggtcctgcggccggggctggtcgtggtgcatgcagaggacggcaccacctccaaatactttgtgagcagcggttccatcgcagtgaacgccgactcttcggtgcagttgttggccgaagaggccgtgacgctggacatgttggacctgggggcagccaaggcaaacttggagaaggcccaggcggagctggtggggacagctgacgaggccacgcgggcagagatccagatccgaatcgaggccaacgaggccctggtgaaggccctggagtaggcgagccagccgccaaggttgacctcagcttcggagccacctctggatgaactgcccccagcccccgccccattaaagacccggaagcctga

SEQ ID NO: 109498 - DNA, 637 bp, Homo sapiens
  Payload ID: 1499
  Gene Symbol: ATP5D
  Gene Name: ATP synthase, H+ transporting, mitochondrial F1 complex, delta subunit
  Uniprot ID: P30049
  ENST ID: ENST00000591660
  CDS Start-End: 32-538
agctacccgcttcctgccgcccgccgctgccatgctgcccgccgcgctgctccgccgcccgggacttggccgcctcgtccgccacgcccgtgcctatgccgaggccgccgccgccccggctgccgcctctggccccaaccagatgtccttcaccttcgcctctcccacgcaggtgttcttcaacggtgccaacgtccggcaggtggacgtgcccacgctgaccggagccttcggcatcctggcggcccacgtgcccacgctgcaggtcctgcggccggggctggtcgtggtgcatgcagaggacggcaccacctccaaatactttgtgagcagcggttccatcgcagtgaacgccgactcttcggtgcagttgttggccgaagaggccgtgacgctggacatgttggacctgggggcagccaaggcaaacttggagaaggcccaggcggagctggtggggacagctgacgaggccacgcgggcagagatccagatccgaatcgaggccaacgaggccctggtgaaggccctggagtaggcgatccccccagcctgacgggccgcttaccatcccctctgccctgcagagccagccgccaaggttgacctcagcttcggagccacctctggatgaact

SEQ ID NO: 109499 - DNA, 405 bp, Homo sapiens
  Payload ID: 1499
  Gene Symbol: ATP5D
  Gene Name: ATP synthase, H+ transporting, mitochondrial F1 complex, delta subunit
  ENST ID: ENST00000591249
  CDS Start-End: 1-299
ccggagccttcggcatcctggcggcccacgtgcccacgctgcaggtcctgcggccggggctggtcgtggtgcatgcagaggacggcaccacctccaaatactttgtgagcagcggttccatcgcagtgaacgccgactcttcggtgcagttgttggccgaagaggccgtgacgctggacatgttggacctggggccaaggcaaacttggagaaggcccaggcggagctggtggggacagctgacgaggccacgcgggcagagatccagatccgaatcgaggccaacgaggccctggtgaaggccctggagtaggcgagccagccgccaaggttgacctcagcttcggagccacctctggatgaactgcccccagcccccgccccattaaagacccggaagcctga

SEQ ID NO: 109500 - DNA, 3665 bp, Homo sapiens
  Payload ID: 1500
  Gene Symbol: ATP5E
  Gene Name: ATP synthase, H+ transporting, mitochondrial F1 complex, epsilon subunit
  Uniprot ID: P56381
  ENST ID: ENST00000243997
  CDS Start-End: 132-287
gattggcaggtccgcacgccccgcctcttccgcttctgtggtctgatcttcctgcggctgaaccgcccggctgagccgacattgccggcgtcttggcgattcggcccgacgagctccgctttcgctacagcatggtggcctactggagacaggctggactcagctacatccgatactcccagatctgtgcaaaagcagtgagagatgcactgaagacagaattcaaagcaaatgctgagaagacttctggcagcaacgtaaaaattgtgaaagtaaagaaggaataatctaccctgactaaagcttgaaatgctacatttccaaggtgaagatgtgtgggcacatgttatggcagattgaaaaggatctcattccatgggaaaaaaaaaaatcctgtcttgttcataaattgacaatgtcaataaattgaaatatggttcactgttactcttgattttagtttgtgagactttttcattttctttaaaggaactgtctgcacagctgcatgattatggccatgtgaaccagggtttcttaaaagcaggggaagccagatttaatatttagtgaccaaagggatacagaaagcattttgaaaatgtctcaaaatagttgtttcatgacattaattggtgatcaaaattatctgctgtcattgaggcttcgtagtcccttatttttgaattgttgtcatgtcagaataatgacatggttatcagtaacaaatggaaataattattaaatactaaaagtgtagattagaagaagaaatactaaattgtacttgttttgtattgtgcacttaaagcctatagataagaacggttacagaatttaagcacaaagtgtttttcacattgttttgtaaatgaatctttatactctggtagcatttctcataggaaatgaggcaaagctattgaataacttgctcattgagttgatggccaaactgaaattaaaacctaggagttttgactgcaagtctgggacacggtgaccacaacagcagtttcgtggtatttccatagtgattcattcattcattatttagggatgaaaaattgttgcaagttatgtttttatctttctttgaaacttgaaagggcttgggcaagtaaaacaccattgcaaagttaactgcctgattttaactgtttttggagactggagaaataaatttgaactggaaattttgaaacaccattctaggatcagttctcacatggtacttaagctcacaatgatttatcagggccactgtcagcaatgccgaggataagccgaaaagaacatctttgttctcggcttctgggaatgacttattgtcccgacacttgacctgtaggttttactgaattctcagcacagagcgagcagggaggcagagccaattgagtggaagagggtgcctctggaaaacagcaggttaggagcccttggagtcctccgcctcggagctgtcatcctgctgttggcaagttagggcacctcagttcagtgctgtggcccccaagattaaggtactaggaagtatcctccattacagggaacaggaataaatgaatcaaaaagctatcgggcctttttgacatgggacgaataaagtaactaataggcaaaggggctaaatgatttccagtcaagtaattagagataagtcatttattaaggaggcagatggggtattattggtatatagatggcatagtagattgctagtatattggtagattattggtatatagatggtatgttaaggaggcagatggggtattactggtatatagatggtatggtagattggtagtatattggcagattattggtatatggtatgttgaggcagatggggtattactggtatatagatggcatagtagattggtagtatattggtagattattggtatagagatggtatattattaaggaggcagatggggtaattagaggtgagacttagggacagggcttgtgatatggaaaggagtgaagtcactgagtaaaagacaagtttactgtcagcagagattcttagaggctcttttctccgtgattaaaaaaaaatcctaaaccagtagtataataaacttcctgcctccagcagtgctgggtagctggcaggatgactgtgcccagtgatgaggtgaccccagtcagaccaacttaatgagtatcccactaattagttggatgatgtttgaagctgtcagttaatctcttagttcacatcgttcttgtgagcaaagtgaaggaatcggataagctctaaatttcggtgatgctgctgctctgagagaccaaggtcgctggagcaaccgtactgctaaaggataagctcttcaaaatcaaaagggacagatttcttaagtttctagtttgttttgtgtttttacatctatttctaccatacgaaagagtaggatggtgagatgcatttctaaatatttttaactactcagtctggatggttaggcttcaagaaaaggaatttatttagtctgaaataaagcaattttgccatttaaaattgaattactttgtagtttaatgattactattgagcaaacaaatctttacagtaatataagtcagcaaaagttttttaaaaggtttaaatccctccttccttacatctatttcattgcttttttaggtttgggaagtaaagcaccagaggaagcatgtgtaaatccttgtataatcgcaggctgtaagtctttagcatctcaggaagttactaacttcaaactaagtatataggtagagtttcttactaaatctagtgcttcttgaaccacaagtagaaagcatttaaaacatgaatgttgttttgtgttttttgaagtttgtaaatagaagacttgttgatgatccgatggcaaggtatttttctcttggtatgtattttagttatttcctcgtgatgcataagtgaaaagagtgaagtttctcagaatgagcaactgtcatccatctacctgctattttattattgctgattacaaaagcaaatcaagagatgagaacccagttgcctgcaagtaaatatttactgcattgagggtcggagcattttcccattaccggttatccatggatcaaatagtgtatctcagtggtaattctagagggccattaaaaccctgatggtgctggaagagatggcagtgctgcatgtcagaaataggtaaactgtaattaagaagttacagatgatttgattacgctcttgtgtatttggtcctgttataatgtgagcagattaaaatcatgtagtgcttaaagctatgtcattatgcaaacatttatggcaacttctgcaaattaatttgaactgtaaaagttccctaatgagacgatgtcctccataactgagaaggacactgcagccattgctgcttaattcctgcatttgaatggttgccgagcgcatggtgtgccctttctcaaagagcagagaggctgcagagcattttggggggtgatgactgaatgaaagtgaaaagaccatttcaaaatagcctttaaaaggaaagccaaggatgattattaatgaattcctgggatctaacagtagtaagaaatttaaactatataaacatatatgttaaaggctagctcttcagaaataaagatcagaagactgcagttcttta

SEQ ID NO: 109501 - DNA, 1878 bp, Homo sapiens
  Payload ID: 1500
  Gene Symbol: ATP5E
  Gene Name: ATP synthase, H+ transporting, mitochondrial F1 complex, epsilon subunit
  Uniprot ID: P56381
  ENST ID: ENST00000395659
  CDS Start-End: 95-250
gtggtctgatcttcctgcggctgaaccgcccggctgagccgacattgccggcgtcttggcgattcggcccgacgagctccgctttcgctacagcatggtggcctactggagacaggctggactcagctacatccgatactcccagatctgtgcaaaagcagtgagagatgcactgaagacagaattcaaagcaaatgctgagaagacttctggcagcaacgtaaaaattgtgaaagtaaagaaggaataatctgtaagttatggatttatttagaagaacagttgcatcttaagtttttggagcaccataaagatcaaaataattttagttttgggttctattcattttttagtcagtgtatttggaagttagttattgggatggtataatttaaagcatgcaggttatagaagtcccctggcctaataaaaagaaagtcttcttgggccctgacaagcagaagtaattggcacattgattttcagttcatttagcaatgcttaggtagagagccatcgtatttgaattaaacctgtttcatttgtctgcacaaatcaaataatttggaggatgaactccccacttgtataattgcaattggagttacataacagtccaagagcatgaaaaactacagttctttacatttttatttcccccacaaccactaatgttctcacaaatcactacttcccgaacataataactacaggcacaggcaagggtcctgctgttgtatcaagcaataaaatctgcaagaccccgcagcgaatactgttttgctaatttattatgctttcagagggtttggttcattttacttttccaaagatgttggtgatgtaaagttaaattctcgtgaaataaaaaggtctgtacagttgataagtgtagacttttgtgttccacattataaaagtggtttgatctctaaagtactttcttgacattgttatttcaaaagtaggcaaggcaaattatcagagagatgtttttcagatttaatttttcttgttttgcttttaaaaagcttcagacccataatagcacagaaatgtgataaatattaatcctttggcagcttatggttatgagcaattttacttattggaactgtctcccctaagcacttttcattttcattttgaattagtaaatattttattacaagtctggagatgcagtgttttgaatttagccctttttctaggggctctctgtctaatctcataattctgagtaatgagacctggttttatgttgggttgttttgttttaacagtaagctaacagaaaatcatttagcctcactcggctcagagctgccagactgcatctaatgctgagattttgcaaagtcctgggggtcaggaagtagtgtccgatccccttaaacaaagcattagcccctctctgttatgcccttcagggttacagaccccacctcattagcacaaggagatgttagtgtcttttaaaggcaaagtagtttctttattctgggagagtgtttacttttactcagcaggaaaatgcctgcttgactaagcctgtgtacttgaaccagcactttttacatctgagccacggcaatgtgaatgatagccacagttatacagttcactataaggaagttatttcttatattcatgttgagtttttaagaaaacacagagaactagccagcaacttgcattttctttttcctcctagaccctgactaaagcttgaaatgctacatttccaaggtgaagatgtgtgggcacatgttatggcagattgaaaaggatctcattccatgggaaaaaaaaaaatcctgtcttgttcataaattgacaatgtcaataaattgaaatatggttcactgttactcttga

SEQ ID NO: 109502 - DNA, 697 bp, Homo sapiens
  Payload ID: 1500
  Gene Symbol: ATP5E
  Gene Name: ATP synthase, H+ transporting, mitochondrial F1 complex, epsilon subunit
  Uniprot ID: P56381
  ENST ID: ENST00000395663
  CDS Start-End: 42-197
tcttggcgattcggcccgacgagctccgctttcgctacagcatggtggcctactggagacaggctggactcagctacatccgatactcccagatctgtgcaaaagcagtgagagatgcactgaagacagaattcaaagcaaatgctgagaagacttctggcagcaacgtaaaaattgtgaaagtaaagaaggaataatctgtttgggaagtaaagcaccagaggaagcatgtgtaaatccttgtataatcgcaggctgtaagtctttagcatctcaggaagttactaacttcaaactaagtatataggtagagtttcttactaaatctagtgcttcttgaaccacaagtagaaagcatttaaaacatgaatgttgttttgtgttttttgaagtttgtaaatagaagacttgttgatgatccgatggcaaggtatttttctcttggtatgtattttagttatttcctcgtgatgcataagtgaaaagagtgaagtttctcagaatgagcaactgtcatccatctacctgctattttattattgctgattacaaaagcaaatcaagagatgagaacccagttgcctgcaagtaaatatttactgcattgagggtcggagcattttcccattaccggttatccatggatcaaatagtgtatctcagtggtaattctagagggccattaaaaccctgatgg

SEQ ID NO: 109503 - DNA, 385 bp, Homo sapiens
  Payload ID: 1501
  Gene Symbol: ATP5EP2
  Gene Name: ATP synthase, H+ transporting, mitochondrial F1 complex, epsilon subunit pseudogene 2
  Uniprot ID: Q5VTU8
  ENST ID: ENST00000381026
  CDS Start-End: 55-210
gacattgccagagtcttggcgatttggcccgacgcgctccgctttcgctacagcatggtggcctactggagacaggctggactcagctacatccgatactcccagatctgtgcaaaagtagtgagagatgcactgaagacagaattcaaagcaaatgccaaaaagacttctggcaacagcgtaaaaattgtgaaagtaaagaaggaataatctaccctgactaaagcttgaaatgctgcatttccaaggtgaagatgtatgggcacatgttatggcagattgaaaaggatctcatttcatgggaaaaaaaaatcctgtcttgttcataaattgacaatgtcaataaattgaaatatggttcactgttaaaaaaaaaaaaaaaaaa

SEQ ID NO: 109504 - DNA, 1078 bp, Homo sapiens
  Payload ID: 1502
  Gene Symbol: ATP5C1
  Gene Name: ATP synthase, H+ transporting, mitochondrial F1 complex, gamma polypeptide 1
  Uniprot ID: P36542
  ENST ID: ENST00000335698
  CDS Start-End: 32-925
ctgaccgaccttcagcagggctgtggctaccatgttctctcgcgcgggtgtcgctgggctgtcggcctggaccttgcagccgcaatggattcaagttcgaaatatggcaactttgaaagatatcaccaggagactaaagtccatcaaaaacatccagaaaattaccaagtctatgaaaatggtagcggcagcaaaatatgcccgagctgagagagagctgaaaccagctcgaatatatggattgggatctttagctctgtatgaaaaagctgatatcaaggggcctgaagacaagaagaaacacctccttattggtgtgtcctcagatcgaggactgtgtggtgctattcattcctccattgctaaacagatgaaaagcgaggttgctacactaacagcagctgggaaagaagttatgcttgttggaattggtgacaaaatcagaggcatactttataggactcattctgaccagtttctggtggcattcaaagaagtgggaagaaagccccccacttttggagatgcgtcagtcattgcccttgaattactaaattctggatatgaatttgatgaaggctccatcatctttaataaattcaggtctgtcatctcctataagacagaagaaaagcccatcttttcccttaataccgttgcaagtgctgacagcatgagtatctatgacgatattgatgctgacgtgctgcaaaattaccaagaatacaatctggccaacatcatctactactctctgaaggagtccaccactagtgagcagagtgccaggatgacagccatggacaatgccagcaagaatgcttctgagatgattgacaaattgacattgacattcaaccgtacccgccaagctgtcatcacaaaagagttgattgaaattatctctggtgctgcagctctgtaaagaaggaaaattcagccagttgattttgtttttagcttactgctgcctttgtccgaagaaactgttcctccattatttgaattactgaagacagcaagatatttgtaaattatcttaaaataaacaacttaaaataaaatcattgtttttctt

SEQ ID NO: 109505 - DNA, 1163 bp, Homo sapiens
  Payload ID: 1502
  Gene Symbol: ATP5C1
  Gene Name: ATP synthase, H+ transporting, mitochondrial F1 complex, gamma polypeptide 1
  Uniprot ID: P36542
  ENST ID: ENST00000356708
  CDS Start-End: 80-976
tgggaggggcgcgctggggagcttcggcgcatgcgcgctgaggcctgcctgaccgaccttcagcagggctgtggctaccatgttctctcgcgcgggtgtcgctgggctgtcggcctggaccttgcagccgcaatggattcaagttcgaaatatggcaactttgaaagatatcaccaggagactaaagtccatcaaaaacatccagaaaattaccaagtctatgaaaatggtagcggcagcaaaatatgcccgagctgagagagagctgaaaccagctcgaatatatggattgggatctttagctctgtatgaaaaagctgatatcaaggggcctgaagacaagaagaaacacctccttattggtgtgtcctcagatcgaggactgtgtggtgctattcattcctccattgctaaacagatgaaaagcgaggttgctacactaacagcagctgggaaagaagttatgcttgttggaattggtgacaaaatcagaggcatactttataggactcattctgaccagtttctggtggcattcaaagaagtgggaagaaagccccccacttttggagatgcgtcagtcattgcccttgaattactaaattctggatatgaatttgatgaaggctccatcatctttaataaattcaggtctgtcatctcctataagacagaagaaaagcccatcttttcccttaataccgttgcaagtgctgacagcatgagtatctatgacgatattgatgctgacgtgctgcaaaattaccaagaatacaatctggccaacatcatctactactctctgaaggagtccaccactagtgagcagagtgccaggatgacagccatggacaatgccagcaagaatgcttctgagatgattgacaaattgacattgacattcaaccgtacccgccaagctgtcatcacaaaagagttgattgaaattatctctggtgctgcagctctggattaatgaaaatcaagttccatcctcagacaagaggtaaagaaggaaaattcagccagttgattttgtttttagcttactgctgcctttgtccgaagaaactgttcctccattatttgaattactgaagacagcaagatatttgtaaattatcttaaaataaacaacttaaaataaaatcattgtttttctt

SEQ ID NO: 109506 - DNA, 932 bp, Homo sapiens
  Payload ID: 1503
  Gene Symbol: ATP5O
  Gene Name: ATP synthase, H+ transporting, mitochondrial F1 complex, O subunit
  Uniprot ID: P48047
  ENST ID: ENST00000290299
  CDS Start-End: 218-859
cagatgcagtcgaagccctgtggctccaccccgagggtccagcccttaccactgctaagaactacaactcccagcccgagggaggtctctgcgcctgcggcctgacgccctacgcctacacttcccagagaacctagcggttacgccaacgcgcgcgtgcgcccttgcgcgtttctctcttcccactcgggtttgacctacagccgcccgggagaagatggctgccccagcagtgtccgggctctcccggcaggtgcgatgcttcagtacctctgtggtcagaccatttgccaagcttgtgaggcctcctgttcaggtatacggtattgaaggtcgctatgccacagctctttattctgctgcatcaaaacagaataagctggagcaagtagaaaaggagttgttgagagtagcacaaatcctgaaggaacccaaagtggctgcttctgttttgaatccctatgtgaagcgttccattaaagtgaaaagcctaaatgacatcacagcaaaagagaggttctctcccctcactaccaatctgatcaatttgcttgctgaaaatggtcgattaagcaatacccaaggagtcgtttctgccttttctaccatgatgagtgtccatcgcggagaggtaccttgcacagtgacctctgcatctcctttagaagaagccacactctctgaattaaaaactgtcctcaagagcttcctaagtcaaggccaagtattgaaattggaggctaagactgatccgtcaatcttgggtggaatgattgtgcgcattggcgagaaatatgttgacatgtctgtcaagaccaagattcagaagctgggcagggctatgcgggagattgtctaaaagtgttggttttctgccatcagtgaaaattcttaaacttggagcaacaataaaaagcttccagaacagatca

SEQ ID NO: 109507 - DNA, 415 bp, Homo sapiens
  Payload ID: 1503
  Gene Symbol: ATP5O
  Gene Name: ATP synthase, H+ transporting, mitochondrial F1 complex, O subunit
  ENST ID: ENST00000418933
  CDS Start-End: 1-259
taccaatctgatcaatttgcttgctgaaaatggtcgattaagcaatacccaaggagtcgtttctgccttttctaccatgatgagtgtccatcgcggagaggtaccttgcacagtgacctctgcatctcctttagaagaagccacactctctgaattaaaaactgtcctcaagagcttcctaagtcaaggccaagtattgaaattggaggctaagtcttacttcttttgtagactgatccgtcaatcttgggtggaatgattgtgcgcattggcgagaaatatgttgacatgtctgtcaagaccaagattcagaagctgggcagggctatgcgggagattgtctaaaagtgttggttttctgccatcagtgaaaattcttaaacttggagcaacaataaaaagcttccagaacaga

SEQ ID NO: 109508 - DNA, 583 bp, Homo sapiens
  Payload ID: 1503
  Gene Symbol: ATP5O
  Gene Name: ATP synthase, H+ transporting, mitochondrial F1 complex, O subunit
  ENST ID: ENST00000431254
  CDS Start-End: 1-223
ggctgccccagcagtgtccgggctctcccggcaggtgcgatgcttcagtacctctgtggtcagaccatttgccaagcttgtgaggcctcctgttcaggtatacggtattgaaggtcgctatgccacagctctttattctgctgcatcaaaacagaataagctggagcaagtagaaaaggagttgttgagagtagcaatttgcttgctgaaaatggtcgattaagcaatacccaaggagtcgtttctgccttttctaccatgatgagtgtccatcgcggagaggtaccttgcacagtgacctctgcatctcctttagaagaagccacactctctgaattaaaaactgtcctcaagagcttcctaagtcaaggccaagtattgaaattggaggctaagactgatccgtcaatcttgggtggaatgattgtgcgcattggcgagaaatatgttgacatgtctgtcaagaccaagattcagaagctgggcagggctatgcgggagattgtctaaaagtgttggttttctgccatcagtgaaaattcttaaacttggagcaacaataaaaagcttccagaacagatca

SEQ ID NO: 109509 - DNA, 442 bp, Homo sapiens
  Payload ID: 1503
  Gene Symbol: ATP5O
  Gene Name: ATP synthase, H+ transporting, mitochondrial F1 complex, O subunit
  ENST ID: ENST00000429064
  CDS Start-End: 1-79
aggagtcgtttctgccttttctaccatgatgagtgtccatcgcggagaggtaccttgcacagtgacctctgcatcttgatggaggttttactgtgttctccaggcttgtctcgaacttctgggctcaagtgacccacctgccttggcctcctaaagtgctgggaataaaggtcctttagaagaagccacactctctgaattaaaaactgtcctcaagagcttcctaagtcaaggccaagtattgaaattggaggctaagactgatccgtcaatcttgggtggaatgattgtgcgcattggcgagaaatatgttgacatgtctgtcaagaccaagattcagaagctgggcagggctatgcgggagattgtctaaaagtgttggttttctgccatcagtgaaaattcttaaacttggagcaacaataaaaagcttccagaacag

SEQ ID NO: 109510 - DNA, 462 bp, Homo sapiens
  Payload ID: 1503
  Gene Symbol: ATP5O
  Gene Name: ATP synthase, H+ transporting, mitochondrial F1 complex, O subunit
  ENST ID: ENST00000417181
  CDS Start-End: 1-123
gtcgtttctgccttttctaccatgatgagtgtccatcgcggagaggtaccttgcacagtgacctctgcatctgcttgtctcgaacttctgggctcaagtgacccacctgccttggcctcctaaagtgctgggaataaagatgaggaaaccgaatgcagggagatgaagtcgcttgcccaaagtcatacgagcctttagaagaagccacactctctgaattaaaaactgtcctcaagagcttcctaagtcaaggccaagtattgaaattggaggctaagactgatccgtcaatcttgggtggaatgattgtgcgcattggcgagaaatatgttgacatgtctgtcaagaccaagattcagaagctgggcagggctatgcgggagattgtctaaaagtgttggttttctgccatcagtgaaaattcttaaacttggagcaacaataaaaagcttccagaacaga

SEQ ID NO: 109511 - DNA, 3156 bp, Homo sapiens
  Payload ID: 1504
  Gene Symbol: ATP5F1
  Gene Name: ATP synthase, H+ transporting, mitochondrial Fo complex, subunit B1
  Uniprot ID: P24539
  ENST ID: ENST00000369722
  CDS Start-End: 607-1377
tgacgcgacccagggtcaggataacatgcagggcggggatgggctgggagggtcagtctccggggaggggcgccctgggccggggtaagggagctcccaggcccgggatctcggctcaccggaccggtaccgcgcagcctccaactgccgttccatgcaggcgggcgcatttgggggaagattccactcccgggccgccgggggcactagggggggtggggtttccttccgcatctccacggttccaactccaacctagactcaaactggacgccggccggagactccgctccggcagcaaaccccacgtggtgcacctctgagcctccgcccctctcccgagggaaccgcaactctacttctcgcgagaattgcttctatggctccatcctgctttccggctgtcgccctcatgcgataggctctcagcgttacttgactcttctcgcgataattttttttaaaaatctcccaaggaaagttgaaggaagagtacaaaattttcatctcgcgagacttgtgagcggccatcttggtcctgccctgacagattctcctatcggggtcacagggacgctaagattgctacctggactttcgttgaccatgctgtcccgggtggtactttccgccgccgccacagcggccccctctctgaagaatgcagccttcctaggtccaggggtattgcaggcaacaaggacctttcatacagggcagccacaccttgtccctgtaccacctcttcctgaatacggaggaaaagttcgttatggactgatccctgaggaattcttccagtttctttatcctaaaactggtgtaacaggaccctatgtactcggaactgggcttatcttgtacgctttatccaaagaaatatatgtgattagcgcagagaccttcactgccctatcagtactaggtgtaatggtctatggaattaaaaaatatggtccctttgttgcagactttgctgataaactcaatgagcaaaaacttgcccaactagaagaggcgaagcaggcttccatccaacacatccagaatgcaattgatacggagaagtcacaacaggcactggttcagaagcgccattacctttttgatgtgcaaaggaataacattgctatggctttggaagttacttaccgggaacgactgtatagagtatataaggaagtaaagaatcgcctggactatcatatatctgtgcagaacatgatgcgtcgaaaggaacaagaacacatgataaattgggtggagaagcacgtggtgcaaagcatctccacacagcaggaaaaggagacaattgccaagtgcattgcggacctaaagctgctggcaaagaaggctcaagcacagccagttatgtaaatgtatctatcccaattgagacagctagaaacagttgactgactaaatggaaactagtctatttgacaaagtctttctgtgttggtgtctactgaagttatagtttacccttcctaaaaatgaaaagtttgtttcatatagtgagagaacgaaatctctatcggccagtcagatgtttctcatccttcttgctctgcctttgagttgttccgtgatcacttctgaataagcagtttgcctttataaaaacttgctgcctgactaaagattaacaggttatagtttaaatttgtaattaattctaccatcttgcaataaagtgacaattgaatgaaacagggtttttcaagttgtataattctctgaaatactcagcttttgtcatatgggtaaaaattaaagatgtcattgaactactgtcttgtttatgagaccattcagtggtgaactgtttctggctgataggttatgagatatgtaaagctttctagtactcttaaaataactaaatggagtattatatatcaattcatatcattgactttattattttagtagtatgcctatagaaaatattatggactcagagtgtcataaaatcactcttaagaatccatgcagcaggccaggcacagtggctcacacctgtaatgcctgcactttggaaggccgagacaggcggatcacttgaggtcaggagtttgaaaccagccaggccaacacagtgaaaccctgtctctactaaaaatacaaaaggttagccgggcatggtggcaggcgcctgtaatcccagctactcaggaggctgaggcaggagaattgcttgaacgcaggaggcaaaggttgcagtgagctgagatcacgccactgcactccagcctgggcaacagacctcgactccatctagaaaaaaaaaaaaaaaaatccagcagacacctatcaggaacatagaaaataacaagtgttggcaaggaagtggagaagttggaacacttgtgcactgttcgtagaaatatgaaatggtacagccattatggaaaagtgtggtgattcctcataaaattaaaatggaaataccatgatccagcaatcccagtcgacatatatactcaaaaaaattaaaagcagggtcttgaagagatacttgtgttccatggtgatagcagccattgttcacaatagctaaaacatagaagcagcccaatcggccatcagtagatgaatggataagcaaaatgtagtatatccatgcaatggaatattattccacttcaaggaagaaaattctgacactggctacagcatgaatgaaccttgaggacgttatgcagttttacaggatgagttatggagctggatagtggtgatggtggcacattaaggatgtatttaatactgttcttaaatggtacacttaaaaatggtaaattttatgtgtattttacaatctttttttaaattgaagaaaaatcctgtagataaattagaaaattcttcccttcataggtttatctgcatttgattctcccatacttgtacaaggatttatttgtattcaaatggacaaattacgcaataggaaatatttgaaaatatttatcatgggtaattgctattttcattgacttcctaagattttatgtaataatcatttgagtcaatattggtagctaatgtactaatctaatattgaaatcagattgatatctttgttacttaaagataatttgattggatcagcagttatttcaaattgattaaacaaaaaattataaaaca

SEQ ID NO: 109512 - DNA, 678 bp, Homo sapiens
  Payload ID: 1504
  Gene Symbol: ATP5F1
  Gene Name: ATP synthase, H+ transporting, mitochondrial Fo complex, subunit B1
  ENST ID: ENST00000483994
  CDS Start-End: 59-646
agattctcctatcggggtcacagggacgctaagattgctacctggactttcgttgaccatgctgtcccgggtggtactttccgccgccgccacagcgggaccctatgtactcggaactgggcttatcttgtacgctttatccaaagaaatatatgtgattagcgcagagaccttcactgccctatcagtactaggtgtaatggtctatggaattaaaaaatatggtccctttgttgcagactttgctgataaactcaatgagcaaaaacttgcccaactagaagaggcgaagcaggcttccatccaacacatccagaatgcaattgatacggagaagtcacaacaggcactggttcagaagcgccattacctttttgatgtgcaaaggaataacattgctatggctttggaagttacttaccgggaacgactgtatagagtatataaggaagtaaagaatcgcctggactatcatatatctgtgcagaacatgatgcgtcgaaaggaacaagaacacatgataaattgggtggagaagcacgtggtgcaaagcatctccacacagcaggaaaaggagacaattgccaagtgcattgcggacctaaagctgctggcaaagaaggctcaagcacagccagttatgtaaatgtatctatcccaattgagacagctagaaac

SEQ ID NO: 109513 - DNA, 598 bp, Homo sapiens
  Payload ID: 1505
  Gene Symbol: ATP5G1
  Gene Name: ATP synthase, H+ transporting, mitochondrial Fo complex, subunit C1 (subunit 9)
  Uniprot ID: P05496
  ENST ID: ENST00000355938
  CDS Start-End: 86-496
ccaatgagaatggagaaggtccaggacacgtgggtgggggaagctgagcgctgagaccaagggctaaagctgggagactgaaaaaatgcagaccgccggggcattattcatttctccagctctgatccgctgttgtaccaggggtctaatcaggcctgtgtctgcctccttcttgaatagcccagtgaattcatctaaacagccttcctacagcaacttcccactccaggtggccagacgggagttccagaccagtgttgtctcccgggacattgacacagcagccaagtttattggtgctggggcagccacagttggtgtggctggttcaggggctggcattggaaccgtgtttggcagcttgatcattggctatgccaggaacccgtctctcaagcagcagctcttctcctatgccattcttggctttgccctgtctgaggccatggggcttttctgtttgatggtcgccttcctcatcctcttcgccatgtgaggctccatgggggggtcaccggcctgttgctactgcaactccacaccattcttggtgctggggtgtgttaagctttaccattaaacacaacgtttctctaaa

SEQ ID NO: 109514 - DNA, 614 bp, Homo sapiens
  Payload ID: 1505
  Gene Symbol: ATP5G1
  Gene Name: ATP synthase, H+ transporting, mitochondrial Fo complex, subunit C1 (subunit 9)
  Uniprot ID: P05496
  ENST ID: ENST00000393366
  CDS Start-End: 104-514
gagaccaagggctaaagctgggaggtgagtctgtcaccttgagccgggcgagcgctgtgggccaagcaggggttgcagggtagtaggagtgcagactgaaaaaatgcagaccgccggggcattattcatttctccagctctgatccgctgttgtaccaggggtctaatcaggcctgtgtctgcctccttcttgaatagcccagtgaattcatctaaacagccttcctacagcaacttcccactccaggtggccagacgggagttccagaccagtgttgtctcccgggacattgacacagcagccaagtttattggtgctggggcagccacagttggtgtggctggttcaggggctggcattggaaccgtgtttggcagcttgatcattggctatgccaggaacccgtctctcaagcagcagctcttctcctatgccattcttggctttgccctgtctgaggccatggggcttttctgtttgatggtcgccttcctcatcctcttcgccatgtgaggctccatgggggggtcaccggcctgttgctactgcaactccacaccattcttggtgctggggtgtgttaagctttaccattaaacacaacgtttctcta

SEQ ID NO: 109515 - DNA, 359 bp, Homo sapiens
  Payload ID: 1505
  Gene Symbol: ATP5G1
  Gene Name: ATP synthase, H+ transporting, mitochondrial Fo complex, subunit C1 (subunit 9)
  ENST ID: ENST00000514808
  CDS Start-End: 49-348
gggaagctgagcgctgagaccaagggctaaagctgggagactgaaaaaatgcagaccgccggggcattattcatttctccagctctgatccgctgttgtaccaggggtctaatcaggcctgtgtctgcctccttcttgaatagcccagtgaattcatctaaacagccttcctacagcaacttcccactccaggtggccagacgggagttccagaccagtgttgtctcccgggacattgacacagcagccaagtttattggtgctggggcagccacagttggtgtggctggttcaggggctggcattggaaccgtgtttggcagcttgatcattggctatgccaggtaagtttgggtggt

SEQ ID NO: 109516 - DNA, 468 bp, Homo sapiens
  Payload ID: 1505
  Gene Symbol: ATP5G1
  Gene Name: ATP synthase, H+ transporting, mitochondrial Fo complex, subunit C1 (subunit 9)
  ENST ID: ENST00000506855
  CDS Start-End: 34-366
gagaccaagggctaaagctgggagactgaaaaaatgcagaccgccggggcattattcatttctccagctctgccttcctacagcaacttcccactccaggtggccagacgggagttccagaccagtgttgtctcccgggacattgacacagcagccaagtttattggtgctggggcagccacagttggtgtggctggttcaggggctggcattggaaccgtgtttggcagcttgatcattggctatgccaggaacccgtctctcaagcagcagctcttctcctatgccattcttggctttgccctgtctgaggccatggggcttttctgtttgatggtcgccttcctcatcctcttcgccatgtgaggctccatgggggggtcaccggcctgttgctactgcaactccacaccattcttggtgctggggtgtgttaagctttaccattaaacacaacgtttctctaaa

SEQ ID NO: 109517 - DNA, 539 bp, Homo sapiens
  Payload ID: 1505
  Gene Symbol: ATP5G1
  Gene Name: ATP synthase, H+ transporting, mitochondrial Fo complex, subunit C1 (subunit 9)
  ENST ID: ENST00000503641
  CDS Start-End: 54-437
ggtgggggaagctgagcgctgagaccaagggctaaagctgggagactgaaaaaatgcagaccgccggggcattattcatttctccagctctgatccgctgttgtaccaggggtctaatcaggcctgtgtctgcctccttcttgaatagcccagtgaattcatctaaacaggtggccagacgggagttccagaccagtgttgtctcccgggacattgacacagcagccaagtttattggtgctggggcagccacagttggtgtggctggttcaggggctggcattggaaccgtgtttggcagcttgatcattggctatgccaggaacccgtctctcaagcagcagctcttctcctatgccattcttggctttgccctgtctgaggccatggggcttttctgtttgatggtcgccttcctcatcctcttcgccatgtgaggctccatgggggggtcaccggcctgttgctactgcaactccacaccattcttggtgctggggtgtgttaagctttaccattaaacacaacgtttctctaaa

SEQ ID NO: 109518 - DNA, 401 bp, Homo sapiens
  Payload ID: 1505
  Gene Symbol: ATP5G1
  Gene Name: ATP synthase, H+ transporting, mitochondrial Fo complex, subunit C1 (subunit 9)
  ENST ID: ENST00000504591
  CDS Start-End: 106-401
cggacgggggtgaaggggacgaccaaaggtcgtcattataagcaaacaaccagggtctcagtgggattattattactattttttccccctctgcagactgaaaaaatgcagaccgccggggcattattcatttctccagctctgatccgctgttgtaccaggggtctaatcaggcctgtgtctgcctccttcttgaatagcccagtgaattcatctaaacagccttcctacagcaacttcccactccaggtggccagacgggagttccagaccagtgttgtctcccgggacattgacacagcagccaagtttattggtgctggggcagccacagttggtgtggctggttcaggggctggcattggaaccgtgtttggcagcttgatcattggctatgccag

SEQ ID NO: 109519 - DNA, 1792 bp, Homo sapiens
  Payload ID: 1506
  Gene Symbol: ATP5G2
  Gene Name: ATP synthase, H+ transporting, mitochondrial Fo complex, subunit C2 (subunit 9)
  Uniprot ID: Q06055
  ENST ID: ENST00000338662
  CDS Start-End: 1207-1680
attcctgtaatggcgtcgctcggggtcccgggaaattgctccgtgggctttcagcggcggtttttatcgccggccggggtgtgcctgtctgcggctcgcctctcctccgggaccgtaaagctgctgccgtgatttatcctccccttctcccaaatccgattaaatggaggagctcggggccggggcgccgcggggcccgggagccgggagggggcggcgggaaggacggggccaaggaggggaggacaaacggcccctcagagagtggcggatttgcctttatttacagccgcggctttctttttattttttattttttatggggtttggtgagcttttcccgtctttctcgtgctgcgttcaagcacgatgcagggacggcaggggtttggaactggataggccttgtcgccctgttccaaagggcagggcaggtcctgtctgggagacaaggaggcctaggaaagatgagggccaggaagcctcccccacctccttccatcaggggaagggcgagcgaaaggggagagaaaacccacgttcaggagagcatgggggcgggaggggagggcgctgcttatcccaactcgcgtagttgaaacctgagcagaggctcgggcaagcctggagtgacctcgcaaccttacagcgggtcgcaggtgcccgttattcctagactgtcccaggagccaggaaagagggattcggatcatatttaaccctatcttctggctcgctgatgctgcttctctcatggtttatcaccggaatggaaaggaggaaacggggagtgggggaaagggcgaagccaccagaagcagctgcggcattttgctgactattcgcccatggagccggtttgccatccagtgatgccagagtcccggcgcgacagaaagcaggactcccaagatcttcctcctgctgcattttaggcactgaaccccaatcccgaccgtatgttaacactgaattctgagtaggagttttgttttggcagtgtgacgactgcgcatgctcggaaaggggacgcaagtccgagatcccaaacgcggtacagaccaaaccgcagtccacgttacggatcggcttactccgcggagttggcctcatttctgcagtcggcgctccctgtagtttctcctctcgaacgccaggtggagcaaccggccggataccgccacagccctggcaggcggcgctgtgatgcctgagctgatcctctctcctgccacagctcctcaccccctgaaaatgttcgcctgctccaagtttgtctccactccctccttggtcaagagcacctcacagctgctgagccgtccgctatctgcagtggtgctgaaacgaccggagatactgacagatgagagcctcagcagcttggcagtctcatgtccccttacctcacttgtctctagccgcagcttccaaaccagcgccatttcaagggacatcgacacagcagccaagttcattggagctggggctgccacagttggggtggctggttctggggctgggattggaactgtgtttgggagcctcatcattggttatgccaggaacccttctctgaagcaacagctcttctcctacgccattctgggctttgccctctcggaggccatggggctcttttgtctgatggtagcctttctcatcctctttgccatgtgaaggagccgtctccacctcccatagttctcccgcgtctggttggccccgtgtgttccttttcctatacctccccaggcagcctggggaacgtggttggctcagggtttgacag

SEQ ID NO: 109520 - DNA, 878 bp, Homo sapiens
  Payload ID: 1506
  Gene Symbol: ATP5G2
  Gene Name: ATP synthase, H+ transporting, mitochondrial Fo complex, subunit C2 (subunit 9)
  Uniprot ID: Q06055
  ENST ID: ENST00000394349
  CDS Start-End: 134-730
ccacgttacggatcggcttactccgcggagttggcctcatttctgcagtcggcgctccctgtagtttctcctctcgaacgccaggtggagcaaccggccggataccgccacagccctggcaggcggcgctgtgatgcctgagctgatcctgtatgttgcaatcactctatccgtggctgagcgactcgttggcccgggtcacgcatgcgctgagccttcctttcgctcttcccgctgctccgcccctctctgtcttctctgcagtgggagcagctctcctgccacagctcctcaccccctgaaaatgttcgcctgctccaagtttgtctccactccctccttggtcaagagcacctcacagctgctgagccgtccgctatctgcagtggtgctgaaacgaccggagatactgacagatgagagcctcagcagcttggcagtctcatgtccccttacctcacttgtctctagccgcagcttccaaaccagcgccatttcaagggacatcgacacagcagccaagttcattggagctggggctgccacagttggggtggctggttctggggctgggattggaactgtgtttgggagcctcatcattggttatgccaggaacccttctctgaagcaacagctcttctcctacgccattctgggctttgccctctcggaggccatggggctcttttgtctgatggtagcctttctcatcctctttgccatgtgaaggagccgtctccacctcccatagttctcccgcgtctggttggccccgtgtgttccttttcctatacctccccaggcagcctggggaacgtggttggctcagggtttgacagagaaaagacaaataaatactgtattaataagatgtt

SEQ ID NO: 109521 - DNA, 745 bp, Homo sapiens
  Payload ID: 1506
  Gene Symbol: ATP5G2
  Gene Name: ATP synthase, H+ transporting, mitochondrial Fo complex, subunit C2 (subunit 9)
  Uniprot ID: Q06055
  ENST ID: ENST00000549164
  CDS Start-End: 189-614
tgtgacgactgcgcatgctcggaaaggggacgcaagtccgagatcccaaacgcggtacagaccaaaccgcagtccacgttacggatcggcttactccgcggagttggcctcatttctgcagtcggcgctccctgtagtttctcctctcgaacgccagctctcctgccacagctcctcaccccctgaaaatgttcgcctgctccaagtttgtctccactccctccttggtcaagagcacctcacagctgctgagccgtccgctatctgcagtggtgctgaaacgaccggagatactgacagatgagagcctcagcagcttggcagtctcatgtccccttacctcacttgtctctagccgcagcttccaaaccagcgccatttcaagggacatcgacacagcagccaagttcattggagctggggctgccacagttggggtggctggttctggggctgggattggaactgtgtttgggagcctcatcattggttatgccaggaacccttctctgaagcaacagctcttctcctacgccattctgggctttgccctctcggaggccatggggctcttttgtctgatggtagcctttctcatcctctttgccatgtgaaggagccgtctccacctcccatagttctcccgcgtctggttggccccgtgtgttccttttcctatacctccccaggcagcctggggaacgtggttggctcagggtttgacagagaaaagacaaataaatac

SEQ ID NO: 109522 - DNA, 728 bp, Homo sapiens
  Payload ID: 1506
  Gene Symbol: ATP5G2
  Gene Name: ATP synthase, H+ transporting, mitochondrial Fo complex, subunit C2 (subunit 9)
  ENST ID: ENST00000549748
  CDS Start-End: 603-653
ccctctctgtcttctctgcagtgggagcagctctcctgccacagctcctcaccccctgaaaatgttcgcctgctccaagtttgtctccactccctccttgactttgctaaaaggaagaatgatccaaaactctaacgtacatgtgaagatggaaaggccatgagaggaaagaaaatcttgtctgatgatgtaacaacgtggcatagttctgaaactcctctccagtcttccttgaccttcctgcccctgtatgtcattcctgctaggtcaagagcacctcacagctgctgagccgtccgctatctgcagtggtgctgaaacgaccggagatactgacagatgagagcctcagcagcttggcagtctcatgtccccttacctcacttgtctctagccgcagcttccaaaccagcgccatttcaagggacatcgacacagcagccaagttcattggagctggggctgccacagttggggtggctggttctggggctgggattggaactgtgtttgggagcctcatcattggttatgccaggaacccttctctgaagcaacagctcttctcctacgccattctgggctttgccctctcggaggccatggggctcttttgtctgatggtagcctttctcatcctctttgccatgtgaaggagccgtctccacctcccatagttctcccgcgtctggttggccccgtgtgttccttttcctatacctccccag

SEQ ID NO: 109523 - DNA, 1950 bp, Homo sapiens
  Payload ID: 1506
  Gene Symbol: ATP5G2
  Gene Name: ATP synthase, H+ transporting, mitochondrial Fo complex, subunit C2 (subunit 9)
  Uniprot ID: Q06055
  ENST ID: ENST00000552242
  CDS Start-End: 1382-1807
gcaaaattacattcctgtaatggcgtcgctcggggtcccgggaaattgctccgtgggctttcagcggcggtttttatcgccggccggggtgtgcctgtctgcggctcgcctctcctccgggaccgtaaagctgctgccgtgatttatcctccccttctcccaaatccgattaaatggaggagctcggggccggggcgccgcggggcccgggagccgggagggggcggcgggaaggacggggccaaggaggggaggacaaacggcccctcagagagtggcggatttgcctttatttacagccgcggctttctttttattttttattttttatggggtttggtgagcttttcccgtctttctcgtgctgcgttcaagcacgatgcagggacggcaggggtttggaactggataggccttgtcgccctgttccaaagggcagggcaggtcctgtctgggagacaaggaggcctaggaaagatgagggccaggaagcctcccccacctccttccatcaggggaagggcgagcgaaaggggagagaaaacccacgttcaggagagcatgggggcgggaggggagggcgctgcttatcccaactcgcgtagttgaaacctgagcagaggctcgggcaagcctggagtgacctcgcaaccttacagcgggtcgcaggtgcccgttattcctagactgtcccaggagccaggaaagagggattcggatcatatttaaccctatcttctggctcgctgatgctgcttctctcatggtttatcaccggaatggaaaggaggaaacggggagtgggggaaagggcgaagccaccagaagcagctgcggcattttgctgactattcgcccatggagccggtttgccatccagtgatgccagagtcccggcgcgacagaaagcaggactcccaagatcttcctcctgctgcattttaggcactgaaccccaatcccgaccgtatgttaacactgaattctgagtaggagttttgttttggcagtgtgacgactgcgcatgctcggaaaggggacgcaagtccgagatcccaaacgcggtacagaccaaaccgcagtccacgttacggatcggcttactccgcggagttggcctcatttctgcagtcggcgctccctgtagtttctcctctcgaacgccaggtggagcaaccggccggataccgccacagccctggcaggcggcgctgtgatgcctgagctgatccttttccctcttgttgcccaggctggagtacaatggcgcaatcttggctcaccgtagcctctgcctcctggattcaagcaattctcctgcctcagcctcctgagtagctgggattacagctctcctgccacagctcctcaccccctgaaaatgttcgcctgctccaagtttgtctccactccctccttggtcaagagcacctcacagctgctgagccgtccgctatctgcagtggtgctgaaacgaccggagatactgacagatgagagcctcagcagcttggcagtctcatgtccccttacctcacttgtctctagccgcagcttccaaaccagcgccatttcaagggacatcgacacagcagccaagttcattggagctggggctgccacagttggggtggctggttctggggctgggattggaactgtgtttgggagcctcatcattggttatgccaggaacccttctctgaagcaacagctcttctcctacgccattctgggctttgccctctcggaggccatggggctcttttgtctgatggtagcctttctcatcctctttgccatgtgaaggagccgtctccacctcccatagttctcccgcgtctggttggccccgtgtgttccttttcctatacctccccaggcagcctggggaacgtggttggctcagggtttgacagagaaaagacaaataaatactgtattaataag

SEQ ID NO: 109524 - DNA, 668 bp, Homo sapiens
  Payload ID: 1506
  Gene Symbol: ATP5G2
  Gene Name: ATP synthase, H+ transporting, mitochondrial Fo complex, subunit C2 (subunit 9)
  Uniprot ID: Q06055
  ENST ID: ENST00000602871
  CDS Start-End: 95-520
tgagccttcctttcgctcttcccgctgctccgcccctctctgtcttctctgcagtgggagcagctctcctgccacagctcctcaccccctgaaaatgttcgcctgctccaagtttgtctccactccctccttggtcaagagcacctcacagctgctgagccgtccgctatctgcagtggtgctgaaacgaccggagatactgacagatgagagcctcagcagcttggcagtctcatgtccccttacctcacttgtctctagccgcagcttccaaaccagcgccatttcaagggacatcgacacagcagccaagttcattggagctggggctgccacagttggggtggctggttctggggctgggattggaactgtgtttgggagcctcatcattggttatgccaggaacccttctctgaagcaacagctcttctcctacgccattctgggctttgccctctcggaggccatggggctcttttgtctgatggtagcctttctcatcctctttgccatgtgaaggagccgtctccacctcccatagttctcccgcgtctggttggccccgtgtgttccttttcctatacctccccaggcagcctggggaacgtggttggctcagggtttgacagagaaaagacaaataaatactgtattaataagatgtt

SEQ ID NO: 109525 - DNA, 5484 bp, Homo sapiens
  Payload ID: 1507
  Gene Symbol: ATP5G3
  Gene Name: ATP synthase, H+ transporting, mitochondrial Fo complex, subunit C3 (subunit 9)
  Uniprot ID: P48201
  ENST ID: ENST00000284727
  CDS Start-End: 3026-3454
ctaaaaaaagaatcccaggattttacctcctgtgtgttttcttcttgcttcttcatggtccatgataccagctgaggttgttagtacaataaaaccaaaccggccggatagaagcagattattctgccatttttccagatgtttgagttgcacatcaaatctggggctgattactcaacgcttgtttagcctacctgtgaggttcacaacaatttttcccagctctgtaatcatcagtgattcaaatttgccaatgtaaccatacttcaccattacagtgagaaaccagatgatgattttggagcacagcctaataagaacctggggtttgcctcttctttcggcattgttgatgctcttgagagcatcaggcaggacattcatgtgcaccattgtggcggcacgaaaagatggcggaaagagccaaacgacaaccctttcattgctcttgacaccgtgggtcaggaatttgggtaaagctcatttggatggctcatttttgttcctcgtggtgttgggaaggcttgacgagagctagagatccaagaaggcctcactcatgtgttggacacctcagttctctttggacttttttctatccaagtggtttctggagagggctatatttgggagtgatctgtcatacttctctttgctatcggatttctatcttcatcatgccatcatcactcaggctatcatcatcacccggtcttatcagatattgccaaattatgatgtcataacttactatgactgtccccactgtccatgaaaaaacacagaaaagattagatacttctcagggaggtccctgttcatctttatggcctcactttagtcctctcagaaggtactctttttcttcaatcttcctcagtgcaaatatccaccctcaatcaacatcaacatgggttggtgttactccaattcactcctctttttcttttctttttttttttgtttttgtttttttgagatggagtctcgctctgtcacccaggctggagtgcagtggcgtgatcttggctcacggcaacctctgactcccaggttcacgccattctcctgacttagcctcctgagtagctgggactacaggcacctgccacaacgcttggctaattttttgtatttttagtaaaaagacggggtttcaccgtgttagccaggatggtctccatctcctggccttgtgatccgcccgccttggcctcccaagtgccgggattacaggcgtgaaccaccgtgcctggccttcattctcctctttctataacgcaatcttaggatgcaaaaccaagcaaagtctgaattaatctatctagaatagcaccgtggagtcacagccatggtcaggcccctccaaagaacagactggatttcggaacccatgtctctccctgccacaagcaactagtccatatgcaacttggaagcagccactgtggatcttggcttctttcttgcttcctcctcaatagttactgccactgatttagtgctaaagagataggaacatcacttaaaaccatctctacacataaatccacttagaataattttttcccctggaggatctattattgaagtacaaggctttactgtttattctactgtagacaccacaggacaccatgttcttggttagaattgagtacttgagaaactatatgaataattgcttgttgaacagtacacgtgaattatctctattttccagctaaagattgagcctaaaatgattagtatttttgtaattttgaatcatttgatccatttgaagttggattagtgacaaagtcttattcatttttcaagtgttagttctgagggcttctcccagaactagcagcaaccagcgttgctgctagataatattgcacctttaagctaacaagtaaaaagctgatcctctgggttgatgttgtctcatgctagggctctaggcagagtgggctggagttcagtccccagccatcttcttagcagggcattctagatgtttaatcttttatgttgacgtgttgatatcacttccattagccatttgttagaattactaaattaaatttacataattcaaggatctaaaaagaccagaagttcagtcagagccatttttctgagatatttctgcatccctctgaagaagataatttgtccaaacttaacaaaaacaggtgttaaaattgagtacgttctgagaatactcagactttttttaagactttttttagtctcaaaccctacatgaaatacaatcccttaaatcttccaatcttagagctagaagaaaagtcgagcaccctcactttacccagaggcaattttgtgccccagatgacaaagctcttagatctactcatttgcttatggctccaccagtacttctaggtcaggccctctttcacctgaaggattagccatacttctggaaccattttccaggttccttgaaataaatatcttcgctttgctggggaccctagtttcctgttaagtagtgaatgacccttctttcctcccgccagccacagtcctatttcacagaggaagagaatgaccagcaagtcaacttctactacagagaagcagcaactgataaaaggccaaatcttacaaggtgccaacgtgaagaaaaaggcccactatcctgcagccaactcatatcaaaagttaatctgtttagtcctctctgccggggtgaatctacagtttttctttttgtctccctcttgccccatcaccaggtggttgtcgttgtccttcccggctagttgccaataaagttgttacaaagtgaccttgagtgtcttccttggtgcacccgaaaccccgccttcttcatccgggtgctgcggcgcgaataagagccggaccgcgcttgcgcattgagtcccactccttcgacctctgccgcagcccgtgccgccgccgcctcctgggaagagaggaagcgggagaggagcccacgtcgcctgtcacccaatatctccagccgcgcagtcccgaagagtgtaagatgttcgcctgcgccaagctcgcctgcaccccctctctgatccgagctggatccagagttgcatacagaccaatttctgcatcagtgttatctcgaccagaggctagtaggactggagagggctctacggtatttaatggggcccagaatggtgtgtctcagctaatccaaagggagtttcagaccagtgcaatcagcagagacattgatactgctgccaaatttattggtgcaggtgctgcaacagtaggagtggctggttctggtgctggtattggaacagtctttggcagccttatcattggttatgccagaaacccttcgctgaagcagcagctgttctcatatgctatcctgggatttgccttgtctgaagctatgggtctcttttgtttgatggttgctttcttgattttgtttgccatgtaacaaattactgcttgacatgttggcattcatattaattacggatgtaattctgtgtatcttactgtgactccgaaaactgtagtattggtgtcatgggaatgtacgttatttccaaagtcatttcattaaagatgaaaactttaatttcttctgtgatttgtacttacactaagtttagattatcacaaagaagaacgtgcattcaggcagatgctgtcccattcagaggaagctacagcagttgctccactgatgaaaaatattccaatgtaatttttatgggaattcttttatatagtgttctgcatattgtaattcatagggcttttgtttattcatataaaggataaatatttgggtgttttgagcttctataaaatatgattaattaaaggtagttaatactcaagatggtcttgagtttttaaggtctaacatcagttagaatacttcaaatcagaatcaccttccaagactgacttgacaggtggttctaaaaataaatcacgtcagctttttaggaaatgaagccttaagctagggggtaatgtgacttttgtttttcagtaagtctcacattaagcaattgtgtgcctctaatgaatcttccatgtcttttcagaacaggctcagtccaactagcagctagtttcttacttgaacaagactattaaaaaccaaatatcaaaaaactgaattggctagatttttacagccaaaaattgctgtaaggcagtgtgtatcactgttgctaacatgtttatagtgggagtcttggggatgatagctggttcaacagtattttgctgctaatactttatgttgcttcttggtcaaacttttcccattcaaaggaagaagatggtgctactatagacagtttttcccctagcaaatatattgtaccataatatctatcatccaagtttcagggttttttgaaagttgataattaggaaagtgacattttacttttcttagtgccctttgcctgtttgatttccattgagaaagagcagtcaccaaagttcctcaagtgtcggaagaccacctccatcagaatcagtgcttgtttaaaaaataaaaatccctaggttccagacctactgaattggactctttggacatgagactcagcaatctacatctttaaaaaggcttcccaggtggtttttgtgcatactgtttgagagtcactaagttatatatatatcctaccttctgtaaagtgaaatgaggccccaaaaagctaaagaggtagagctgctacctcgtttttagttgattcatcatctagtctatatcacccaaaagaattggaaataggtattcaaacaaaaacctgtatacaagtattcatagaagcactacttacaatagccgaaaggtagaaacaaccaaatgtctatcagctgatgaatggataagtaaaatacatccatataatggaatattcagccatgaaaaggaatgaggcactgatacataatgaatagatgtgagtgaaccctaagaaagcatgctaagtggaagaagccagccacatgattccatttatatgaaatatccaaaataggcaaatccacggtgacaaagccaattagtagttatcaggaactagggagggggtgaaaagggagtgactgcgtaatgcgtatggggattccttttaggatgatgaaaattggatgaattacagctggtctgatggtagtgggttatcagaacttattaacattagtgtcattaaagttggtatatagcccctcactgctaaatctggctcaaaaattaaaagattattaaaatttgatgaattagtggtgatggttgcacaacattgtaaatataataaatgtcactgaattgtacactttaaggtggttaaaatggcaaattttacatgtcttactgaaactactatttaatacaaagtacatagtataaaattttaaaagtgataggaaaatgcttagattaatattcacctattccaagtatattttaaataaaaacagtcttggtaaaga

SEQ ID NO: 109526 - DNA, 842 bp, Homo sapiens
  Payload ID: 1507
  Gene Symbol: ATP5G3
  Gene Name: ATP synthase, H+ transporting, mitochondrial Fo complex, subunit C3 (subunit 9)
  Uniprot ID: P48201
  ENST ID: ENST00000392541
  CDS Start-End: 271-699
ctgggaaggtaagtggagggcacagggagcccggcctggccagggcggagcggcgcccagtagggacccattcattgtgccggcgcctcactgggcacggggcccaagctgacggcgtgcacgggagcctgcggggcctgggtgggaagaacaggcccctggagggcacttgaccttaagcctcttttcctccgcagagaggaagcgggagaggagcccacgtcgcctgtcacccaatatctccagccgcgcagtcccgaagagtgtaagatgttcgcctgcgccaagctcgcctgcaccccctctctgatccgagctggatccagagttgcatacagaccaatttctgcatcagtgttatctcgaccagaggctagtaggactggagagggctctacggtatttaatggggcccagaatggtgtgtctcagctaatccaaagggagtttcagaccagtgcaatcagcagagacattgatactgctgccaaatttattggtgcaggtgctgcaacagtaggagtggctggttctggtgctggtattggaacagtctttggcagccttatcattggttatgccagaaacccttcgctgaagcagcagctgttctcatatgctatcctgggatttgccttgtctgaagctatgggtctcttttgtttgatggttgctttcttgattttgtttgccatgtaacaaattactgcttgacatgttggcattcatattaattacggatgtaattctgtgtatcttactgtgactccgaaaactgtagtattggtgtcatgggaatgtacgttatttccaaagtcatttcattaaagatgaaaacttta

SEQ ID NO: 109527 - DNA, 795 bp, Homo sapiens
  Payload ID: 1507
  Gene Symbol: ATP5G3
  Gene Name: ATP synthase, H+ transporting, mitochondrial Fo complex, subunit C3 (subunit 9)
  Uniprot ID: P48201
  ENST ID: ENST00000409194
  CDS Start-End: 146-574
agtcccactccttcgacctctgccgcagcccgtgccgccgccgcctcctgggaagcctcttttcctccgcagagaggaagcgggagaggagcccacgtcgcctgtcacccaatatctccagccgcgcagtcccgaagagtgtaagatgttcgcctgcgccaagctcgcctgcaccccctctctgatccgagctggatccagagttgcatacagaccaatttctgcatcagtgttatctcgaccagaggctagtaggactggagagggctctacggtatttaatggggcccagaatggtgtgtctcagctaatccaaagggagtttcagaccagtgcaatcagcagagacattgatactgctgccaaatttattggtgcaggtgctgcaacagtaggagtggctggttctggtgctggtattggaacagtctttggcagccttatcattggttatgccagaaacccttcgctgaagcagcagctgttctcatatgctatcctgggatttgccttgtctgaagctatgggtctcttttgtttgatggttgctttcttgattttgtttgccatgtaacaaattactgcttgacatgttggcattcatattaattacggatgtaattctgtgtatcttactgtgactccgaaaactgtagtattggtgtcatgggaatgtacgttatttccaaagtcatttcattaaagatgaaaactttaatttcttctgtgatttgtacttacactaagtttagattatcacaaagaagaacgtgcattcaggcagatgctgtccca

SEQ ID NO: 109528 - DNA, 603 bp, Homo sapiens
  Payload ID: 1508
  Gene Symbol: ATP5H
  Gene Name: ATP synthase, H+ transporting, mitochondrial Fo complex, subunit d
  Uniprot ID: O75947
  ENST ID: ENST00000301587
  CDS Start-End: 49-534
cttgctgcggaggaccgtgggcagccagggtcggtgaaggatcccaaaatggctgggcgaaaacttgctctaaaaaccattgactgggtagcttttgcagagatcataccccagaaccaaaaggccattgctagttccctgaaatcctggaatgagaccctcacctccaggttggctgctttacctgagaatccaccagctatcgactgggcttactacaaggccaatgtggccaaggctggcttggtggatgactttgagaagaagtttaatgcgctgaaggttcccgtgccagaggataaatatactgcccaggtggatgccgaagaaaaagaagatgtgaaatcttgtgctgagtgggtgtctctctcaaaggccaggattgtagaatatgagaaagagatggagaagatgaagaacttaattccatttgatcagatgaccattgaggacttgaatgaagctttcccagaaaccaaattagacaagaaaaagtatccctattggcctcaccaaccaattgagaatttataaaattgagtccaggaggaagctctggcccttgtattacacattctggacattaaaaataataattataca

SEQ ID NO: 109529 - DNA, 553 bp, Homo sapiens
  Payload ID: 1508
  Gene Symbol: ATP5H
  Gene Name: ATP synthase, H+ transporting, mitochondrial Fo complex, subunit d
  Uniprot ID: O75947
  ENST ID: ENST00000344546
  CDS Start-End: 71-484
ttcccgtgacccacttccgttacttgctgcggaggaccgtgggcagccagggtcggtgaaggatcccaaaatggctgggcgaaaacttgctctaaaaaccattgactgggtagcttttgcagagatcataccccagaaccaaaaggccattgctagttccctgaaatcctggaatgagaccctcacctccaggttggctgctttacctgagaatccaccagctatcgactgggcttactacaaggccaatgtggccaaggctggcttggtggatgactttgagaagaaggtgaaatcttgtgctgagtgggtgtctctctcaaaggccaggattgtagaatatgagaaagagatggagaagatgaagaacttaattccatttgatcagatgaccattgaggacttgaatgaagctttcccagaaaccaaattagacaagaaaaagtatccctattggcctcaccaaccaattgagaatttataaaattgagtccaggaggaagctctggcccttgtattacacattctggacattaaaaataataattataca

SEQ ID NO: 109530 - DNA, 533 bp, Homo sapiens
  Payload ID: 1508
  Gene Symbol: ATP5H
  Gene Name: ATP synthase, H+ transporting, mitochondrial Fo complex, subunit d
  ENST ID: ENST00000538432
  CDS Start-End: 36-281
accgtgggcagccagggtcggtgaaggatcccaaaatggctgggcgaaaacttgctctaaaaaccattgactgggtagcttttgcagagatcataccccagaaccaaaaggccattgctagttccctgaaatcctggaatgagaccctcacctccaggttggctgctttacctgagaatccaccagctatcgactgggcttactacaaggccaatgtggccaaggctggcttggtggatgactttgagaagaagctctctattatagctaagttaagttagagtgaattaaatggaagagttaacagccatataaaggaatgacttgtcaataaatgcaacaacatggacgaatttcaaaataattatgcggagtgaaagaagccaacaagaaaaagaagagtatagcatatgattccatctttgtgaaatcttgtgctgagtgggtgtctctctcaaaggccaggattgtagaatatgagaaagagatggagaagatgaagaacttaattccatttgatcagatgaccattg

SEQ ID NO: 109531 - DNA, 365 bp, Homo sapiens
  Payload ID: 1509
  Gene Symbol: ATP5I
  Gene Name: ATP synthase, H+ transporting, mitochondrial Fo complex, subunit E
  Uniprot ID: P56385
  ENST ID: ENST00000304312
  CDS Start-End: 92-301
agctccgcctttgcctccaaggctttgctggcttgtgcggcatcctgctccgtctgcaggttgtgcttccggtgcggaggtcagggacaagatggtgccaccggtgcaggtctctccgctcatcaagctcggccgctactccgccctgttcctcggtgtggcctacggagccacgcgctacaattacctaaaacctcgggcagaagaggagaggaggatagcagcagaagagaagaagaagcaggatgaactgaaacggattgccagagaattggcagaagatgacagcatattaaagtgagtgaccctgcgacccactctttggaccagcagcggatgaataaagcttcctgtgttgtgtgata

SEQ ID NO: 109532 - DNA, 607 bp, Homo sapiens
  Payload ID: 1510
  Gene Symbol: ATP5J2
  Gene Name: ATP synthase, H+ transporting, mitochondrial Fo complex, subunit F2
  Uniprot ID: P56134
  ENST ID: ENST00000292475
  CDS Start-End: 191-475
actgcaggaccctcggatttttgctgtccaggcacctcgcccttcgcttcatggccttctagtagttccagggtgttcgcagttgtgacctgcttcccgtgagcctctgctctacgcccctggatggggcgtgcattccctacccagcagccctcgcgcggtccggcacagcggacaccaggactccaaaatggcgtcagttggtgagtgtccggccccagtaccagtgaaggacaagaaacttctggaggtcaaactgggggagctgccaagctggatcttgatgcgggacttcagtcctagtggcattttcggagcgtttcaaagaggttactaccggtactacaacaagtacatcaatgtgaagaaggggagcatctcggggattaccatggtgctggcatgctacgtgctctttagctactccttttcctacaagcatctcaagcacgagcggctccgcaaataccactgaagaggacacactctgcacccccccaccccacgaccttggcccgagcccctccgtgaggaacacaatctcaatcgttgctgaatcctttcatatcctaataggaattaacctccaaataaaacatgactggta

SEQ ID NO: 109533 - DNA, 323 bp, Homo sapiens
  Payload ID: 1510
  Gene Symbol: ATP5J2
  Gene Name: ATP synthase, H+ transporting, mitochondrial Fo complex, subunit F2
  Uniprot ID: P56134
  ENST ID: ENST00000359832
  CDS Start-End: 24-191
acagcggacaccaggactccaaaatggcgtcagttggtgagtgtccggccccagtaccagtgaaggacaagaaacttctggaggtcaaactgggggagctgccaagctggatcttgatgcgggacttcagtcctagtggcattttcggagcgtttcaaagagagcacgagcggctccgcaaataccactgaagaggacacactctgcacccccccaccccacgaccttggcccgagcccctccgtgaggaacacaatctcaatcgttgctgaatcctttcatatcctaataggaattaacctccaaataaaacatgactggta

SEQ ID NO: 109534 - DNA, 305 bp, Homo sapiens
  Payload ID: 1510
  Gene Symbol: ATP5J2
  Gene Name: ATP synthase, H+ transporting, mitochondrial Fo complex, subunit F2
  Uniprot ID: P56134
  ENST ID: ENST00000394186
  CDS Start-End: 21-287
gcggacaccaggactccaaaatggcgtcagttgtaccagtgaaggacaagaaacttctggaggtcaaactgggggagctgccaagctggatcttgatgcgggacttcagtcctagtggcattttcggagcgtttcaaagaggttactaccggtactacaacaagtacatcaatgtgaagaaggggagcatctcggggattaccatggtgctggcatgctacgtgctctttagctactccttttcctacaagcatctcaagcacgagcggctccgcaaataccactgaagaggacacactctgcac

SEQ ID NO: 109535 - DNA, 460 bp, Homo sapiens
  Payload ID: 1510
  Gene Symbol: ATP5J2
  Gene Name: ATP synthase, H+ transporting, mitochondrial Fo complex, subunit F2
  ENST ID: ENST00000449683
  CDS Start-End: 27-323
ggcacagcggacaccaggactccaaaatggcgtcagttgtgggtattttttctcactcttccgtttcagtaccagtgaaggacaagaaacttctggaggtcaaactgggggagctgccaagctggatcttgatgcgggacttcagtcctagtggcattttcggagcgtttcaaagaggttactaccggtactacaacaagtacatcaatgtgaagaaggggagcatctcggggattaccatggtgctggcatgctacgtgctctttagctactccttttcctacaagcatctcaagcacgagcggctccgcaaataccactgaagaggacacactctgcacccccccaccccacgaccttggcccgagcccctccgtgaggaacacaatctcaatcgttgctgaatcctttcatatcctaataggaattaacctccaaataaaacatgactggtacgtgt

SEQ ID NO: 109536 - DNA, 541 bp, Homo sapiens
  Payload ID: 1510
  Gene Symbol: ATP5J2
  Gene Name: ATP synthase, H+ transporting, mitochondrial Fo complex, subunit F2
  Uniprot ID: P56134
  ENST ID: ENST00000414062
  CDS Start-End: 25-174
cacagcggacaccaggactccaaaatggcgtcagttgtaccagtgaaggacaagaaacttctggaggtcaaactgggggagctgccaagctggatcttgatgcgggacttcagtcctagtggcattttcggagcgtttcaaagagagcacgagcggctccgcaaataccactgaagaggacacactctgcacccccccaccccacgaccttggcccgagcccctccgtgaggaacacaatctcaatcgttgctgaatcctttcatatcctaataggaattaacctccaaataaaacatgactgcagtgctttgaaagcatgaagcataccctgcactccctggctccctgcaggattccagcctcctgccgggctccctgcacaggaccagagccagcctcacgctgacccacagagctgcttcccgggaaacctggaagtgcagacctgagcggggaccctggggactccttccagcagggagcacatctctgccagactccgtgccagccccactgactccacccgggctcccgcttct

SEQ ID NO: 109537 - DNA, 306 bp, Homo sapiens
  Payload ID: 1510
  Gene Symbol: ATP5J2
  Gene Name: ATP synthase, H+ transporting, mitochondrial Fo complex, subunit F2
  Uniprot ID: P56134
  ENST ID: ENST00000488775
  CDS Start-End: 27-176
ggcacagcggacaccaggactccaaaatggcgtcagttgtaccagtgaaggacaagaaacttctggaggtcaaactgggggagctgccaagctggatcttgatgcgggacttcagtcctagtggcattttcggagcgtttcaaagagagcacgagcggctccgcaaataccactgaagaggacacactctgcacccccccaccccacgaccttggcccgagcccctccgtgaggaacacaatctcaatcgttgctgaatcctttcatatcctaataggaattaacctccaaataaaacatgactgg

SEQ ID NO: 109538 - DNA, 84 bp, Homo sapiens
  Payload ID: 1510
  Gene Symbol: ATP5J2
  Gene Name: ATP synthase, H+ transporting, mitochondrial Fo complex, subunit F2
  ENST ID: ENST00000523680
  CDS Start-End: 27-84
ggcacagcggacaccaggactccaaaatggcgtcagttggtgagtgtccggccccaggttactaccggtactacaacaagtaca

SEQ ID NO: 109539 - DNA, 614 bp, Homo sapiens
  Payload ID: 1511
  Gene Symbol: ATP5J
  Gene Name: ATP synthase, H+ transporting, mitochondrial Fo complex, subunit F6
  Uniprot ID: P18859
  ENST ID: ENST00000284971
  CDS Start-End: 128-454
tgaaacggcggcccataatgcattgcgatggcgggtaggcgtgtgggggcggagccagggccggaagtagagcggaggtggtggcggcggaggctttggcagctcgggactgagtgcaagaatcagcatgattcttcagaggctcttcaggttctcctctgtcattcggtcagccgtctcagtccatttgcggaggaacattggtgttacagcagtggcatttaataaggaacttgatcctatacagaaactctttgtggacaagattagagaatacaaatctaagcgacagacatctggaggacctgttgatgctagttcagagtatcagcaagagctggagagggagctttttaagctcaagcaaatgtttggtaatgcagacatgaatacatttcccaccttcaaatttgaagatcccaaatttgaagtcatcgaaaaaccccaggcctgaagaaataaagtaaaattaatctggtaatttgtcacggattagttgtacaactagttagaagtttcagaataaacatgcatttcataactgtcaaatgttcttttaattctgagtccaaataaattatttggtgatgttgagtgtgttcttgatgaattga

SEQ ID NO: 109540 - DNA, 826 bp, Homo sapiens
  Payload ID: 1511
  Gene Symbol: ATP5J
  Gene Name: ATP synthase, H+ transporting, mitochondrial Fo complex, subunit F6
  Uniprot ID: P18859
  ENST ID: ENST00000400087
  CDS Start-End: 340-666
aaaaggccccggaacgaggccggcccgcgagggcccgcgctcccctcctccccggcggccgcactcacccactccggaatcggccctgtcgcccccgcccgcactccagagccggctgagaacggcagcggcgagggctccacgtgcagcgtctctccgggtaagacctgcagctcccgcgactagaagtgtgaggtcccagggcccttcccgcggaatcggcgctgagaagccccaacccccctcccgcctcccaggcaccttcgggtccaggactacaactcccggcagggtgcgcaaaacgaccgcccaaggcaacggaggctcacgagaatcagcatgattcttcagaggctcttcaggttctcctctgtcattcggtcagccgtctcagtccatttgcggaggaacattggtgttacagcagtggcatttaataaggaacttgatcctatacagaaactctttgtggacaagattagagaatacaaatctaagcgacagacatctggaggacctgttgatgctagttcagagtatcagcaagagctggagagggagctttttaagctcaagcaaatgtttggtaatgcagacatgaatacatttcccaccttcaaatttgaagatcccaaatttgaagtcatcgaaaaaccccaggcctgaagaaataaagtaaaattaatctggtaatttgtcacggattagttgtacaactagttagaagtttcagaataaacatgcatttcataactgtcaaatgttcttttaattctgagtccaaataaattatttggtgatgttgagtgtgttcttgatgaattga

SEQ ID NO: 109541 - DNA, 647 bp, Homo sapiens
  Payload ID: 1511
  Gene Symbol: ATP5J
  Gene Name: ATP synthase, H+ transporting, mitochondrial Fo complex, subunit F6
  Uniprot ID: P18859
  ENST ID: ENST00000400090
  CDS Start-End: 161-487
cccggaacgaggccggcccgcgagggcccgcgctcccctcctccccggcggccgcactcacccactccggaatcggccctgtcgcccccgcccgcactccagagccggctgagaacggcagcggcgagggctccacgtgcagcgtctctccggaatcagcatgattcttcagaggctcttcaggttctcctctgtcattcggtcagccgtctcagtccatttgcggaggaacattggtgttacagcagtggcatttaataaggaacttgatcctatacagaaactctttgtggacaagattagagaatacaaatctaagcgacagacatctggaggacctgttgatgctagttcagagtatcagcaagagctggagagggagctttttaagctcaagcaaatgtttggtaatgcagacatgaatacatttcccaccttcaaatttgaagatcccaaatttgaagtcatcgaaaaaccccaggcctgaagaaataaagtaaaattaatctggtaatttgtcacggattagttgtacaactagttagaagtttcagaataaacatgcatttcataactgtcaaatgttcttttaattctgagtccaaataaattatttggtgatgttgagtgtgttcttgatgaattga

SEQ ID NO: 109542 - DNA, 1179 bp, Homo sapiens
  Payload ID: 1511
  Gene Symbol: ATP5J
  Gene Name: ATP synthase, H+ transporting, mitochondrial Fo complex, subunit F6
  Uniprot ID: P18859
  ENST ID: ENST00000400093
  CDS Start-End: 693-1019
gcggccgcgggggggcccttgtgggggaaaaggccccggaacgaggccggcccgcgagggcccgcgctcccctcctccccggcggccgcactcacccactccggaatcggccctgtcgcccccgcccgcactccagagccggctgagaacggcagcggcgagggctccacgtgcagcgtctctccgggtaagacctgcagctcccgcgactagaagtgtgaggtcccagggcccttcccgcggaatcggcgctgagaagccccaacccccctcccgcctcccaggcaccttcgggtccaggactacaactcccggcagggtgcgcaaaacgaccgcccaaggcaacggaggctcacgaggtacaaggaagcacaacgccccaatccgctttgttttacacagtctcactttccctgcacctttatacacttcgataaccctaacgaacaggacgctgactcggaggggagcttgaactaggggaaaggccactcaaagagcgcatgcgtacagagcaaggtttcaaggaggggaaaaagaacgggtcaaattaggcgaagaaaagatggcggaggctgtgccaggggacccggaagcacttaccctccacttcctcctcctgtttggcttctgtctcacctagacccgtccggtcgcagactgtctccgagacgcttcctgtccgaatcagcatgattcttcagaggctcttcaggttctcctctgtcattcggtcagccgtctcagtccatttgcggaggaacattggtgttacagcagtggcatttaataaggaacttgatcctatacagaaactctttgtggacaagattagagaatacaaatctaagcgacagacatctggaggacctgttgatgctagttcagagtatcagcaagagctggagagggagctttttaagctcaagcaaatgtttggtaatgcagacatgaatacatttcccaccttcaaatttgaagatcccaaatttgaagtcatcgaaaaaccccaggcctgaagaaataaagtaaaattaatctggtaatttgtcacggattagttgtacaactagttagaagtttcagaataaacatgcatttcataactgtcaaatgttcttttaattctgagtccaaataaattatttggtgatgttgagtgtgttcttgatgaattga

SEQ ID NO: 109543 - DNA, 589 bp, Homo sapiens
  Payload ID: 1511
  Gene Symbol: ATP5J
  Gene Name: ATP synthase, H+ transporting, mitochondrial Fo complex, subunit F6
  Uniprot ID: P18859
  ENST ID: ENST00000400094
  CDS Start-End: 103-429
agagcggaggtggtggcggcggaggctttggcagctcgggactgagtgcaaggaatatgcactgaagaggcagcgaacctactaacctttggccgaatcagcatgattcttcagaggctcttcaggttctcctctgtcattcggtcagccgtctcagtccatttgcggaggaacattggtgttacagcagtggcatttaataaggaacttgatcctatacagaaactctttgtggacaagattagagaatacaaatctaagcgacagacatctggaggacctgttgatgctagttcagagtatcagcaagagctggagagggagctttttaagctcaagcaaatgtttggtaatgcagacatgaatacatttcccaccttcaaatttgaagatcccaaatttgaagtcatcgaaaaaccccaggcctgaagaaataaagtaaaattaatctggtaatttgtcacggattagttgtacaactagttagaagtttcagaataaacatgcatttcataactgtcaaatgttcttttaattctgagtccaaataaattatttggtgatgttgagtgtgttcttgatgaattga

SEQ ID NO: 109544 - DNA, 492 bp, Homo sapiens
  Payload ID: 1511
  Gene Symbol: ATP5J
  Gene Name: ATP synthase, H+ transporting, mitochondrial Fo complex, subunit F6
  ENST ID: ENST00000400099
  CDS Start-End: 47-406
cgtccggtcgcagactgtctccgagacgcttcctgtccgaatcagcatgattcttcagaggctcttcaggttctcctctgtcattcggtcagccgtctcagtccatttgcggaggaacattggtgttacagcagtggcatttaataaggaacttgatcctatacagaaactctttgtggacaagattagagaatacaaatctaagcgacagacatctggaggacctgttgatgctagttcagagtatcagcaagagctggagagggagctttttaagctcaagcaaatgtttggtaatgcagacatgaatacatttcccaccttcaaatttgaagagcatttttctcagcatttgagaagttggcagccatccagagatgatgacattctaatcttaagcagctaaccagcagctagccttgtagctacagaagaaaatgtttgccgatccctgactcgtggtgaaaattttattttgggggcagagccatg

SEQ ID NO: 109545 - DNA, 589 bp, Homo sapiens
  Payload ID: 1511
  Gene Symbol: ATP5J
  Gene Name: ATP synthase, H+ transporting, mitochondrial Fo complex, subunit F6
  Uniprot ID: P18859
  ENST ID: ENST00000457143
  CDS Start-End: 79-429
tagacccgtccggtcgcagactgtctccgagacgcttcctgtccggtgagcgtcgaccgactgaaacggcggcccataatgcattgcgatggcggaatcagcatgattcttcagaggctcttcaggttctcctctgtcattcggtcagccgtctcagtccatttgcggaggaacattggtgttacagcagtggcatttaataaggaacttgatcctatacagaaactctttgtggacaagattagagaatacaaatctaagcgacagacatctggaggacctgttgatgctagttcagagtatcagcaagagctggagagggagctttttaagctcaagcaaatgtttggtaatgcagacatgaatacatttcccaccttcaaatttgaagatcccaaatttgaagtcatcgaaaaaccccaggcctgaagaaataaagtaaaattaatctggtaatttgtcacggattagttgtacaactagttagaagtttcagaataaacatgcatttcataactgtcaaatgttcttttaattctgagtccaaataaattatttggtgatgttgagtgtgttcttgatgaattga

SEQ ID NO: 109546 - DNA, 1577 bp, Homo sapiens
  Payload ID: 1512
  Gene Symbol: ATP5L
  Gene Name: ATP synthase, H+ transporting, mitochondrial Fo complex, subunit G
  Uniprot ID: O75964
  ENST ID: ENST00000300688
  CDS Start-End: 513-824
tgattgctcggcccctaactttatatgtttggccttggaccctctctacctctgtacaacgatcgtgttggactagaagaatctcagcgaatccttctccagtactgacttcaaaggttctcagaatcgcggcgaaagcaccctacgcaaaatagcggaggtcggcgccaagaaaagcactgcaggttcagggcgcatgcgcatttccgctccttgccggttttccggacctctacgagtggctgccccacaaaatgcctgcttctctgcggaatcctactgttcttcacatgctctctaataccatcttttcatatccactttctcttccatgttgaaaaattaaattgacaggctggattctgcaaagatctttggacatttaagtatcttcgaccggcgcgaaaagaggcggcctgaccttggaagtgggacggggtcctgcagcgggtccttccggcgggtgacattcagccggcggttcggggcgacggactctccattccagaaccatggcccaatttgtccgtaaccttgtggagaagaccccggcgctggtgaacgctgctgtgacttactcgaagcctcgattggccacattttggtactacgccaaggttgagctggttcctcccacccctgctgagatccctagagctattcagagcctgaaaaaaatagtcaatagtgctcagactggtagcttcaaacagctcacagttaaggaagctgtgctgaatggtttggtggccactgaggtgttgatgtggttttatgtcggagagattataggcaagcggggcatcattggctatgatgtttgaagaccaatctttaacatctgattatatttgatttattatttgagtgttgttggaccatgtgtgatcagactgctatctgaataaaataagatttgtcaaaactcagtgttttctccatcagatactccatgaaaggtcacaatttctcttgatattaagctgggttgtctttaaacaaccctaaatacacgtctgtttagcccgcaattggaaaggatatatgtggcaatattaacctggtacatgaatatatggggataacattttaatttgaaggtttggaatatatatatttaagctttatttccagaacagtgagggttaggtcttgggaaaactataacttgccaaagtagaagaaatagtagtaccatatgccaaagtgatagagatgaatcatgtcagtagttagaataacatttcaactgttttctttgctaaaatcacagaaagaccctattgacaacatctatgtctgtaaaaatgttagagtacttgtcatcttgaatatagcctccccaagagagaacagggtggtattctaagtatgtttctttgtaacatctttagcagtaggacagagccatacatgtgaaatctgatttttatgtgtgttattcgtttgtctggttttactacctttgcaaaaacaaaataccccaaagatatttaaacaaggttataatttagcatcttccctggatctaaatagtatattatatcctgaaataaatgaaatgattgctatagtct

SEQ ID NO: 109547 - DNA, 720 bp, Homo sapiens
  Payload ID: 1512
  Gene Symbol: ATP5L
  Gene Name: ATP synthase, H+ transporting, mitochondrial Fo complex, subunit G
  ENST ID: ENST00000524422
  CDS Start-End: 35-265
cggttcggggcgacggactctccattccagaaccatggcccaatttgtccgtaaccttgtggagaagaccccggcgctggtgaacgctgctgtgacttactcgaagcctcgattggccacattttggtactacgccaaggttgagctggttcctcccacccctgctgagatccctagagctattcagagcctgaaaaaaatagtcaatagtgctcagactggtagcttcaaacagctcacagttaagaaaaaaagcagcacctgaggattctgaacagttctctgctcagtgatgatcaagccttcctttggacaagcttaaataactcagccactgttctttgttggaggactttgggactactgatgcaatgtgtccacttgggggccctttggagaaaaaattgctaatttcagaggggcagccgcaccagtggttaaggaaatccctggggagaaaatgtttctgtctggattagagagaagacatcttatttactcattcaatcttcatgataatcttgtgaagctataattaatatccttatttttgcagattaggaaactaagacgtactgaggctgggtgcctggttcaagatcatatagctaacattattggacatgcaaatcaagcccagatttgtgactctgagctgatgttaattctgtcacaatattggttctcaagataaatctttccaggtgagggggaaaggga

SEQ ID NO: 109548 - DNA, 799 bp, Homo sapiens
  Payload ID: 1513
  Gene Symbol: ATP5L2
  Gene Name: ATP synthase, H+ transporting, mitochondrial Fo complex, subunit G2
  Uniprot ID: Q7Z4Y8
  ENST ID: ENST00000505920
  CDS Start-End: 328-630
ttcaagaccagcctggccaacatggcgaaacattgtctctactaaaagtacaaaaattagccagacgtggtggtgctcacctgtaatcccagctactcgggaggctgaggcaggaaaatcacttgaacccgggaggcggaggtcacagttagccaagatcacaccactgtactccagcctgggtgatagagtgagactccatctcaaataaataaataaataaataaataaataaataaataaataaataagtgaaccacgcagggtccttccggggggtgaccttcagctggccattcgggatgatggactttccatcccagaaccatggctccatttgtccgtaaccttgtggagaagaccccagcactggtgaatgctgctgtgacttacttgaagcctcgattggccgcattttggtactacaccacggttgagctggttcctcccacccctgctgagatccctagagctattcagagcctgaaaaaaatagtcagtagtgctcagactggtagcttcaaacagctcacagttaaggaagctttgctgaacggtttggtggccactgaggtgtcgacgtggttttatgtcagagagatcacaggcaagcgtggcatcattggctagaatgtttgaagaccagtcttaacatctgattatatttgatttattatttgagtgttgttggaccaggtgtgatcagactgctatctgaataaaataagatttgtcagaaattccaaaaaaaaaaaaaagtgaatcaagcagttccaacccatgttcaagggtcaactgt

SEQ ID NO: 109549 - DNA, 1671 bp, Homo sapiens
  Payload ID: 1514
  Gene Symbol: ATP5S
  Gene Name: ATP synthase, H+ transporting, mitochondrial Fo complex, subunit s (factor B)
  Uniprot ID: Q99766
  ENST ID: ENST00000245448
  CDS Start-End: 693-1076
ggccagggtgccgcagacgcggggacgctggctcgctccctccctccctccctccgacgctgtgagtagagaagctaggccccgagccgggcgggactagggtggtggttgtgttctgccctcgcccgtcgccaacgctgggctgactgaaaacctggccctttgggtcgcgcgtcttcgaccttcaccgccatgcggacatggggccgtgggagaaactctgggcgggattacggtgaaaattcttgtttgggcgggccctgcggcttctttcttccggctcgccctcggccccgcccccgccccgcccccgctccagctccagccgggtcctcgctcggccccgcacgcggcccgcggtagacggagggcctgggcacccaccgtctccatcccggccccagcccagtcgagcgtccactagaagggcgctccctgtccggccctaatcctcgctcctcacggaggctctttgtcacagcgaagactgacagcccgcagtcttctggacttcttttatggggctcctggcggtgctattcattcagtcattgattcgtcttgtaaatatggagcgcctgctctgtactcgacccggcactgggtaccggaagaaccagacagctcggtttttgccaccatttataagtctgtgtccttttcttgagtactgaaccgagatacagttttaaatgtgctgtgcggtctctgagcagcgactcacctgtgcagatcaaatgatgccgtttggaaaaatttcccagcagttgtgtggcgtaaagaaactcccatggtcatgtgactccagatacttctggggctggttgaatgcagtgtttaataaggtggattatgatcgcatcagggatgttggccctgacagggcggcatccgagtggttgctgcgctgtggggccatggtgcgctaccatggccaggagaggtggcagaaggactacaaccaccttccaacaggccctctggacaaatacaagattcaggcgatcgacgccaccgactcttgtatcatgagcattggatttgatcacatggaaacctcaaatatttgttgttaagtgatcttcctggagtaagagaaaaagaaaatcttgtccaagcctttaagacagcactgccttctctggaactaaaattacaattgaagtaaaataatgtgtcttatttcagtataaaggatcatttgaaactgttgattccaaacatcaactaatattatatagtcatcagtagaattataaggatgccatatcatgacattttagaagtggagagtgcatcatatgtagaaaataaatattcagacgtggctcattaatgttactaagttggaagtgagaatttatgaacattaattcattttaagaaaagtgcagccaggcgcagtggctcatgcctgtaatcctagcactttgggaggccaaagcgggcagatcacctgaggtcaggagttcaagaccaaccatggccaacatggtgaaaccccatctctactaaaaaaacaaaattagctgaatgtggtggtgcacgcctttaatcccagctactctggaggctgaggcaggagaatcacttgacttgggaggtggaggttgcagggacccgagattgtgccactgcactccagcctgggtgacagagcgagactgtctc

SEQ ID NO: 109550 - DNA, 10212 bp, Homo sapiens
  Payload ID: 1514
  Gene Symbol: ATP5S
  Gene Name: ATP synthase, H+ transporting, mitochondrial Fo complex, subunit s (factor B)
  Uniprot ID: Q99766
  ENST ID: ENST00000311459
  CDS Start-End: 381-1028
gctccagctccagccgggtcctcgctcggccccgcacgcggcccgcggtagacggagggcctgggcacccaccgtctccatcccggccccagcccagtcgagcgtccactagaagggcgctccctgtccggccctaatcctcgctcctcacggaggctctttgtcacagcgaagactgacagcccgcagtcttctggacttcttttatggggctcctggcggtgctattcattcagtcattgattcgtcttgtaaatatggagcgcctgctctgtactcgacccggcactgggtaccggaagaaccagacagctcggtttttgccaccatttataagtctgtgtccttttcttgagtactgaaccgagatacagttttaaatgtgctgtgcggtctctgagcagcgactcacctgtgcagatcaaatgatgccgtttggaaaaatttcccagcagttgtgtggcgtaaagaaactcccatggtcatgtgactccagatacttctggggctggttgaatgcagtgtttaataaggtggattatgatcgcatcagggatgttggccctgacagggcggcatccgagtggttgctgcgctgtggggccatggtgcgctaccatggccaggagaggtggcagaaggactacaaccaccttccaacaggccctctggacaaatacaagattcaggcgatcgacgccaccgactcttgtatcatgagcattggatttgatcacatggagggcctagagcatgttgaaaaaataaggctgtgcaagtgtcattatatcgaggatgactgtttgctgagacttagtcaacttgaaaatttacaaaaaaccatattggaaatggaaataatatcctgtgggaatatcacagacaaaggcatcattgctttgcgtcatttaagaaacctcaaatatttgttgttaagtgatcttcctggagtaagagaaaaagaaaatcttgtccaagcctttaagacagcactgccttctctggaactaaaattacaattgaagtaaaataatgtgtcttatttcagtataaaggatcatttgaaactgttgattccaaacatcaactaatattatatagtcatcagtagaattataaggatgccatatcatgacattttagaagtggagagtgcatcatatgtagaaaataaatattcagacgtggctcattaatgttactaagttggaagtgagaatttatgaacattaattcattttaagaaaagtgcagccaggcgcagtggctcatgcctgtaatcctagcactttgggaggccaaagcgggcagatcacctgaggtcaggagttcaagaccaaccatggccaacatggtgaaaccccatctctactaaaaaaacaaaattagctgaatgtggtggtgcacgcctttaatcccagctactctggaggctgaggcaggagaatcacttgacttgggaggtggaggttgcagggacccgagattgtgccactgcactccagcctgggtgacagagcgagactgtctcaaaaaaaaaaaaaaaagaaaaatgtaaactaggtaacattttaattctaatatattcatttaatatgtaaatctatagatatctcttgatgtagatatttagaatcctttaaagttatttgtacaacagatgtttttattataacagtaatttacatttaactttaaagttagtgaagcatactaccataaatgcacaattatgaaaaattagaagctaaattacagattcattgatggagtcaattatgcaaagtggtcagtggttgttgaagcatgcattgcttcaacaggatttgcgtgcatttcccatgatcctgcattcttgtgttcttgatagcatacagacttactcagaatcaacagttgctgcttaatttgtctattttgtaagcttaggctactattttattaaaactggacatagatacttggctgaatacaaatagttttgcagattgcaatataataaaggaaacagtaaaaactagtgggctatgcttaggtttttcttgaaacctaacattgctttaggctgggtgccgtggctcgtgcctgtaatcccagtgctttgggaggctgaggtgggaggatcacttgagaccaggagtttgagaccaatttgggcaacacagtgagaccccatctctaaaaaaattttaaaaattaggcaggcatggtggtgcatacctgtaatctcagatacttgggaggttgaggtggtaggattgcttgagctcaggagtttgaggctgcagtaagctatgatcacggccactgcacaccagcctggtagcctgggtgaaagggggagaccctgtctcttaaaaaaaagggctggcctgtaatcccagcacttttgaaggccaaggcaggcagatcatttgagcccaggagttcaggacgagcctgggcaacatggcaaaaccctgtctctaccaaaaaattaaaaaataaaaaatagctgggtgtagtggcacatgcctgtagtcccaactactcaggagtctgaggtaggaggatcagttgagcccgggaagtcgaggctgcagtgagccatgttggcaccactgcactccagcctgggcaacagattaagaccctgtctcaaaaaaaaaaaaaaaagtgaaaaatagataaaacaggtcttcattgttacctgtgagaaatggccctgattctattactcttatatgccagtttgtttatagatttctgtgtgtttgatttgaacttttttttttttttttttttttttgagacagactctcactctgttgcccaggttggagtgcagtggtgtgatctcagttcactgcaacctctgcctcccgggttcaagcagttctctgtcgcagcgtcccaggtagctgggattacaggcgcccaccaccacgcccagctaatttttgtacttttagtagagacagggtttcaccatcttggccagactggtcttgaactcctaacctcaggatccacccgcctcggcctcccaaagtgctgggagccaccgcgcccagcctggtttgaacattattaagctgttgaatataaacttgaaaataattttctatgatacagctttcaggtagaaaaatgaattttcgttgtgtttaacaatgttgtgtttaacagcttatacaaataacacagtataaatggtaattgccactgtcattttaaaaatcagaaaatagtaaataaaaggatgtggaagagtctcatgtgatacagtggagatttcataccgaataaaagcattataaatatggttaaattgaacataagcataaatttaacggaactcattagaaaaaaataagccttttttctcaggtttgtttcattactgtatggtgagacaactgattcaccacgatttagtctagagctacttttctattctgaatagtttttggtaaaactattggctgaattattaggctgttatagtaatctgcctccgtcaagtgtattttcttgggttaaggaaaaaaaaatttttttttaactattcacggaagctggatgttcttccttgtcatttgaatcaaggccgtctaacaggaattgaataattcagggactagcatttaacccatatcaggtctaggcaagaaaagacatacattaggaagccttaggatatcattaaactgcctagggtagtcaaaattattgagtagacaccagacctcagtggattacttaagtaaatggggtcagatgtcatcatgaagaaaattaacaggaagaaaatgagagtacagaagaaatgttttgaaaatagagtgaaatacaactttgaagaccatggctgagaagtgctaggaatagtggcagcacatcaaccagaaatggtgttgagctgtaagaaacagacgtcaggcttcatattgcccttgtgtccaggggacaaggatgaaaaagctttttgattaagagcagtagaccaaatcaaagctaattatgtcattttggccaggcgcagtggctcatgcctgtaatgccagcactttggaaggccaaggcgctcagatcacgtgagcccaggagttcaagaccagcctggggaacatggcaaaaccctgcctctaccaaaaaatacaaaaaaattagccagtatagtggcacatgcctgcagtcccagctacttgggaggctgaggtggcaggttttatatatatatataaaaaacacatatatatatatgtgtgtgtgtgtcatcattttaagtctcactgtgcaaagctatgagtcctcaatactttggactacttagtgtaatatattagttgttagaatagcatatatatatatatatatatatatatacatacacatacatacacatacaaacatagtgcaaaaagatgtttcagggaaaacatcagtttacaacataatgtctttcatgactcaagtaaaagctcacaagtaatttcttctgaaacccagatcactgaattacaggtttgcctatagatgtaccaggtcaaaggctgtgccagagagaatgaaatactaattattttcaggctgataggttcagttcctgcaaagcctgtaggtcttgctctaccctttgactgccttaatcagctgccgagcttcatgccattgtttacaaggggaattgggtgaataaatgtagacagattacagtaaatccacgttgcctgcaaaagtgactaaggtgtatcctttactgataaagtaaggatgaaatgtggaaacatataattaaattataaattaccaagcttttgtgataattcatatgcttttaaatattttgaacctaagtgttaccctcaaaatgttttaaaatataaaaatcaagaaatagagcaagcaggaaatgggattttaaacattttgatttcaagaaatagaactatcttaaatatgatgctgaaacaatctgagaggcaggagataggactcaggcaacagagatccgaggaaatatatatgggcattttgtggttcatttttcttgtgtggcatgtggtacaactgaagcataaatctttttgatatcatctagttttgccagaggtatgggacagttcatattctgtccataagttcggctacttacataaactgaaatacaagtgcaactccaaacaggttttttcttttctggacaccatcatcaagcatggaagactggatctggaatttcccttcatatcttgccagttggcctcccagtttcttgcttatgttttctcctggtgtgttttcaacattgtaattgttttcaatcaactgtataagttttattttcttcaaagcatctattgattccttttttaaaatcatgtctcctagctcctttaaatgtttggaaaacggtagttaagtttcttggtatcacagtagtacttcttattatccaaagctggaaggatgctgctgccagttagctggggtaggtactgcaactaaaaatgcaaaacacagaattaggttcaaaactgtgccatgcatttttttcattatttagaatatatcacaaaagaggtaattaagctttttagtatagaagtactttttttgcacacaatccaggacttgagagaggattaaatgtttcaatttcgtcttggcttttccttttaaatgtttatattaaaaaggaaaaacattcacattaaagaagatttagagaatatgaaaaggggaaaatctacatgttaacattattgggaagaaaacatagatttacaggagttgagagcttgctgagatcttagggatcatttaagccaatgccttgtcttatagcggagaaaactgataaacagagcacctaggcaatttgcctactcactctcttcccttagttaaaaaggcaaatcaagcatggcacagtgtacacttgtagttccagctacaagggaggctgagtgggagcatcccttgagcccaggagagcagcctgggcaacatagcaagatccccatctctaaagaaaaaagacaaactgcttccttcaagcttcctgaaaatgtttgaatttattgtcaatgtcaaatgaaagaacacacctgtattttttgtattgcactatatgtccttcggtatccctaaaaagggaactgtttagtacttttactttctagaaaaaaatttttcagccattgtcctcagaaaagtgctttttagtacttttaaatcagttgattctttcaggatttaaaagcagtacaccaggccaggtgcggtggctcatgcctgtaatcccagcactttgggaggccaaggcggatggatcacctgaggtcaggagtcgagaccagcctgccaacatggcgaaaccctgtctctactaaaaatatagaaattagttaggcatactggcacatgcctgtaatcccagctactggggaggctgaggcaggagactcacttgaacctgggaggcagaggttgcagtgagccaagatcataccactgcactctagcctgagcgacagagtgagactcagtctcaaaaaaaatcaatacaccaaatagtggagtttccctattttttcaaatagaaatatttccatcaaaaccttttgctctcgaatacaaactaatactgagataaggaataattctggcgtgggggtggaggagtctgtttctggcctgttgtgctacctgggtcacatatgatggagaataaaacattaattttgtaactgtgatctacattagggccctggagttcatgctgtacttgttcctcatggacctttttcacccttttccctcctcccagcctcatacacaacacaccctggtaccattcagcatgctgggcagtggaagctgcaaagagaaagactaaggcaagataatgtatagcttaaggagtacctaggtagatcctgaggttacccaggatcagttgtggttccaactacagttcattctaaattattacagcttttggcttatcacaagatgcttaatgtaaggccattttataccaatcaggattcttcacagtctcccagtgtgcagtttggatgctgttctctggttaaatgtattcagctgataccaccaaaagcactcatcactgtatttgccctagccaactctgacaaaggatcagggaggaaaacagctccttttttggacaaacctggagtgttagttttaatactaaaagtgtacatgatgacacagaactgcatggggaaaatctgatttcattttccaaagcccaaaaagtctccttagctggactcatactcatgtaccttgttgagacctgtgctcatgcaggctggaaaccctggcccctgtgtggcatcaggaagcagcaggacaagggcacctttaggattcagggagagggggcttcaggagacagatgtccctggggccctggttgatagatcctatgacctgtctcctagtgctggaatgaggatgctggagctgaaagccacaactgccatcctcaagtctagattccaactctctgtaccaggtggcaggtaggagatcatttcaaattataaccttggatgtttctgtaaagcagtggtgctttcggctctttcttagggtcttccttgttggtttgttgtgttcttttgccaaatcctctatttctctgatgttttcaaaatatgggtgatgcaacagctgttcacatgtcagcctttgagtagggtccatgtggagacagccctaaaagaacagaaaattccttcttcttacttcttcaaaattgtattaacttattaatgtcatttttttcttctttgaaagatgaaacttcagttgcaataagaagggggaaaaggcaggaaaacacaccagtcatgattttagttccttccagtcattcctaaatggcactcacatattaaataaatagtttctagaagtagtaatgaaaaatcattttctccaccttattctgttcttgaagcaattggtactctgccctgggagagtaagatataattttagagtttacctcagtggccaaatggggtaatccatttagccagtttggtcccttgcatgtactttgtaaaaactagtgtttttattttaaaaatgatatttacacatgataacaaatacagttaatacagcatacagcaaagtctccaccactgtaggtgttcccttcacccttctaaaatcagctacttttttttttttttttttttggtgtatccctccagaaatagttgatgcattataagtatatatgatcatgtatataaggagaggcataacgtacatgcctttatattacatcattcttaactatttttgttgcaactaagtaggccatggagctcattcttggatagattagattaaatttcacaactacatactccaaggaattgactcagtttttgttggttatgtcagaggtgttgaaaccacagcaacaccatcttgaataggggctgggtaaaataaggctgagacctactgggctgcattcccaggaggtttggcattgttactcacaggatgagatagcaggtcggcacaaaatataggtcacaatgacctgatgataaaacaggatgcagtaaagaagccggccaaaaccaagatggtgatgaaagtgatgtctggttgtcctcactcctcgttgtacactaattataatgtgttagcatgctaaaagacactttcaccagcaccatgacagtctacaaatacccatagcaatgcccagaagttaccctaaatagtctaaaaaggggaggaaccctcagttccagaaaatccctgccctctcctggaaaactcataaaccaccccttgtttagcatataatcaagaaataactgtaagtatactcagttgagcagcccacagcactgctgcctatagagtagccattcttttattcctttactttgttaataaatttgcttccactttactgtgtggacacgccctgaattctttcttgcatgaggtccaagaaccttcctttggggtccggattgggacccctttcaggtaacagttacattatcatttatattaactcattatttaatacatcagtaaataaataatttttaaaccatgtgggacattgactgtaacttgcaaacattttagttgataccatacctcattttacataagagctatatttctaaatatatatatatataaatatatatatcaagtttttaaatgtacttcaaatgtaccagggagttagctatttaaaaggatcctgcagctaaggattttctgaagaaaaagttccctttgtaaaacaatcaccacccccctgaaatttctgttttgtgtaaatttagacttcaaatataatgttaggtttatttaaagtggaaaatacttgcaaatgttttcttaataggatgtgatccatttaaaaaaattgaaaatatacttttccaaggagaattttttttttttttgagacggagtcttactctgtcacccaagctggagtgcagtcgtgcaatctcaactcactgcaacctccgcctcccaggctcaagcaattctcccgcctcaccctcctgagtagtcgggattacaggcgagcgccaccacgcctaattttttttatttttagtagagacggtttcaccatgttgaccaggctggttttgaactgacctcaggtgatctgcctgccttggcctcccaaagtgctaggattacaggtgtgagccactgcccagccaggagaagaattctaaaaggaacacttttcattgcatggattgacataagtaattcagattccccagtgatgacaactgctgtgtgcttcctggtctgttggaagccatgatttttacctttaggagccccagggcaggataagagatgtttgggaattttaattcaagtggttcctgttgaaaagaaaagaggtttttaatttacagcatgtattcaaattaaggttacctcaaattaaatcttttgatagaaacattttcctggcaccttcctcacgtcctccaccctttgcccacccaacctcctgcccaaaacagtctccctttgcctttttcacaagctttctctccccacctccaaatcgcttttccaaatttgcttcgtaactactcccttaacttcctgctctgataccaatggagatagcaaattataaataaaaatactaatgaaaaaaaa

SEQ ID NO: 109551 - DNA, 801 bp, Homo sapiens
  Payload ID: 1514
  Gene Symbol: ATP5S
  Gene Name: ATP synthase, H+ transporting, mitochondrial Fo complex, subunit s (factor B)
  ENST ID: ENST00000358473
  CDS Start-End: 1-801
atgataagaggtagtggagcagaggcttgcagtaatgaagacggctgtagtgaaaaagggatgaaaggggtggattatgatcgcatcagggatgttggccctgacagggcggcatccgagtggttgctgcgctgtggggccatggtgcgctaccatggccaggagaggtggcagaaggactacaaccaccttccaacaggccctctggacaaatacaagattcaggcgatcgacgccaccgactcttgtatcatgagcattggatttgatcacatggagggcctagagcatgttgaaaaaataaggctgtgcaagtgtcattatatcgaggatgactgtttgctgagacttagtcaacttgaaaatttacaaaaaaccatattggaaatggaaataatatcctgtgggaatatcacagacaaaggcatcattgctttgcgtcatttaagaaacctcaaatatttgttgttaagtgatcttcctggagctggaaaccctggcccctgtgtggcatcaggaagcagcaggacaagggcacctttaggattcagggagagggggcttcaggagacagatgtccctggggccctggttgatagatcctatgacctgtctcctagtgctggaatgaggatgctggagctgaaagccacaactgccatcctcaagtctagattccaactctctgtaccaggtggcagcctgctgtttaaacagtctcctgtggggcattcgtcaatctccttttggccgtataaggcgattttgcgccagtcacgtgctggagacaatcaggaataa

SEQ ID NO: 109552 - DNA, 1171 bp, Homo sapiens
  Payload ID: 1514
  Gene Symbol: ATP5S
  Gene Name: ATP synthase, H+ transporting, mitochondrial Fo complex, subunit s (factor B)
  Uniprot ID: Q99766
  ENST ID: ENST00000426751
  CDS Start-End: 638-1048
gacgctgtgagtagagaagctaggccccgagccgggcgggactagggtggtggttgtgttctgccctcgcccgtcgccaacgctgggctgactgaaaacctggccctttgggtcgcgcgtcttcgaccttcaccgccatgcggacatggggccgtgggagaaactctgggcgggattacggtgaaaattcttgtttgggcgggccctgcggcttctttcttccggctcgccctcggccccgcccccgccccgcccccgctccagctccagccgggtcctcgctcggccccgcacgcggcccgcggtagacggagggcctgggcacccaccgtctccatcccggccccagcccagtcgagcgtccactagaagggcgctccctgtccggccctaatcctcgctcctcacggaggctctttgtcacagcgaagactgacagcccgcagtcttctggacttcttttatggggctcctggcggtgctattcattcagtcattgattcgtcttgtaaatatggagcgcctgctctgtactcgacccggcactgggtaccggaagaaccagacagctcggtttttgccaccatttataagtctgtgtccttttcttgagtactgaaccgagatacagttttaaatgtgctgtgcggtctctgagcagcgactcacctgtgcagatcaaatgatgccgtttggaaaaatttcccagcagttgtgtggcgtaaagaaactcccatggtcatgtgactccagatacttctggggctggttgaatgcagtgtttaataaggtggattatgatcgcatcagggatgttggccctgacagggcggcatccgagtggttgctgcgctgtggggccatggtgcgctaccatggccaggagaggtggcagaaggactacaaccaccttccaacaggccctctggacaaatacaagattcaggcgatcgacgccaccgactcttgtatcatgagcattggatttgatcacatgggtaactaccctatcgttttgctaatagaaaatgcagatgatttgcagtgaccattttgttgcagttgactcacgattatagtcataggtatgtcctttttgcccatttcattatagtcaagtttgtttcttcctgtgtttgatatttattttcaaattaaattgaggttacag

SEQ ID NO: 109553 - DNA, 1476 bp, Homo sapiens
  Payload ID: 1514
  Gene Symbol: ATP5S
  Gene Name: ATP synthase, H+ transporting, mitochondrial Fo complex, subunit s (factor B)
  ENST ID: ENST00000554204
  CDS Start-End: 462-506
tacggtgaaaattcttgtttgggcgggccctgcggcttctttcttccggctcgccctcggccccgcccccgccccgcccccgctccagctccagccgggtcctcgctcggccccgcacgcggcccgcggtagacggagggcctgggcacccaccgtctccatcccggccccagcccagtcgagcgtccactagaagggcgctccctgtccggccctaatcctcgctcctcacggaggctctttgtcacagcgaagactgacagcccgcagtcttctggacttcttttatggggctcctggcggtgctattcattcagtcattgattcgtcttgtaaatatggagcgcctgctctgtactcgacccggcactgggtaccggaagaaccagacagctcggtttttgccaccatttataagtctgtgtccttttcttgagtactgaaccgagatacagttttaaatgtgctgtgcggtctctgagcagcgactcacctgtgcaggataagtgcccaagagtacaattgctgggtcatatgatcaaatgatgccgtttggaaaaatttcccagcagttgtgtggcgtaaagaaactcccatggtcatgtgactccagatacttctggggctggttgaatgcagtgtttaataaggtggattatgatcgcatcagggatgttggccctgacagggcggcatccgagtggttgctgcgctgtggggccatggtgcgctaccatggccaggagaggtggcagaaggactacaaccaccttccaacaggccctctggacaaatacaagattcaggcgatcgacgccaccgactcttgtatcatgagcattggatttgatcacatggaaacctcaaatatttgttgttaagtgatcttcctggagtaagagaaaaagaaaatcttgtccaagcctttaagacagcactgccttctctggaactaaaattacaattgaagtaaaataatgtgtcttatttcagtataaaggatcatttgaaactgttgattccaaacatcaactaatattatatagtcatcagtagaattataaggatgccatatcatgacattttagaagtggagagtgcatcatatgtagaaaataaatattcagacgtggctcattaatgttactaagttggaagtgagaatttatgaacattaattcattttaagaaaagtgcagccaggcgcagtggctcatgcctgtaatcctagcactttgggaggccaaagcgggcagatcacctgaggtcaggagttcaagaccaaccatggccaacatggtgaaaccccatctctactaaaaaaacaaaattagctgaatgtggtggtgcacgcctttaatcccagctactctggaggctgaggcaggagaatcacttgacttgggaggtggaggttgcagggacccgagattgtgccactgcactccagcctgggtgacagagcgagactgtctc

SEQ ID NO: 109554 - DNA, 4473 bp, Homo sapiens
  Payload ID: 1515
  Gene Symbol: AGTPBP1
  Gene Name: ATP/GTP binding protein 1
  ENST ID: ENST00000337006
  CDS Start-End: 68-3904
ctgcgcgtgctgggagccggctggcaaggcgtgcggtgggcggggcgccgcgctgacgttgcccgggatgcggacaggttccgccgcctccagcgccgccgccgcagctgccgccgccgccgcctccgcctcgcctgccaccggggtttgtatgaaaacaccgggcggcgggcggcgagggatccgccgtgatccaggtgctgagccgggtgctgcggctctgcgcggtccccgccagcgccccatcctgagccgccttaccaataattctaggatcgtaggactcctggctcaactggagaagatcaatgctgagccttcagaatcagacactgcccgatatgttacatcaaaaattcttcatctggctcagagtcaagaaaaaacaaggagagaaatgacagccaaaggttctacaggaatggaaattctgctgtcaacattagagaacacaaaagatcttcaaactacacttaatatcttaagcattcttgttgagctggtgtcagctggtggaggtcgaagagtgagtttcttagtcaccaaaggtggttcacaaatattgttgcagttacttatgaatgccagcaaagaatctcccccacatgaggacttaatggtacagattcattctattcttgcaaagattggaccaaaagataaaaaatttggagtaaaggctagaattaatggggctctgaatataaccctgaatttggtcaagcagaatttgcagaatcatcgcttggttctaccttgccttcagcttttacgagtatattctgccaactctgtgaattcagtatccttagggaaaaatggagttgtggaactgatgtttaaaatcattggaccatttagtaagaagaattccagtcttataaaggttgctttagacactcttgctgcattgctaaaatcaaaaacaaatgccaggagagctgtagacagaggatatgtccaagtgcttttaacaatttatgtagattggcaccgccatgataaccggcatagaaacatgctcattcggaaaggaattttacagagtttaaaaagtgttacaaacatcaagttgggaagaaaagcatttattgatgccaatgggatgaaaattctgtataatacttcgcaagaatgtctggcagtcaggactctggatcctcttgtcaatacctccagtctgataatgaggaagtgtttcccaaaaaatcgactgccactcccaacaattaaaagttcttttcatttccagttgcctgttattcctgtgactggtcctgtggctcagctctacagcttacctcctgaagtggatgacgtagtagatgaaagtgatgacaacgatgatattgatgtagaagctgaaaacgaaactgagaatgaagatgacctagatcaaaattttaagaatgatgatattgaaacagatattaacaaactaaaaccccagcaagaaccgggacgaacaatagaagatctaaaaatgtatgaacaccttttccctgagcttgttgatgattttcaggactatgatttaatctccaaagaaccaaagccttttgtatttgagggaaaagtacgtggtcctattgttgttcctacggcaggcgaggaaacatctgggaattctggcaatttaagaaaagttgtaatgaaggagaacatatcttctaaaggagatgaaggtgaaaagaagtctacctttatggatctagcaaaagaagatattaaagataatgatagaacattacaacagcagccaggtgatcaaaatagaactatttcatcagtccatggtttaaacaatgatattgtaaaggccttggaccgaattacattgcagaatattccttctcaaacagccccaggttttactgcagaaatgaagaaggactgcagtcttcctcttactgtccttacctgtgctaaagcatgtccacacatggctacttgtggaaatgttctgtttgagggaagaacagttcagctagggaagctttgctgcactggagttgaaactgaagatgatgaagatactgagtcaaattcatcggtagaacaagcatcggttgaagtacctgatggaccaacactccatgacccagacctctatattgagattgtgaaaaatacgaagtctgtcccagaatattcagaggtggcttatcccgattattttggtcacattccgcctccattcaaagagcctattttagaaaggccttatggtgtacaaaggacaaaaattgctcaagatattgaaaggctaatacatcagagtgatatcatagatcgtgtggtatatgacttggataacccaaattacaccattccagaagagggagatattttgaaatttaactccaaatttgagtctgggaatctgcgcaaagtaattcaaattagaaaaaatgaatatgatcttattctgaactcagacataaacagcaatcattatcatcagtggttttactttgaagtcagtggaatgcgaccaggtgttgcttacaggtttaacatcattaactgtgaaaagtccaacagtcagtttaattatggtatgcaaccactcatgtattcggttcaggaagcattaaatgccagaccatggtggattcgtatggggactgacatttgttactataaaaatcatttctcaagaagttcagttgctgcaggtgggcaaaagggaaaatcctactatacaattacatttactgtcaattttccacataaagatgatgtttgctactttgcttatcactatccatatacgtattcaactttacagatgcatcttcaaaaattggaatcagcacacaatcctcagcaaatctattttcggaaagatgtgttatgtgaaaccctgtctggaaacagctgccccttggtgactataacagcaatgccagagtctaattattatgaacatatctgccatttcagaaatcgcccttacgttttcttgtctgctcgggtacatcctggagaaactaatgcaagttgggttatgaaaggaacgttggaatatctcatgagcaataaccccactgctcagagcttacgagaatcttatatttttaaaattgtccctatgttaaatccagatggtgtcatcaatggaaatcatcgctgttctttaagtggagaggatttgaataggcagtggcaaagtccaagtccggatttacatcctacaatttaccatgctaaggggctgttgcaatacttggctgcagtgaagcgtttacccttggtttattgtgattatcatggccattcccgaaagaagaatgtatttatgtatggttgcagcatcaaagagacagtgtggcataccaatgataatgcaacttcatgtgatgttgtggaggatacgggatacaggacattgcctaagatactgagccatatcgccccagcattttgcatgagcagctgtagcttcgtagtggaaaaatctaaagaatccacagcacgtgttgtagtttggagggaaataggagtacaaagaagttataccatggagagtactttatgtggctgtgatcagggaaaatacaagggtttacagattggtacccgagaactggaagagatgggagcaaaattttgtgttggtcttttacgtttgaaaagactgacctctccattggagtataatctgccttccagcctgcttgactttgaaaatgatttaattgaatcaagctgcaaagtaactagccctaccacttatgtcttggatgaagatgaacctcgattccttgaagaagttgattacagtgcagaaagtaatgatgagttagatattgagttggctgaaaatgtaggagattatgaaccttctgctcaagaagaagtactttctgactctgaattatcaagaacatacctaccttgagcccgctgccatctcttgttaactgcaaagaataaatgaaatatcttggtttttatttcccaggaagcttgagagaaatgagtttatacagagctgactcaaaaagacaaaaagtaacttgggccagtttggtttcaagataataaatgtgttattaattaatgataaaattggcgcttgttttattttcgatattcaatgcactttatgtagcattgaatgatcaaatattggatttacctttaaaaaaaaaacctgagtatcattgcatgaatttttatctccctatggttatatcctgcatcaagtggataattttgaagtgtgttcagaatataaaattgaaattttagagttgttgaaaatcctgacttgttgaaaactaatatatatgtacatggatttctatagatgtgtttgtttagaagtgggtagatattgcagataagactgttcttcagaatcatgttaactattgggttgtgactgaagtagtccagggtttgccttgaaaccattacattctacatttaccaaattaaacaaataaaaactgtattaaatgttgc

SEQ ID NO: 109555 - DNA, 4393 bp, Homo sapiens
  Payload ID: 1515
  Gene Symbol: AGTPBP1
  Gene Name: ATP/GTP binding protein 1
  Uniprot ID: Q9UPW5
  ENST ID: ENST00000357081
  CDS Start-End: 146-3826
gggtttgtatgaaaacaccgggcggcgggcggcgagggatccgccgtgatccaggtgctgagccgggtgctgcggctctgcgcggtccccgccagcgccccatcctgagccgattatctgcaattatgaaatgaagtaactcaagatgagcaagttaaaagtgataccagaaaaaagccttaccaataattctaggatcgtaggactcctggctcaactggagaagatcaatgctgagccttcagaatcagacactgcccgatatgttacatcaaaaattcttcatctggctcagagtcaagaaaaaacaaggagagaaatgacagccaaaggttctacaggaatggaaattctgctgtcaacattagagaacacaaaagatcttcaaactacacttaatatcttaagcattcttgttgagctggtgtcagctggtggaggtcgaagagtgagtttcttagtcaccaaaggtggttcacaaatattgttgcagttacttatgaatgccagcaaagaatctcccccacatgaggacttaatggtacagattcattctattcttgcaaagattggaccaaaagataaaaaatttggagtaaaggctagaattaatggggctctgaatataaccctgaatttggtcaagcagaatttgcagaatcatcgcttggttctaccttgccttcagcttttacgagtatattctgccaactctgtgaattcagtatccttagggaaaaatggagttgtggaactgatgtttaaaatcattggaccatttagtaagaagaattccagtcttataaaggttgctttagacactcttgctgcattgctaaaatcaaaaacaaatgccaggagagctgtagacagaggatatgtccaagtgcttttaacaatttatgtagattggcaccgccatgataaccggcatagaaacatgctcattcggaaaggaattttacagagtttaaaaagtgttacaaacatcaagttgggaagaaaagcatttattgatgccaatgggatgaaaattctgtataatacttcgcaagaatgtctggcagtcaggactctggatcctcttgtcaatacctccagtctgataatgaggaagtgtttcccaaaaaatcgactgccactcccaacaattaaaagttcttttcatttccagttgcctgttattcctgtgactggtcctgtggctcagctctacagcttacctcctgaagtggatgacgtagtagatgaaagtgatgacaacgatgatattgatgtagaagctgaaaacgaaactgagaatgaagatgacctagatcaaaattttaagaatgatgatattgaaacagatattaacaaactaaaaccccagcaagaaccgggacgaacaatagaagatctaaaaatgtatgaacaccttttccctgagcttgttgatgattttcaggactatgatttaatctccaaagaaccaaagccttttgtatttgagggaaaagtacgtggtcctattgttgttcctacggcaggcgaggaaacatctgggaattctggcaatttaagaaaagttgtaatgaaggagaacatatcttctaaaggagatgaaggtgaaaagaagtctacctttatggatctagcaaaagaagatattaaagataatgatagaacattacaacagcagccaggtgatcaaaatagaactatttcatcagtccatggtttaaacaatgatattgtaaaggccttggaccgaattacattgcagaatattccttctcaaacagccccaggttttactgcagaaatgaagaaggactgcagtcttcctcttactgtccttacctgtgctaaagcatgtccacacatggctacttgtggaaatgttctgtttgagggaagaacagttcagctagggaagctttgctgcactggagttgaaactgaagatgatgaagatactgagtcaaattcatcggtagaacaagcatcggttgaagtacctgatggaccaacactccatgacccagacctctatattgagattgtgaaaaatacgaagtctgtcccagaatattcagaggtggcttatcccgattattttggtcacattccgcctccattcaaagagcctattttagaaaggccttatggtgtacaaaggacaaaaattgctcaagatattgaaaggctaatacatcagagtgatatcatagatcgtgtggtatatgacttggataacccaaattacaccattccagaagagggagatattttgaaatttaactccaaatttgagtctgggaatctgcgcaaagtaattcaaattagaaaaaatgaatatgatcttattctgaactcagacataaacagcaatcattatcatcagtggttttactttgaagtcagtggaatgcgaccaggtgttgcttacaggtttaacatcattaactgtgaaaagtccaacagtcagtttaattatggtatgcaaccactcatgtattcggttcaggaagcattaaatgccagaccatggtggattcgtatggggactgacatttgttactataaaaatcatttctcaagaagttcagttgctgcaggtgggcaaaagggaaaatcctactatacaattacatttactgtcaattttccacataaagatgatgtttgctactttgcttatcactatccatatacgtattcaactttacagatgcatcttcaaaaattggaatcagcacacaatcctcagcaaatctattttcggaaagatgtgttatgtgaaaccctgtctggaaacagctgccccttggtgactataacagcaatgccagagtctaattattatgaacatatctgccatttcagaaatcgcccttacgttttcttgtctgctcgggtacatcctggagaaactaatgcaagttgggttatgaaaggaacgttggaatatctcatgagcaataaccccactgctcagagcttacgagaatcttatatttttaaaattgtccctatgttaaatccagatggtgtcatcaatggaaatcatcgctgttctttaagtggagaggatttgaataggcagtggcaaagtccaagtccggatttacatcctacaatttaccatgctaaggggctgttgcaatacttggctgcagtgaagcgtttacccttggtttattgtgattatcatggccattcccgaaagaagaatgtatttatgtatggttgcagcatcaaagagacagtgtggcataccaatgataatgcaacttcatgtgatgttgtggaggatacgggatacaggacattgcctaagatactgagccatatcgccccagcattttgcatgagcagctgtagcttcgtagtggaaaaatctaaagaatccacagcacgtgttgtagtttggagggaaataggagtacaaagaagttataccatggagagtactttatgtggctgtgatcagggaaaatacaagggtttacagattggtacccgagaactggaagagatgggagcaaaattttgtgttggtcttttacgtttgaaaagactgacctctccattggagtataatctgccttccagcctgcttgactttgaaaatgatttaattgaatcaagctgcaaagtaactagccctaccacttatgtcttggatgaagatgaacctcgattccttgaagaagttgattacagtgcagaaagtaatgatgagttagatattgagttggctgaaaatgtaggagattatgaaccttctgctcaagaagaagtactttctgactctgaattatcaagaacatacctaccttgagcccgctgccatctcttgttaactgcaaagaataaatgaaatatcttggtttttatttcccaggaagcttgagagaaatgagtttatacagagctgactcaaaaagacaaaaagtaacttgggccagtttggtttcaagataataaatgtgttattaattaatgataaaattggcgcttgttttattttcgatattcaatgcactttatgtagcattgaatgatcaaatattggatttacctttaaaaaaaaaacctgagtatcattgcatgaatttttatctccctatggttatatcctgcatcaagtggataattttgaagtgtgttcagaatataaaattgaaattttagagttgttgaaaatcctgacttgttgaaaactaatatatatgtacatggatttctatagatgtgtttgtttagaagtgggtagatattgcagataagactgttcttcagaatcatgttaactattgggttgtgactgaagtagtccagggtttgccttgaaaccattacattctacatttaccaaattaaacaaataaaaactgtattaaatgtt

SEQ ID NO: 109556 - DNA, 4208 bp, Homo sapiens
  Payload ID: 1515
  Gene Symbol: AGTPBP1
  Gene Name: ATP/GTP binding protein 1
  Uniprot ID: Q9UPW5
  ENST ID: ENST00000376083
  CDS Start-End: 78-3638
gctgcggctctgcgcggtccccgccagcgccccatcctgagccgattatctgcaattatgaaatgaagtaactcaagatgagcaagttaaaagtgataccagaaaaaagccttaccaataattctaggatcgtaggactcctggctcaactggagaagatcaatgctgagccttcagaatcagacactgcccgatatgttacatcaaaaattcttcatctggctcagagtcaagaaaaaacaaggagagaaatgacagccaaaggttctacaggaatggaaattctgctgtcaacattagagaacacaaaagatcttcaaactacacttaatatcttaagcattcttgttgagctggtgtcagctggtggaggtcgaagagtgagtttcttagtcaccaaaggtggttcacaaatattgttgcagttacttatgaatgccagcaaagaatctcccccacatgaggacttaatggtacagattcattctattcttgcaaagattggaccaaaagataaaaaatttggagtaaaggctagaattaatggggctctgaatataaccctgaatttggtcaagcagaatttgcagaatcatcgcttggttctaccttgccttcagcttttacgagtatattctgccaactctgtgaattcagtatccttagggaaaaatggagttgtggaactgatgtttaaaatcattggaccatttagtaagaagaattccagtcttataaaggttgctttagacactcttgctgcattgctaaaatcaaaaacaaatgccaggagagctgtagacagaggatatgtccaagtgcttttaacaatttatgtagattggcaccgccatgataaccggcatagaaacatgctcattcggaaaggaattttacagagtttaaaaagtgttacaaacatcaagttgggaagaaaagcatttattgatgccaatgggatgaaaattctgtataatacttcgcaattgcctgttattcctgtgactggtcctgtggctcagctctacagcttacctcctgaagtggatgacgtagtagatgaaagtgatgacaacgatgatattgatgtagaagctgaaaacgaaactgagaatgaagatgacctagatcaaaattttaagaatgatgatattgaaacagatattaacaaactaaaaccccagcaagaaccgggacgaacaatagaagatctaaaaatgtatgaacaccttttccctgagcttgttgatgattttcaggactatgatttaatctccaaagaaccaaagccttttgtatttgagggaaaagtacgtggtcctattgttgttcctacggcaggcgaggaaacatctgggaattctggcaatttaagaaaagttgtaatgaaggagaacatatcttctaaaggagatgaaggtgaaaagaagtctacctttatggatctagcaaaagaagatattaaagataatgatagaacattacaacagcagccaggtgatcaaaatagaactatttcatcagtccatggtttaaacaatgatattgtaaaggccttggaccgaattacattgcagaatattccttctcaaacagccccaggttttactgcagaaatgaagaaggactgcagtcttcctcttactgtccttacctgtgctaaagcatgtccacacatggctacttgtggaaatgttctgtttgagggaagaacagttcagctagggaagctttgctgcactggagttgaaactgaagatgatgaagatactgagtcaaattcatcggtagaacaagcatcggttgaagtacctgatggaccaacactccatgacccagacctctatattgagattgtgaaaaatacgaagtctgtcccagaatattcagaggtggcttatcccgattattttggtcacattccgcctccattcaaagagcctattttagaaaggccttatggtgtacaaaggacaaaaattgctcaagatattgaaaggctaatacatcagagtgatatcatagatcgtgtggtatatgacttggataacccaaattacaccattccagaagagggagatattttgaaatttaactccaaatttgagtctgggaatctgcgcaaagtaattcaaattagaaaaaatgaatatgatcttattctgaactcagacataaacagcaatcattatcatcagtggttttactttgaagtcagtggaatgcgaccaggtgttgcttacaggtttaacatcattaactgtgaaaagtccaacagtcagtttaattatggtatgcaaccactcatgtattcggttcaggaagcattaaatgccagaccatggtggattcgtatggggactgacatttgttactataaaaatcatttctcaagaagttcagttgctgcaggtgggcaaaagggaaaatcctactatacaattacatttactgtcaattttccacataaagatgatgtttgctactttgcttatcactatccatatacgtattcaactttacagatgcatcttcaaaaattggaatcagcacacaatcctcagcaaatctattttcggaaagatgtgttatgtgaaaccctgtctggaaacagctgccccttggtgactataacagcaatgccagagtctaattattatgaacatatctgccatttcagaaatcgcccttacgttttcttgtctgctcgggtacatcctggagaaactaatgcaagttgggttatgaaaggaacgttggaatatctcatgagcaataaccccactgctcagagcttacgagaatcttatatttttaaaattgtccctatgttaaatccagatggtgtcatcaatggaaatcatcgctgttctttaagtggagaggatttgaataggcagtggcaaagtccaagtccggatttacatcctacaatttaccatgctaaggggctgttgcaatacttggctgcagtgaagcgtttacccttggtttattgtgattatcatggccattcccgaaagaagaatgtatttatgtatggttgcagcatcaaagagacagtgtggcataccaatgataatgcaacttcatgtgatgttgtggaggatacgggatacaggacattgcctaagatactgagccatatcgccccagcattttgcatgagcagctgtagcttcgtagtggaaaaatctaaagaatccacagcacgtgttgtagtttggagggaaataggagtacaaagaagttataccatggagagtactttatgtggctgtgatcagggaaaatacaagggtttacagattggtacccgagaactggaagagatgggagcaaaattttgtgttggtcttttacgtttgaaaagactgacctctccattggagtataatctgccttccagcctgcttgactttgaaaatgatttaattgaatcaagctgcaaagtaactagccctaccacttatgtcttggatgaagatgaacctcgattccttgaagaagttgattacagtgcagaaagtaatgatgagttagatattgagttggctgaaaatgtaggagattatgaaccttctgctcaagaagaagtactttctgactctgaattatcaagaacatacctaccttgagcccgctgccatctcttgttaactgcaaagaataaatgaaatatcttggtttttatttcccaggaagcttgagagaaatgagtttatacagagctgactcaaaaagacaaaaagtaacttgggccagtttggtttcaagataataaatgtgttattaattaatgataaaattggcgcttgttttattttcgatattcaatgcactttatgtagcattgaatgatcaaatattggatttacctttaaaaaaaaaacctgagtatcattgcatgaatttttatctccctatggttatatcctgcatcaagtggataattttgaagtgtgttcagaatataaaattgaaattttagagttgttgaaaatcctgacttgttgaaaactaatatatatgtacatggatttctatagatgtgtttgtttagaagtgggtagatattgcagataagactgttcttcagaatcatgttaactattgggttgtgactgaagtagtccagggtttgccttgaaaccattacattctacatttaccaaattaaacaaataaaaactgtattaaatgttgca

SEQ ID NO: 109557 - DNA, 4222 bp, Homo sapiens
  Payload ID: 1515
  Gene Symbol: AGTPBP1
  Gene Name: ATP/GTP binding protein 1
  Uniprot ID: Q9UPW5
  ENST ID: ENST00000628899
  CDS Start-End: 68-3784
ctgcgcgtgctgggagccggctggcaaggcgtgcggtgggcggggcgccgcgctgacgttgcccgggatgcggacaggttccgccgcctccagcgccgccgccgcagctgccgccgccgccgcctccgcctcgcctgccaccggggtttgtatgaaaacaccgggcggcgggcggcgagggatccgccgtgatccaggtgctgagccgggtgctgcggctctgcgcggtccccgccagcgccccatcctgagccgccttaccaataattctaggatcgtaggactcctggctcaactggagaagatcaatgctgagccttcagaatcagacactgcccgatatgttacatcaaaaattcttcatctggctcagagtcaagaaaaaacaaggagagaaatgacagccaaaggttctacaggaatggaaattctgctgtcaacattagagaacacaaaagatcttcaaactacacttaatatcttaagcattcttgttgagctggtgtcagctggtggaggtcgaagagtgagtttcttagtcaccaaaggtggttcacaaatattgttgcagttacttatgaatgccagcaaagaatctcccccacatgaggacttaatggtacagattcattctattcttgcaaagattggaccaaaagataaaaaatttggagtaaaggctagaattaatggggctctgaatataaccctgaatttggtcaagcagaatttgcagaatcatcgcttggttctaccttgccttcagcttttacgagtatattctgccaactctgtgaattcagtatccttagggaaaaatggagttgtggaactgatgtttaaaatcattggaccatttagtaagaagaattccagtcttataaaggttgctttagacactcttgctgcattgctaaaatcaaaaacaaatgccaggagagctgtagacagaggatatgtccaagtgcttttaacaatttatgtagattggcaccgccatgataaccggcatagaaacatgctcattcggaaaggaattttacagagtttaaaaagtgttacaaacatcaagttgggaagaaaagcatttattgatgccaatgggatgaaaattctgtataatacttcgcaattgcctgttattcctgtgactggtcctgtggctcagctctacagcttacctcctgaagtggatgacgtagtagatgaaagtgatgacaacgatgatattgatgtagaagctgaaaacgaaactgagaatgaagatgacctagatcaaaattttaagaatgatgatattgaaacagatattaacaaactaaaaccccagcaagaaccgggacgaacaatagaagatctaaaaatgtatgaacaccttttccctgagcttgttgatgattttcaggactatgatttaatctccaaagaaccaaagccttttgtatttgagggaaaagtacgtggtcctattgttgttcctacggcaggcgaggaaacatctgggaattctggcaatttaagaaaagttgtaatgaaggagaacatatcttctaaaggagatgaaggtgaaaagaagtctacctttatggatctagcaaaagaagatattaaagataatgatagaacattacaacagcagccaggtgatcaaaatagaactatttcatcagtccatggtttaaacaatgatattgtaaaggccttggaccgaattacattgcagaatattccttctcaaacagccccaggttttactgcagaaatgaagaaggactgcagtcttcctcttactgtccttacctgtgctaaagcatgtccacacatggctacttgtggaaatgttctgtttgagggaagaacagttcagctagggaagctttgctgcactggagttgaaactgaagatgatgaagatactgagtcaaattcatcggtagaacaagcatcggttgaagtacctgatggaccaacactccatgacccagacctctatattgagattgtgaaaaatacgaagtctgtcccagaatattcagaggtggcttatcccgattattttggtcacattccgcctccattcaaagagcctattttagaaaggccttatggtgtacaaaggacaaaaattgctcaagatattgaaaggctaatacatcagagtgatatcatagatcgtgtggtatatgacttggataacccaaattacaccattccagaagagggagatattttgaaatttaactccaaatttgagtctgggaatctgcgcaaagtaattcaaattagaaaaaatgaatatgatcttattctgaactcagacataaacagcaatcattatcatcagtggttttactttgaagtcagtggaatgcgaccaggtgttgcttacaggtttaacatcattaactgtgaaaagtccaacagtcagtttaattatggtatgcaaccactcatgtattcggttcaggaagcattaaatgccagaccatggtggattcgtatggggactgacatttgttactataaaaatcatttctcaagaagttcagttgctgcaggtgggcaaaagggaaaatcctactatacaattacatttactgtcaattttccacataaagatgatgtttgctactttgcttatcactatccatatacgtattcaactttacagatgcatcttcaaaaattggaatcagcacacaatcctcagcaaatctattttcggaaagatgtgttatgtgaaaccctgtctggaaacagctgccccttggtgactataacagcaatgccagagtctaattattatgaacatatctgccatttcagaaatcgcccttacgttttcttgtctgctcgggtacatcctggagaaactaatgcaagttgggttatgaaaggaacgttggaatatctcatgagcaataaccccactgctcagagcttacgagaatcttatatttttaaaattgtccctatgttaaatccagatggtgtcatcaatggaaatcatcgctgttctttaagtggagaggatttgaataggcagtggcaaagtccaagtccggatttacatcctacaatttaccatgctaaggggctgttgcaatacttggctgcagtgaagcgtttacccttggtttattgtgattatcatggccattcccgaaagaagaatgtatttatgtatggttgcagcatcaaagagacagtgtggcataccaatgataatgcaacttcatgtgatgttgtggaggatacgggatacaggacattgcctaagatactgagccatatcgccccagcattttgcatgagcagctgtagcttcgtagtggaaaaatctaaagaatccacagcacgtgttgtagtttggagggaaataggagtacaaagaagttataccatggagagtactttatgtggctgtgatcagggaaaatacaagggtttacagattggtacccgagaactggaagagatgggagcaaaattttgtgttggtcttttacgtttgaaaagactgacctctccattggagtataatctgccttccagcctgcttgactttgaaaatgatttaattgaatcaagctgcaaagtaactagccctaccacttatgtcttggatgaagatgaacctcgattccttgaagaagttgattacagtgcagaaagtaatgatgagttagatattgagttggctgaaaatgtaggagattatgaaccttctgctcaagaagaagtactttctgactctgaattatcaagaacatacctaccttgagcccgctgccatctcttgttaactgcaaagaataaatgaaatatcttggtttttatttcccaggaagcttgagagaaatgagtttatacagagctgactcaaaaagacaaaaagtaacttgggccagtttggtttcaagataataaatgtgttattaattaatgataaaattggcgcttgttttattttcgatattcaatgcactttatgtagcattgaatgatcaaatattggatttacctttaaaaaaaaaacctgagtatcattgcatgaatttttatctccctatggttatatcctgcatcaagtggataattttgaagtgtgttcagaatataaaattgaaattttagagttgttgaaaatcctgacttgttgaaaactaatatatatgtacatggatttctatagatgtgtttgtttagaagtgggtagata

SEQ ID NO: 109558 - DNA, 3176 bp, Homo sapiens
  Payload ID: 1516
  Gene Symbol: AGBL1
  Gene Name: ATP/GTP binding protein-like 1
  ENST ID: ENST00000421325
  CDS Start-End: 81-3176
ctgacaaggagtccatcctgaccatcctcaaggtcctcggagatctgctttctgttggcacagaccggagaattcactacatgatcagcaagggtggcagtgaagctcttctgcagaccctggtagacacagcgaggacagctcctccagactatgacatcctcctgcctctcttccggctgctggccaaagttggcctaagagataaaaagattggacggaaggccctagaattggaagcacttgatgtgacattgattctggccaggaagaacctatcccatggccagaatctcctccactgtctctgggctctgcgtgtgtttgcctccagtgtctccatgggagccatgctgggaattaatggagccatggaactgcttttcaaggttattactccttacacccgaaagcgcacccaagcaatcagggcagccactgaagttttggcagcattgctgaaatccaagtcgaacggccgcagagcagtgaaccgaggctacgtcaccagcctgctcgggctgcaccaggactggcacagccatgacacagccaacgcctacgtgcagatccgacggggcttgctgctctgcctcaggcacattgctgccctccggtccggcagggaggccttcctggcagcacagggcatggagatcctcttcagcaccacacagaactgcctggatgacaagagcatggagcccgtcatctctgtggtgcttcagatcctgaggcagtgctaccctacgagtccacttcccttggtcacagccagcagtgcctatgccttcccggtccccgggtgcatcaccactgaacctccacatgatctacctgaagaggattttgaagatgatggcgatgatgaagtggacaaagactctgatactgaagatgggaaagtggaagatgatgacttggaaacagacgtgaacaagctgagttccaaacctggtcttgaccgacctgaagaggaactgatgcaatatgaggtgatgtgtcttgagctctcctatagctttgaggaactgcagtccaaacttggagatgatttgaactctgaaaagactcagtatgccaatcaccaccacattccagccgctgcctcctcaaaacagcattgctacagcaaggaccaaagctcctgtgggcaagaaagagaatatgctgtccagacttcccttctgtgcagggtgaagacgggaaggtccactgtgcatctaggctccaaaaaaaatcctggagtgaacctgtaccaaaatgtgcaatccaatagtctcaggagagattcttctgaaagtgaaatccctgacattcaggcttccccgaaagcagatgcctgggacgtagatgcaattttctgcccaaggatgagtgcctccttttctaattccactaggactagagaagttgtcaaagtaatagataagcttctgcagacacatctgaagcgtgtccctttccacgatccctatctttatatggccaaagccagaagaaccagctctgtggtggacttcaagatgatggcatttcctgatgtctggggacactgtccccctcccaccacccagcctatgttggaacgaaaatgtggagtccaaaggatcaggatatttgaggatattcggaggctcatccagccaagtgatgttataaataaagttgtcttcagtttagatgagccttggcctttgcaagacaatgcttccaattgtttacggttcttctccaaatttgagtcaggaaatcttcgcaaagccatccaagtgcgtgagttcgagtatgacttgctggtcaacgcagatgtgaatagcacccagcaccagcagtggttctatttcaaagtgagcggtatgcaggcggccatcccttaccacttcaacatcatcaactgtgagaagcccaacagccagtttaattatgggatgcagcccaccctatattctgtgaaggaggctcttcttggcaaacccacctggataaggacaggccatgaaatatgttattacaaaaatcattatcgccagagtacagctgttgcaggcggagcatctgggaagtgctactataccctcacctttgctgtcaccttcccacacagtgaggatgtctgctacctggcctaccactatccctatacctacacagccctcatgactcatcttgacatcctggaaaagagtgtcaacctcaaagaggtctacttccggcaagatgttctctgccagacgctgggagggaatccgtgtcccttggtgaccatcacggccatgcctgagtccaacagtgatgagcatctagagcagttccgacatcgtccatatcaggtgatcactgctcgagttcatccaggagagagcaatgccagttgggtgatgaagggtaccttggagttcctggtcagcagtgaccctgtggctaggctcttgagggaaaacttcatcttcaagatcatacccatgctcaacccagatggtgtcatcaacggcaaccacagatgctcactgagcggggaagatttgaacagacaatggctttctcccagtgctcatctgcagccaaccatttaccatgccaaaggcctcctctaccacctgagcagcattggccgaagtcccgtggttttctgtgacttccatggccactcccaaaagaagaatgtgttcctttatggctgtagcatcaaggaaaccttgtggcaagcagcatgcactgtgggcacatctactatcctagaggaggtcaactacaggactcttcccaaaatccttgataagctagcaccagcattcacaatgagcagctgcagctttctcgtggagaaatctcgagcttccacggcccgggtggtggtgtggagagagatgggggtgtccagaagctacaccatggaaagcagctactgtggctgcaaccagggcccttatcagtgtacacagaggctgttggagaggacaaagaatgaaagggctcacccagtggatggccttcagggtctacagtttggtaccagagaactggaggagatgggagccatgttctgtttgggcctcctcatcctggagctcaaatctgccagctgcagccatcagctcctggctcaagctgcaactctgctgagtgctgaggaggacgctctggaccagcacctccaacgggatgctcccaag

SEQ ID NO: 109559 - DNA, 3508 bp, Homo sapiens
  Payload ID: 1516
  Gene Symbol: AGBL1
  Gene Name: ATP/GTP binding protein-like 1
  Uniprot ID: Q96MI9
  ENST ID: ENST00000441037
  CDS Start-End: 96-3296
cattgcagagctcctctgacaaggagtccatcctgaccatcctcaaggtcctcggagatctgctttctgttggcacagaccggagaattcactacatgatcagcaagggtggcagtgaagctcttctgcagaccctggtagacacagcgaggacagctcctccagactatgacatcctcctgcctctcttccggctgctggccaaagttggcctaagagataaaaagattggacggaaggccctagaattggaagcacttgatgtgacattgattctggccaggaagaacctatcccatggccagaatctcctccactgtctctgggctctgcgtgtgtttgcctccagtgtctccatgggagccatgctgggaattaatggagccatggaactgcttttcaaggttattactccttacacccgaaagcgcacccaagcaatcagggcagccactgaagttttggcagcattgctgaaatccaagtcgaacggccgcagagcagtgaaccgaggctacgtcaccagcctgctcgggctgcaccaggactggcacagccatgacacagccaacgcctacgtgcagatccgacggggcttgctgctctgcctcaggcacattgctgccctccggtccggcagggaggccttcctggcagcacagggcatggagatcctcttcagcaccacacagaactgcctggatgacaagagcatggagcccgtcatctctgtggtgcttcagatcctgaggcagtgctaccctacgagtccacttcccttggtcacagccagcagtgcctatgccttcccggtccccgggtgcatcaccactgaacctccacatgatctacctgaagaggattttgaagatgatggcgatgatgaagtggacaaagactctgatactgaagatgggaaagtggaagatgatgacttggaaacagacgtgaacaagctgagttccaaacctggtcttgaccgacctgaagaggaactgatgcaatatgaggtgatgtgtcttgagctctcctatagctttgaggaactgcagtccaaacttggagatgatttgaactctgaaaagactcagtatgccaatcaccaccacattccagccgctgcctcctcaaaacagcattgctacagcaaggaccaaagctcctgtgggcaagaaagagaatatgctgtccagacttcccttctgtgcagggtgaagacgggaaggtccactgtgcatctaggctccaaaaaaaatcctggagtgaacctgtaccaaaatgtgcaatccaatagtctcaggagagattcttctgaaagtgaaatccctgacattcaggcttccccgaaagcagatgcctgggacgtagatgcaattttctgcccaaggatgagtgcctccttttctaattccactaggactagagaagttgtcaaagtaatagataagcttctgcagacacatctgaagcgtgtccctttccacgatccctatctttatatggccaaagccagaagaaccagctctgtggtggacttcaagatgatggcatttcctgatgtctggggacactgtccccctcccaccacccagcctatgttggaacgaaaatgtggagtccaaaggatcaggatatttgaggatattcggaggctcatccagccaagtgatgttataaataaagttgtcttcagtttagatgagccttggcctttgcaagacaatgcttccaattgtttacggttcttctccaaatttgagtcaggaaatcttcgcaaagccatccaagtgcgtgagttcgagtatgacttgctggtcaacgcagatgtgaatagcacccagcaccagcagtggttctatttcaaagtgagcggtatgcaggcggccatcccttaccacttcaacatcatcaactgtgagaagcccaacagccagtttaattatgggatgcagcccaccctatattctgtgaaggaggctcttcttggcaaacccacctggataaggacaggccatgaaatatgttattacaaaaatcattatcgccagagtacagctgttgcaggcggagcatctgggaagtgctactataccctcacctttgctgtcaccttcccacacagtgaggatgtctgctacctggcctaccactatccctatacctacacagccctcatgactcatcttgacatcctggaaaagagtgtcaacctcaaagaggtctacttccggcaagatgttctctgccagacgctgggagggaatccgtgtcccttggtgaccatcacggccatgcctgagtccaacagtgatgagcatctagagcagttccgacatcgtccatatcaggtgatcactgctcgagttcatccaggagagagcaatgccagttgggtgatgaagggtaccttggagttcctggtcagcagtgaccctgtggctaggctcttgagggaaaacttcatcttcaagatcatacccatgctcaacccagatggtgtcatcaacggcaaccacagatgctcactgagcggggaagatttgaacagacaatggctttctcccagtgctcatctgcagccaaccatttaccatgccaaaggcctcctctaccacctgagcagcattggccgaagtcccgtggttttctgtgacttccatggccactcccaaaagaagaatgtgttcctttatggctgtagcatcaaggaaaccttgtggcaagcagcatgcactgtgggcacatctactatcctagaggaggtcaactacaggactcttcccaaaatccttgataagctagcaccagcattcacaatgagcagctgcagctttctcgtggagaaatctcgagcttccacggcccgggtggtggtgtggagagagatgggggtgtccagaagctacaccatggaaagcagctactgtggctgcaaccagggcccttatcagtgtacacagaggctgttggagaggacaaagaatgaaagggctcacccagtggatggccttcagggtctacagtttggtaccagagaactggaggagatgggagccatgttctgtttgggcctcctcatcctggagctcaaatctgccagctgcagccatcagctcctggctcaagctgcaactctgctgagtgctgaggaggacgctctggaccagcacctccaacgattaaaatcatccaatttcctgccaaagcatatttggtttgcttaccacttttttgccattacaaactttttcaagatgaaccttcttctgcatgtctccccagtttgtgacacttgatgaggctcccttcaaatgagcaagtattgaagttcatgccatgtgcccagctcctcctggatctgtgaggaaatatctgaaaccttcaagatgttgtacatgtcttatggaaaatgttgctccatcatccctgcactcccttatctagtatatctacctccataagaaaacataaggacaggcaatcttcataaaaatagactccacctatt

SEQ ID NO: 109560 - DNA, 3295 bp, Homo sapiens
  Payload ID: 1517
  Gene Symbol: AGBL2
  Gene Name: ATP/GTP binding protein-like 2
  ENST ID: ENST00000357610
  CDS Start-End: 1-2715
atgttcccagctttggaaacgcacctaaagcagactattcctgatccttatgaagactttatgtaccgtcacctccaatattatggctactttaaagctcagagaggcagtttaccaaactctgctacgcatcagcatgttcggaagaataaccctcaatgcctgttgaatggctctcttggggaaaaagatgatttgataccagacaccctgcaaaaggagaagcttctatggcctatcagtttatcttcagctgtgcacagacagatagaagccatcaacagagactttcactcttgcctgggctggatgcagtggcgcggcctcagctcactgcaacctccacctcccagattcaaggattctcctgcctcagctttccgagtagctgggattacagattcacatatgctgagtttaccacatcttaggagcagacagcttctttatgatgagttggatgaagtaaacccacgtcttcgagaaccccaagagctcttttccattttgtctaccaagaggccactgcaggctccaagatggccaattgaatgtgaggtcatcaaggaaaacatccatcatattgagtgggctccacctcaaccagaatatttctatcagcctaaaggaaatgaaaaggtaccagagattgtaggagagaaaaaaggaacagttgtctatcaattagattcagtgcctatagaaggttcctattttaccagttccagagtgggaggcaaacgaggaattgtcaaggaacttgctgtcacgttgcaaggaccagaagataatactctactgtttgaatcaaggtttgagagtgggaatctgcaaaaagctgtcagagtagacacctatgagtatgaactcaccttgcgaactgacctctacactaacaaacacactcagtggttttattttcgtgttcagaacaccagaaaagatgctacctatcgcttcaccattgtcaacttgctaaaacccaagagtctttatactgtagggatgaagccactcttgtactcccaattggatgccaacacccgcaatattggctggaggagagaaggaaatgaaatcaagtactacaagaacaacacggatgatgggcagcagcccttctactgtctcacgtggaccattcagtttccatatgaccaggacacttgcttctttgcacacttctacccatatacatacactgatttgcaatgctacctcctgtcagtggcaaacaaccctatccagtctcagttctgcaagctccaaactttatgcaggagcctagcaggaaataccgtttacttgctcaccatcaccaacccatcccagacccctcaagaggcagctgcaaagaaagctgtggtcttgagtgccagagttcaccctggagaaagtaatggctcctgggttatgaaaggctttttggacttcatccttagcaactccccagatgcccagctcctcagagatatttttgtcttcaaggtgcttcccatgttaaatccagatggtgtgattgtggggaattatcggtgttccttggccggaagggatttgaacaggcattataaaaccattctgaaggagtctttcccttgtatttggtacaccaggaacatgatcaaaagacttcttgaagaaagagaggttctgttgtattgtgatttccatggccacagtcgtaagaataatatcttcctgtatggctgtaataacaacaatcgcaaatactggcttcatgaacgagtctttcctttaatgttatgcaaaaatgcaccagataagttctcttttcacagttgtaattttaaggtccaaaaatgcaaagaaggaacaggacgagttgttatgtggcggatgggaatcctaaacagctacaccatggagtctacctttggcgggtccaccctgggtaataaaagagacacccactttaccatcgaagatctgaagtccttaggttatcatgtctgtgacacccttctggacttttgtgatcctgaccaaatgaagttcactcagtgtctagcagagcttaaggagcttttacgacaggaaatccacaagaaattccatgaacttggacaagatgtagatttagaaggaagttggagtgacatctctttgtctgacattgaatccagaaacagcaccagtggctctgacagttctctctcagatggtcttcctgttcacctagcaaacatagcagatgagctgactcagaaaaagaagatgtttaagaagaaaaaaaagaagtcacttcagactaggaaacagcgaaatgagcagtatcagaaaaaaaatttgatgcagaagttaaagttaacagaagatacctcagaaaaggcaggatttgcttctactctgcaaaagcagccaacctttttcaaaaactcagagaattccagttttttaccaatgaaaaatgaaaacccaaggttaaatgagacaaatttaaatagaagagacaaagacacccccctggacccatcaatggccaccctgattctgcctaagaataaagggagaatgcagaataagaagccaggctttacagtatcatgctctccaaagagaaccataaactccagccaagagccagctccaggtatgaagccaaactggcctaggagcagatatcctgccacaaagagaggctgtgctgccatggcggcatacccatccttgcacatatacacatacccgtaggtgagcctgggctgtgccacacaagcacttcatcgggggttttgagattagacacattttataatgggggagatgtatgactgggaactgcatttacttgtggtatactgtgttgtgcactcatgcactgaccttacactttgtacttacactgtgggcatgtggtcaagatgcatacctcatgaattcaactattttttcataaaatgaaattttattatgatgtgtaaaaatgctttatcagaaactgaagtgtgttctcatggcacacttcatggcagcacagatatacctcattttaaccaatagatattctctctaaaattatgtgcaaatcaatttttaaaaatcaaaatctatgttaaacacattttggcagtgtgctataataaaaaaaagtgttgtgtcaaagctttctagtgacggtcagtcctactgctgtatgtcaggtttgctcacaatgaggtattcccacatagaaataacaatgcatgtattacccagaatttaatgttgcgtaccttatgttcaatgaggttttgtaatttttttaggctgatgattaaaattctttctctct

SEQ ID NO: 109561 - DNA, 479 bp, Homo sapiens
  Payload ID: 1517
  Gene Symbol: AGBL2
  Gene Name: ATP/GTP binding protein-like 2
  ENST ID: ENST00000530969
  CDS Start-End: 383-479
gcttcctgctttcggttgctagactacccgggccctcacagaaggcggtggcgggcgggtgcagcgagtttgtccccttgcccgcacactgcttggcctctgtacttaagtgcggtggccgcctgcctcgctggagcttctctgccgcagccatccgtgctgcttgggacgggccggggcgcgaaggcggtcgcatccatcgctctgccctcctgggaagtttctgctctccttccccgctcctacccttaggaaaccccctcaccacctgccccagaccagcttctcttgtgtaatcagctgcctatttggaaattgggcagggtttgcgactggatgctaatgtcactgactagttttcagcctaccatccagaagtaacatgttcccagctttggaaacgcacctaaagcagactattcctgatccttatgaagactttatgtaccgtcacctccaatattatggctactttaaag

SEQ ID NO: 109562 - DNA, 1798 bp, Homo sapiens
  Payload ID: 1517
  Gene Symbol: AGBL2
  Gene Name: ATP/GTP binding protein-like 2
  ENST ID: ENST00000528609
  CDS Start-End: 1-380
ctcaagaggcagctgcaaagaaagctgtggtcttgagtgccagagttcaccctggagaaagtaatggctcctgggttatgaaaggctttttggacttcatccttagcaactccccagatgcccagctcctcagagatatttttgtcttcaaggtgcttcccatgttaaatccagatggtgtgattgtggggaattatcggtgttccttggccggaagggatttgaacaggcattataaaaccattctgaaggagtctttcccttgtatttggtacaccaggaacatgatcaaaagttctcttttcacagttgtaattttaaggtccaaaaatgcaaagaaggaacaggacgagttgttatgtggcggatgggaatcctaaacagctacaccatggagtctacctttggcgggtccaccctgggtaataaaagagacacccactttaccatcgaagatctgaagtccttaggttatcatgtctgtgacacccttctggacttttgtgatcctgaccaaatgaagttcactcagtgtctagcagagcttaaggagcttttacgacaggaaatccacaagaaattccatgaacttggacaagatgtagatttagaaggaagttggagtgacatctctttgtctgacattgaatccagcaccagtggctctgacagttctctctcagatggtcttcctgttcacctagcaaacatagcagatgagctgactcagaaaaagaagatgtttaagaagaaaaaaaagaagtcacttcagactaggaaacagcgaaatgagcagtatcagaaaaaaaatttgatgcagaagttaaagttaacagaagatacctcagaaaaggcaggatttgcttctactctgcaaaagcagccaacctttttcaaaaactcagagaattccagttttttaccaatgaaaaatgaaaacccaaggttaaatgagacaaatttaaatagaagagacaaagacacccccctggacccatcaatggccaccctgattctgcctaagaataaagggagaatgcagaataagaagccaggctttacagtatcatgctctccaaagagaaccataaactccagccaagagccagctccaggtatgaagccaaactggcctaggagcagatatcctgccacaaagagaggctgtgctgccatggcggcatacccatccttgcacatatacacatacccgtaggtgagcctgggctgtgccacacaagcacttcatcgggggttttgagattagacacattttataatgggggagatgtatgactgggaactgcatttacttgtggtatactgtgttgtgcactcatgcactgaccttacactttgtacttacactgtgggcatgtggtcaagatgcatacctcatgaattcaactattttttcataaaatgaaattttattatgatgtgtaaaaatgctttatcagaaactgaagtgtgttctcatggcacacttcatggcagcacagatatacctcattttaaccaatagatattctctctaaaattatgtgcaaatcaatttttaaaaatcaaaatctatgttaaacacattttggcagtgtgctataataaaaaaaagtgttgtgtcaaagctttctagtgacggtcagtcctactgctgtatgtcaggtttgctcacaatgaggtattcccacatagaaataacaatgcatgtattacccagaatttaatgttgcgtaccttatgttcaatgaggttttgtaatttttttaggctgatgattaaaattctttctctctaa

SEQ ID NO: 109563 - DNA, 550 bp, Homo sapiens
  Payload ID: 1517
  Gene Symbol: AGBL2
  Gene Name: ATP/GTP binding protein-like 2
  ENST ID: ENST00000528632
  CDS Start-End: 60-245
ggtttgcgactggatgctaatgtcactgactagttttcagcctaccatccagaagtaacatgttcccagctttggaaacgcacctaaagcagactattcctgatccttatgaagactttatgtaccgtcacctccaatattatggctactttaaaggatctcgctctgtcactcaggctggagggcagtggcctccacatcccaggctcaagcaaccctcccagcctttggctatcattttctgagttccaacacagcccttgtagcttcagaatctttctgcctgccaagtcctttctcactccactacaccaggctgcttctcaagtctcctcttcacatccatttcctcagctgtaagctcagagaggcagtttaccaaactctgctacgcatcagcatgttcggaagaataaccctcaatgcctgttgaatggctctcttggggaaaaagatgatttgataccagacaccctgcaaaaggagaagcttctatggcctatcagtttatcttcagctgtgcacagacagatagaagccatcaacagag

SEQ ID NO: 109564 - DNA, 552 bp, Homo sapiens
  Payload ID: 1517
  Gene Symbol: AGBL2
  Gene Name: ATP/GTP binding protein-like 2
  ENST ID: ENST00000530577
  CDS Start-End: 108-552
aacaacgctcatgtactttttgttgagtctattatggtttgaaaacattatcttgattgaagtggcctttcctttcacagactattcctgatccttatgaagactttatgtaccgtcacctccaatattatggctactttaaagctcagagaggcagtttaccaaactctgctacgcatcagcatgttcggaagaataaccctcaatgcctgttgaatggctctcttggggaaaaagatgatttgataccagacaccctgcaaaaggagaagcttctatggcctatcagtttatcttcagctgtgcacagacagatagaagccatcaacagagattcacatatgctgagtttaccacatcttaggagcagacagcttctttatgatgagttggatgaagtaaacccacgtcttcgagaaccccaagagctcttttccattttgtctaccaagaggccactgcaggctccaagatggccaattgaatgtgaggtcatcaaggaaaacatccatcatattgagtgggctccacctcaaccagaatatttctatc

SEQ ID NO: 109565 - DNA, 3577 bp, Homo sapiens
  Payload ID: 1517
  Gene Symbol: AGBL2
  Gene Name: ATP/GTP binding protein-like 2
  Uniprot ID: Q5U5Z8
  ENST ID: ENST00000525123
  CDS Start-End: 287-2995
gggccctcacagaaggcggtggcgggcgggtgcagcgagtttgtccccttgcccgcacactgcttggcctctgtacttaagtgcggtggccgcctgcctcgctggagcttctctgccgcagccatccgtgctgcttgggacgggccggggcgcgaaggcggtcgcatccatcgctctgccctcctgcttctcttgtgtaatcagctgcctatttggaaattgggcagggtttgcgactggatgctaatgtcactgactagttttcagcctaccatccagaagtaacatgttcccagctttggaaacgcacctaaagcagactattcctgatccttatgaagactttatgtaccgtcacctccaatattatggctactttaaagctcagagaggcagtttaccaaactctgctacgcatcagcatgttcggaagaataaccctcaatgcctgttgaatggctctcttggggaaaaagatgatttgataccagacaccctgcaaaaggagaagcttctatggcctatcagtttatcttcagctgtgcacagacagatagaagccatcaacagagactttcactcttgcctgggctggatgcagtggcgcggcctcagctcactgcaacctccacctcccagattcaaggattctcctgcctcagctttccgagtagctgggattacagattcacatatgctgagtttaccacatcttaggagcagacagcttctttatgatgagttggatgaagtaaacccacgtcttcgagaaccccaagagctcttttccattttgtctaccaagaggccactgcaggctccaagatggccaattgaatgtgaggtcatcaaggaaaacatccatcatattgagtgggctccacctcaaccagaatatttctatcagcctaaaggaaatgaaaaggtaccagagattgtaggagagaaaaaaggaacagttgtctatcaattagattcagtgcctatagaaggttcctattttaccagttccagagtgggaggcaaacgaggaattgtcaaggaacttgctgtcacgttgcaaggaccagaagataatactctactgtttgaatcaaggtttgagagtgggaatctgcaaaaagctgtcagagtagacacctatgagtatgaactcaccttgcgaactgacctctacactaacaaacacactcagtggttttattttcgtgttcagaacaccagaaaagatgctacctatcgcttcaccattgtcaacttgctaaaacccaagagtctttatactgtagggatgaagccactcttgtactcccaattggatgccaacacccgcaatattggctggaggagagaaggaaatgaaatcaagtactacaagaacaacacggatgatgggcagcagcccttctactgtctcacgtggaccattcagtttccatatgaccaggacacttgcttctttgcacacttctacccatatacatacactgatttgcaatgctacctcctgtcagtggcaaacaaccctatccagtctcagttctgcaagctccaaactttatgcaggagcctagcaggaaataccgtttacttgctcaccatcaccaacccatcccagacccctcaagaggcagctgcaaagaaagctgtggtcttgagtgccagagttcaccctggagaaagtaatggctcctgggttatgaaaggctttttggacttcatccttagcaactccccagatgcccagctcctcagagatatttttgtcttcaaggtgcttcccatgttaaatccagatggtgtgattgtggggaattatcggtgttccttggccggaagggatttgaacaggcattataaaaccattctgaaggagtctttcccttgtatttggtacaccaggaacatgatcaaaagacttcttgaagaaagagaggttctgttgtattgtgatttccatggccacagtcgtaagaataatatcttcctgtatggctgtaataacaacaatcgcaaatactggcttcatgaacgagtctttcctttaatgttatgcaaaaatgcaccagataagttctcttttcacagttgtaattttaaggtccaaaaatgcaaagaaggaacaggacgagttgttatgtggcggatgggaatcctaaacagctacaccatggagtctacctttggcgggtccaccctgggtaataaaagagacacccactttaccatcgaagatctgaagtccttaggttatcatgtctgtgacacccttctggacttttgtgatcctgaccaaatgaagttcactcagtgtctagcagagcttaaggagcttttacgacaggaaatccacaagaaattccatgaacttggacaagatgtagatttagaaggaagttggagtgacatctctttgtctgacattgaatccagcaccagtggctctgacagttctctctcagatggtcttcctgttcacctagcaaacatagcagatgagctgactcagaaaaagaagatgtttaagaagaaaaaaaagaagtcacttcagactaggaaacagcgaaatgagcagtatcagaaaaaaaatttgatgcagaagttaaagttaacagaagatacctcagaaaaggcaggatttgcttctactctgcaaaagcagccaacctttttcaaaaactcagagaattccagttttttaccaatgaaaaatgaaaacccaaggttaaatgagacaaatttaaatagaagagacaaagacacccccctggacccatcaatggccaccctgattctgcctaagaataaagggagaatgcagaataagaagccaggctttacagtatcatgctctccaaagagaaccataaactccagccaagagccagctccaggtatgaagccaaactggcctaggagcagatatcctgccacaaagagaggctgtgctgccatggcggcatacccatccttgcacatatacacatacccgtaggtgagcctgggctgtgccacacaagcacttcatcgggggttttgagattagacacattttataatgggggagatgtatgactgggaactgcatttacttgtggtatactgtgttgtgcactcatgcactgaccttacactttgtacttacactgtgggcatgtggtcaagatgcatacctcatgaattcaactattttttcataaaatgaaattttattatgatgtgtaaaaatgctttatcagaaactgaagtgtgttctcatggcacacttcatggcagcacagatatacctcattttaaccaatagatattctctctaaaattatgtgcaaatcaatttttaaaaatcaaaatctatgttaaacacattttggcagtgtgctataataaaaaaaagtgttgtgtcaaagctttctagtgacggtcagtcctactgctgtatgtcaggtttgctcacaatgaggtattcccacatagaaataacaatgcatgtattacccagaatttaatgttgcgtaccttatgttcaatgaggttttgtaatttttttaggctgatgattaaaattctttctctctaa

SEQ ID NO: 109566 - DNA, 1288 bp, Homo sapiens
  Payload ID: 1517
  Gene Symbol: AGBL2
  Gene Name: ATP/GTP binding protein-like 2
  ENST ID: ENST00000532595
  CDS Start-End: 296-1288
agactacccgggccctcacagaaggcggtggcgggcgggtgcagcgagtttgtccccttgcccgcacactgcttggcctctgtacttaagtgcggtggccgcctgcctcgctggagcttctctgccgcagccatccgtgctgcttgggacgggccggggcgcgaaggcggtcgcatccatcgctctgccctcctgcttctcttgtgtaatcagctgcctatttggaaattgggcagggtttgcgactggatgctaatgtcactgactagttttcagcctaccatccagaagtaacatgttcccagctttggaaacgcacctaaagcagactattcctgatccttatgaagactttatgtaccgtcacctccaatattatggctactttaaagctcagagaggcagtttaccaaactctgctacgcatcagcatgttcggaagaataaccctcaatgcctgttgaatggctctcttggggaaaaagatgatttgataccagacaccctgcaaaaggagaagcttctatattcacatatgctgagtttaccacatcttaggagcagacagcttctttatgatgagttggatgaagtaaacccacgtcttcgagaaccccaagagctcttttccattttgtctaccaagaggccactgcaggctccaagatggccaattgaatgtgaggtcatcaaggaaaacatccatcatattgagtgggctccacctcaaccagaatatttctatcagcctaaaggaaatgaaaaggtaccagagattgtaggagagaaaaaaggaacagttgtctatcaattagattcagtgcctatagaaggttcctattttaccagttccagagtgggaggcaaacgaggaattgtcaaggaacttgctgtcacgttgcaaggaccagaagataatactctactgtttgaatcaaggtttgagagtgggaatctgcaaaaagctgtcagagtagacacctatgagtatgaactcaccttgcgaactgacctctacactaacaaacacactcagtggttttattttcgtgttcagaacaccagaaaagatgctacctatcgcttcaccattgtcaacttgctaaaacccaagagtctttatactgtagggatgaagccactcttgtactcccaattggatgccaacacccgcaatattggctggaggagagaaggaaatgaaatcaagtactacaagaacaacacggatgatgggcagcagcccttctactgtctcacgtggaccattcagtttccatatgaccag

SEQ ID NO: 109567 - DNA, 927 bp, Homo sapiens
  Payload ID: 1517
  Gene Symbol: AGBL2
  Gene Name: ATP/GTP binding protein-like 2
  ENST ID: ENST00000529154
  CDS Start-End: 642-927
gctttcggttgctagactacccgggccctcacagaaggcggtggcgggcgggtgcagcgagtttgtccccttgcccgcacactgcttggcctctgtacttaagtgcggtggccgcctgcctcgctggagcttctctgccgcagccatccgtgctgcttgggacgggccggggcgcgaaggcggtcgcatccatcgctctgccctcctgggaagtttctgctctccttccccgctcctacccttaggaaaccccctcaccacctgccccagaccaggttcctctgaaccctaaattcaatctttagggcccactttcccaaccccctgacctttttccatcggcacctaccgagacgacttcgtcgcgtgctcccatacccatttctttcactttcctgtggcgagcatctcctttctcagggaaagggaagcatggggccagcaccttgggaagaagaagcgggaagatacgctgccctccctgtctcagatgcacctctggcctcggcgtgaccaccttgtttagctgaggagaagctggcttctcttgtgtaatcagctgcctatttggaaattgggcagggtttgcgactggatgctaatgtcactgactagttttcagcctaccatccagaagtaacatgttcccagctttggaaacgcacctaaagcagactattcctgatccttatgaagactttatgtaccgtcacctccaatattatggctactttaaagctcagagaggcagtttaccaaactctgctacgcatcagcatgttcggaagaataaccctcaatgcctgttgaatggctctcttggggaaaaagatgatttgataccagacaccctgcaaaaggagaagcttctatggcctatcagtttatcttcagctgtgcacagacagatagaagccatcaacagag

SEQ ID NO: 109568 - DNA, 2929 bp, Homo sapiens
  Payload ID: 1517
  Gene Symbol: AGBL2
  Gene Name: ATP/GTP binding protein-like 2
  ENST ID: ENST00000528244
  CDS Start-End: 255-2729
agactacccgggccctcacagaaggcggtggcgggcgggtgcagcgagtttgtccccttgcccgcacactgcttggcctctgtacttaagtgcggtggccgcctgcctcgctggagcttctctgccgcagccatccgtgctgcttgggacgggccggggcgcgaaggcggtcgcatccatcgctctgccctcctgggtttgcgactggatgctaatgtcactgactagttttcagcctaccatccagaagtaacatgttcccagctttggaaacgcacctaaagcagactattcctgatccttatgaagactttatgtaccgtcacctccaatattatggctactttaaagctcagagaggcagtttaccaaactctgctacgcatcagcatgttcggaagaataaccctcaatgcctgttgaatggctctcttggggaaaaagatgatttgataccagacaccctgcaaaaggagaagcttctatggcctatcagtttatcttcagctgtgcacagacagatagaagccatcaacagagattcacatatgctgagtttaccacatcttaggagcagacagcttctttatgatgagttggatgaagtaaacccacgtcttcgagaaccccaagagctcttttccattttgtctaccaagaggccactgcaggctccaagatggccaattgaatgtgaggtcatcaaggaaaacatccatcatattgagtgggctccacctcaaccagaatatttctatcagcctaaaggaaatgaaaaggtaccagagattgtaggagagaaaaaaggaacagttgtctatcaattagattcagtgcctatagaaggttcctattttaccagttccagagtgggaggcaaacgaggaattgtcaaggaacttgctgtcacgttgcaaggaccagaagataatactctactgtttgaatcaaggtttgagagtgggaatctgcaaaaagctgtcagagtagacacctatgagtatgaactcaccttgcgaactgacctctacactaacaaacacactcagtggttttattttcgtgttcagaacaccagaaaagatgctacctatcgcttcaccattgtcaacttgctaaaacccaagagtctttatactgtagggatgaagccactcttgtactcccaattggatgccaacacccgcaatattggctggaggagagaaggaaatgaaatcaagtactacaagaacaacacggatgatgggcagcagcccttctactgtctcacgtggaccattcagtttccatatgaccaggacacttgcttctttgcacacttctacccatatacatacactgatttgcaatgctacctcctgtcagtggcaaacaaccctatccagtctcagttctgcaagctccaaactttatgcaggagcctagcaggaaataccgtttacttgctcaccatcaccaacccatcccagacccctcaagaggcagctgcaaagaaagctgtggtcttgagtgccagagttcaccctggagaaagtaatggctcctgggttatgaaaggctttttggacttcatccttagcaactccccagatgcccagctcctcagagatatttttgtcttcaaggtgcttcccatgttaaatccagatggtgtgattgtggggaattatcggtgttccttggccggaagggatttgaacaggcattataaaaccattctgaaggagtctttcccttgtatttggtacaccaggaacatgatcaaaagacttcttgaagaaagagaggttctgttgtattgtgatttccatggccacagtcgtaagaataatatcttcctgtatggctgtaataacaacaatcgcaaatactggcttcatgaacgagtctttcctttaatgttatgcaaaaatgcaccagataagttctcttttcacagttgtaattttaaggtccaaaaatgcaaagaaggaacaggacgagttgttatgtggcggatgggaatcctaaacagctacaccatggagtctacctttggcgggtccaccctgggtaataaaagagacacccactttaccatcgaagatctgaagtccttaggttatcatgtctgtgacacccttctggacttttgtgatcctgaccaaatgaagttcactcagtgtctagcagagcttaaggagcttttacgacaggaaatccacaagaaattccatgaacttggacaagatgtagatttagaaggaagttggagtgacatctctttgtctgacattgaatccagcaccagtggctctgacagttctctctcagatggtcttcctgttcacctagcaaacatagcagatgagctgactcagaaaaagaagatgtttaagaagaaaaaaaagaagtcacttcagactaggaaacagcgaaatgagcagtatcagaaaaaaaatttgatgcagaagttaaagttaacagaagatacctcagaaaaggcaggatttgcttctactctgcaaaagcagccaacctttttcaaaaactcagagaattccagttttttaccaatgaaaaatgaaaacccaaggttaaatgaggtagtatttttgtttttgactctttgtcacacagattctctaacctctcgaattagcacctctctcccacaatgtgacaaatgtaatagccatttacgttaccctaacctgacagtgccactgggagcaagaaaacattaaaactgggggagacattgacactgctttggattagacatgactgaagtctggaatcaaatattggtgatttgtgattttacaccaagaacataagaacaggctgccttacttaccatccattcatccctctactcacccatctactcaatcagcaaatgttattttaaaataaatcaatgaattttattgggcacctacta

SEQ ID NO: 109569 - DNA, 2973 bp, Homo sapiens
  Payload ID: 1518
  Gene Symbol: AGBL3
  Gene Name: ATP/GTP binding protein-like 3
  Uniprot ID: Q8NEM8
  ENST ID: ENST00000275763
  CDS Start-End: 235-2100
ctgatgacgagagttgggagtgtggctggggctgcggatctccagcagtggcgttacttctagcggctggataccgggttctccgcgagatcgcgagatcccgagatattctccccgcacggaagcgacgactggcctggccagaggactcgcgtgggagcgaggtgccggccccgacaggacggtgagcctacccgtatattacaagaaatctcaagtcaaacactggaaaagatgtcagaagattcagaaaaggaagactattcagacagaacaatcagtgatgaagatgaatcggatgaggatatgttcatgaaatttgtaagtgaagatcttcatcggtgtgcacttttaacagctgactcttttggtgatcccttcttcccccggactacacagatactattagaatatcagctagggagatgggtgccacgtcttcgtgaaccaagggatttatatggtgtctcttcttctggtccattgagcccaacacggtggccataccattgtgaagtcatcgatgaaaaagtccagcatattgattggactccttcttgtcctgagccagtgtatatcccaacgggcttagaaacggaacccctttatccagactccaaggaagctactgtggtttatctagctgaagatgcttacaaagagccctgttttgtgtattcccgagttgggggtaaccgaacacctttgaagcagcctgtggattaccgtgacaatactttgatgtttgaagcaaggtttgagagtggtaatctacagaaggtagtcaaagtggcagaatacgaataccaattgactgtacgccctgacctcttcacaaataaacacacccagtggtactatttccaagtcactaatatgcgagcaggaatagtctacagattcactattgtcaacttcaccaaacctgctagtctttacagtcggggtatgcgcccactgttctattctgaaaaagaggccaaggctcatcacattggctggcagagaataggagaccaaatcaagtattataggaacaacccaggccaagatgggcgccattatttctctcttacatggacatttcaatttccacacaacaaagatacctgctactttgctcattgctatccatacacttacaccaacctgcaagaatacctttctggcatcaataatgatccagtacggtcaaagttttgtaaaatacgtgttttgtgccacacgcttgctaggaacatggtgtatattttaacaatcactacccccttgaagaactctgactcaagaaagcggaaggctgtgattctgactgcaagggtccatccaggggaaaccaacagctcttggatcatgaaaggcttcctagattatattttaggaaactcaagtgatgcacagttgcttcgggacacttttgtcttcaaggtggtacccatgctcaatccagatggtgtgattgtgggaaattatcgctgttccttagctggacgggatttaaaccgtaattatacatctctcctgaaggaatcttttccttctgtatggtatacccggaacatggttcatagactgatggagaaacgagaggttattttatactgtgatcttcatggccatagtaggaaagagaacatcttcatgtatggctgtgatggtagtgacagatctaagacattatacttacagcaacgaatcttcccacttatgctaagcaaaaattgtccagataaattttcattctcagcttgcaagtttaatgtccagaagagcaaagaaggaacaggaagggtggtaatgtggaaaatgggaatcaggaacagctttaccatggaggccaccttctgtggatctactctgggtaacaaacgaggcactcatttcagcacgaaagacctggaatcaatgggatatcatttttgtgattctctcttggattattgtgatcccgaccggaccaagtattatcggtgcctgaaagaattagaagaaatggaaagacatataaccctggaaaaagtctttgaggattcagacacacctgtgatagacattacattggatgtagagtctagagaactgacatttttattgagatgacacaaaagcagtataataaaaggtaatgaataataactggaaaattcaatgccacaggaatatagttggaagaaagaatgtactaattttataagctcccacttatagtagccgaggctctgacagttcagaatccattgactctctgacttaccttctcaagttaacttctcagaaaaaacatttgaaaacaaagaaggaaaggaattctaccatagcaagccaccaaaatgccagaggacaagaggtttatgatagagggcatttgctgcaaagacacacacaatcaaattctgatgtgaaagatacaaggccaaatgaaccagatgattatatggttgattatttcagaagacaattacctaatcaaggtttggatctgcaccacaacttaaaaagcaaaataaaagaatgcatatctttccaaagcaagaagactggcataaattggacagatgatgaaaaaagaagctacaaggataaaggaatagttcaaactcaagaaatattgcagtatttgctccccatcgtgcatagcactaaaaacatgcaaaccactcagataaaacagctattcaatccaagaaccaacttccaaatccaacatcagtaagtcaatacaattttatcactcttatctatttaacacatcttttttaaaaaagcagggcttattaatttattatcctacgaaaaaaaaatctgctcttgaaaatgatgtcagctccatcacatttggcaaagaacaaagacccaaagctgtcagaaaacactggataaatgaaggagtaagttatcaggccttatttaattgattatttgcatgaaactactcattaatttagatctattaataaagtaggcataaataaa

SEQ ID NO: 109570 - DNA, 3533 bp, Homo sapiens
  Payload ID: 1518
  Gene Symbol: AGBL3
  Gene Name: ATP/GTP binding protein-like 3
  Uniprot ID: Q8NEM8
  ENST ID: ENST00000436302
  CDS Start-End: 254-3016
gttgcctgatgacgagagttgggagtgtggctggggctgcggatctccagcagtggcgttacttctagcggctggataccgggttctccgcgagatcgcgagatcccgagatattctccccgcacggaagcgacgactggcctggccagaggactcgcgtgggagcgaggtgccggccccgacaggacggtgagaaattgttttacagcctacccgtatattacaagaaatctcaagtcaaacactggaaaagatgtcagaagattcagaaaaggaagactattcagacagaacaatcagtgatgaagatgaatcggatgaggatatgttcatgaaatttgtaagtgaagatcttcatcggtgtgcacttttaacagctgactcttttggtgatcccttcttcccccggactacacagatactattagaatatcagctagggagatgggtgccacgtcttcgtgaaccaagggatttatatggtgtctcttcttctggtccattgagcccaacacggtggccataccattgtgaagtcatcgatgaaaaagtccagcatattgattggactccttcttgtcctgagccagtgtatatcccaacgggcttagaaacggaacccctttatccagactccaaggaagctactgtggtttatctagctgaagatgcttacaaagagccctgttttgtgtattcccgagttgggggtaaccgaacacctttgaagcagcctgtggattaccgtgacaatactttgatgtttgaagcaaggtttgagagtggtaatctacagaaggtagtcaaagtggcagaatacgaataccaattgactgtacgccctgacctcttcacaaataaacacacccagtggtactatttccaagtcactaatatgcgagcaggaatagtctacagattcactattgtcaacttcaccaaacctgctagtctttacagtcggggtatgcgcccactgttctattctgaaaaagaggccaaggctcatcacattggctggcagagaataggagaccaaatcaagtattataggaacaacccaggccaagatgggcgccattatttctctcttacatggacatttcaatttccacacaacaaagatacctgctactttgctcattgctatccatacacttacaccaacctgcaagaatacctttctggcatcaataatgatccagtacggtcaaagttttgtaaaatacgtgttttgtgccacacgcttgctaggaacatggtgtatattttaacaatcactacccccttgaagaactctgactcaagaaagcggaaggctgtgattctgactgcaagggtccatccaggggaaaccaacagctcttggatcatgaaaggcttcctagattatattttaggaaactcaagtgatgcacagttgcttcgggacacttttgtcttcaaggtggtacccatgctcaatccagatggtgtgattgtgggaaattatcgctgttccttagctggacgggatttaaaccgtaattatacatctctcctgaaggaatcttttccttctgtatggtatacccggaacatggttcatagactgatggagaaacgagaggttattttatactgtgatcttcatggccatagtaggaaagagaacatcttcatgtatggctgtgatggtagtgacagatctaagacattatacttacagcaacgaatcttcccacttatgctaagcaaaaattgtccagataaattttcattctcagcttgcaagtttaatgtccagaagagcaaagaaggaacaggaagggtggtaatgtggaaaatgggaatcaggaacagctttaccatggaggccaccttctgtggatctactctgggtaacaaacgaggcactcatttcagcacgaaagacctggaatcaatgggatatcatttttgtgattctctcttggattattgtgatcccgaccggaccaagtattatcggtgcctgaaagaattagaagaaatggaaagacatataaccctggaaaaagtctttgaggattcagacacacctgtgatagacattacattggatgtagagtctagtagccgaggctctgacagttcagaatccattgactctctgacttaccttctcaagttaacttctcagaaaaaacatttgaaaacaaagaaggaaaggaattctaccatagcaagccaccaaaatgccagaggacaagaggtttatgatagagggcatttgctgcaaagacacacacaatcaaattctgatgtgaaagatacaaggccaaatgaaccagatgattatatggttgattatttcagaagacaattacctaatcaaggtttggatctgcaccacaacttaaaaagcaaaataaaagaatgcatatctttccaaagcaagaagactggcataaattggacagatgatgaaaaaagaagctacaaggataaaggaatagttcaaactcaagaaatattgcagtatttgctccccatcgtgcatagcactaaaaacatgcaaaccactcagataaaacagctattcaatccaagaaccaacttccaaatccaacatcaactaaatccggctacttgcagaaatataaagaaatacagcacatcttggacagcacccagaaatcacccttttgtaatccaaggggatgttatggcaaactcttcagaatgggtccagtctaagccccacaggtcattggaaagtttatcacctctcaaaggccccaagaagaataaacattctcaaatctgggccataaagaatgaagacataaaacctctcagcagcaagtgggagactgcttcttcaagctttggaatggatgcaaatgttctaaaatataagagtcttcaagctgaagaaactaaccagcaaagctctaagcatacagccctccatctaactaaaaataaggatgagcaggccaataagaatgatggacaacccaccttatatctgaagttccaaagggagagttaatctagctttatactgctctgagaactgtgaatgaaggataacatatgcttatgtagtaaaaagaaaaaaaggaaagccctccccttcccctttccctatctctccccttacacatgcatatgcataaactaaaaattttagatatcccatcttctgtagtgggaacatctttcagagatttaaaaagaaatccagagaaaatatggaaaaatattaaagcagatatttatatttagtttttatcagcatggaaaaaaatctctgaagttttgatttcttccaaaactacttacacattcgacaccaaaaaaacttaagaactcaaagtaggaatgacatataatatgtcactgattttaacctccctactagacactttaatcaattagtcaacaaacatcatttcctgattttctgttatatcattagtgtgctaggaaccatttctctctactaggagattaccacataattgtacagataaaacatacctgaataaaatgattacagaataaga

SEQ ID NO: 109571 - DNA, 2495 bp, Homo sapiens
  Payload ID: 1518
  Gene Symbol: AGBL3
  Gene Name: ATP/GTP binding protein-like 3
  ENST ID: ENST00000435976
  CDS Start-End: 235-2349
ctgatgacgagagttgggagtgtggctggggctgcggatctccagcagtggcgttacttctagcggctggataccgggttctccgcgagatcgcgagatcccgagatattctccccgcacggaagcgacgactggcctggccagaggactcgcgtgggagcgaggtgccggccccgacaggacggtgagcctacccgtatattacaagaaatctcaagtcaaacactggaaaagatgtcagaagattcagaaaaggaagactattcagacagaacaatcagtgatgaagatgaatcggatgaggatatgttcatgaaatttgtaagtgaagatcttcatcggtgtgcacttttaacagctgactcttttggtgatcccttcttcccccggactacacagatactattagaatatcagctagggagatgggtgccacgtcttcgtgaaccaagggatttatatggtgtctcttcttctggtccattgagcccaacacggtggccataccattgtgaagtcatcgatgaaaaagtccagcatattgattggactccttcttgtcctgagccagtgtatatcccaacgggcttagaaacggaacccctttatccagactccaaggaagctactgtggtttatctagctgaagatgcttacaaagagccctgttttgtgtattcccgagttgggggtaaccgaacacctttgaagcagcctgtggattaccgtgacaatactttgatgtttgaagcaaggtttgagagtggtaatctacagaaggtagtcaaagtggcagaatacgaataccaattgactgtacgccctgacctcttcacaaataaacacacccagtggtactatttccaagtcactaatatgcgagcaggaatagtctacagattcactattgtcaacttcaccaaacctgctagtctttacagtcggggtatgcgcccactgttctattctgaaaaagaggccaaggctcatcacattggctggcagagaataggagaccaaatcaagtattataggaacaacccaggccaagatgggcgccattatttctctcttacatggacatttcaatttccacacaacaaagatacctgctactttgctcattgctatccatacacttacaccaacctgcaagaatacctttctggcatcaataatgatccagtacggtcaaagttttgtaaaatacgtgttttgtgccacacgcttgctaggaacatggtgtatattttaacaatcactacccccttgaagaactctgactcaagaaagcggaaggctgtgattctgactgcaagggtccatccaggggaaaccaacagctcttggatcatgaaaggcttcctagattatattttaggaaactcaagtgatgcacagttgcttcgggacacttttgtcttcaaggtggtacccatgctcaatccagatggtgtgattgtgggaaattatcgctgttccttagctggacgggatttaaaccgtaattatacatctctcctgaaggaatcttttccttctgtatggtatacccggaacatggttcatagactgatggagaaacgagaggttattttatactgtgatcttcatggccatagtaggaaagagaacatcttcatgtatggctgtgatggtagtgacagatctaagacattatacttacagcaacgaatcttcccacttatgctaagcaaaaattgtccagataaattttcattctcagcttgcaagtttaatgtccagaagagcaaagaaggaacaggaagggtggtaatgtggaaaatgggaatcaggaacagctttaccatggaggccaccttctgtggatctactctgggtaacaaacgaggcactcatttcagcacgaaagacctggaatcaatgggatatcatttttgtgattctctcttggattattgtgatcccgaccggaccaagtattatcggtgcctgaaagaattagaagaaatggaaagacatataaccctggaaaaagtctttgaggattcagacacacctgtgatagacattacattggatgtagagtctagtagccgaggctctgacagttcagaatccattgactctctgacttaccttctcaagttaacttctcagaaaaaacatttgaaaacaaagaaggaaaggaattctaccatagcaagccaccaaaatgccagaggacaagaggtttatgatagagggcatttgctgcaaagacacacacaatcaaattctgatgtgaaagatacaaggccaaatgaaccagatgattatatggttgattatttcagaagacaattacctaatcaaggtttggtttaaatcactgggagcttcgagagttctttggctccttccctttctggaattattgtgtgatataatcaagacatttacctggctctttaaatcagttggtttgccggctacagtgtaggtaaagagtatgtcataatggacaataaaaa

SEQ ID NO: 109572 - DNA, 497 bp, Homo sapiens
  Payload ID: 1518
  Gene Symbol: AGBL3
  Gene Name: ATP/GTP binding protein-like 3
  ENST ID: ENST00000455283
  CDS Start-End: 218-497
gagtgtggctggggctgcggatctccagcagtggcgttacttctagcggctggataccgggttctccgcgagatcgcgagatcccgagatattctccccgcacggaagcgacgactggcctggccagaggactcgcgtgggagcgaggtgccggccccgacaggacggtgagcctacccgtatattacaagaaatctcaagtcaaacactggaaaagatgtcagaagattcagaaaaggaagactattcagacagaacaatcagtgatgaagatgaatcggatgaggatatgttcatgaaatttgtaagtgaagatcttcatcggtgtgcacttttaacagattggactccttcttgtcctgagccagtgtatatcccaacgggcttagaaacggaacccctttatccagactccaaggaagctactgtggtttatctagctgaagatggtgagcacataatgacacatgttgctgtaaaatataatttggtactta

SEQ ID NO: 109573 - DNA, 881 bp, Homo sapiens
  Payload ID: 1519
  Gene Symbol: AGBL4
  Gene Name: ATP/GTP binding protein-like 4
  ENST ID: ENST00000334103
  CDS Start-End: 3-881
cagacaatctccgggaaggggcagagcagaaggtggtattcatcacaggacgagtccacccaggggaaacaccctcatcatttgtgtgccaagggatcattgacttccttgtaagccagcaccctattgcctgtgtcctccgggaatacctggtcttcaagatcgcaccaatgctcaatcctgatggagtctacctgggcaattacaggtgttctctgatgggatttgatctgaatcgtcactggctggatccctctccatgggtccatcctaccctgcatggagtgaaacaactcatcgtccagatgtacaacgacccaaaaacaagcctggagttttatattgacatccatgcccactccaccatgatgaatggcttcatgtatggcaacatctttgaggatgaggaacggttccagaggcaggccatttttcccaagctcctctgccagaatgctgaggacttctcctattccagcacatcctttaaccgggacgctgtgaaagcaggaactggccgtcgcttcctcggtggactcctggaccacacttcctattgctacaccctagaggtctccttctacagctacatcatcagtggcaccacggctgctgtgccctacactgaagaagcctatatgaagctggggcggaatgtggcaagaacctttttggactattatcggctgaaccccgtggttgaaaaggtggcaattcccatgccgagactgcgaaataaagaaatagaagtccagagaaggaaagaaaaatcccctccttacaagcacccactcctgcggggcccagccagcaactaccccaacagcaaaggggacaagaagagctcagtgaaccacaaagacccttcaacccctttttaa

SEQ ID NO: 109574 - DNA, 1454 bp, Homo sapiens
  Payload ID: 1519
  Gene Symbol: AGBL4
  Gene Name: ATP/GTP binding protein-like 4
  ENST ID: ENST00000371836
  CDS Start-End: 105-758
gccgcgtcttcctgaggtagctcctgtcagcccactgatcccaccacccgctccctactgccccgcggtcttcgcgtgagctcggagactgagggacaacaaaaatggcggaggggagccagtcggcgcctgaggcaggcaatgatatgggaaatgatgatgccattggagggaatgtgagcaaatatatagtgcttccaactggctattgtggacagcccaagaaaggacatcttatctttgatgcttgctttgaaagtggtaacctgggccgggtggaccaggtctctgagtttgagtatgatctgttcattaggccggacacctgtaatccacgcttccgagtctggttcaactttactgttgaaaatgtgaaagaatcacagagggtcattttcaacattgttaacttcagtaaaaccaagagtctctatagagatgggatggcccctatggtgaaatctaccagcagaccaaaatggcaaaggctgccacccaaaaatgtttactactaccgctgcccggaccataggaagaactatgtgatgtcctttgccttttgttttgaccgagaagaagatatttaccagtttgcttactgctacccatatacatacactcgcttccaacattaccttgacagcctgcaaaagagaaacatggattacttctttcgggagcagctgggccagagtgtgcaacaacgaaagcttgacctcctgacgataaccagccctgctggaagatggagctggtgaaatcatttgcttctgaaggagaatggtggcctttccaaatttgactatcagatatgaatttgacctaatctcgggaatgtttccggctggaagatggagctggtgaaatcatttgcttctgaaggagaatggtggcctttccaaatttgactatcagatatgaatttgacctaatctcgggaatgtttccggtaagactgcagactctcaggtgcttaagaagtcactgaggctctggacaaacaggaacgtattagctttttgcctactgactacacagcctccaccattcacccaaaatggatctgcatctcccaggtgcatctgcaagcacacaaaaacacacactgggaaggggtatgagctgaggttagtcctaggtgctgcactttctattcctgacatatcaggatgtgtgggagggaggccaaagctgcagcaccaggctgggcttccagtcctgttgctactgtggaagctggctccagacaggtgggggcagcaaagagccagcctgtatggtcagctgggattctagttgaccaaagctgttgggagaactcaagctcatcagtgtggcaagttagacaacttgatctggacacatgcataaatggaacaggggtccagatacccacaggattaatactaataaaccattttgcttaagcagcaaaactcggtttatatattgaa

SEQ ID NO: 109575 - DNA, 1353 bp, Homo sapiens
  Payload ID: 1519
  Gene Symbol: AGBL4
  Gene Name: ATP/GTP binding protein-like 4
  ENST ID: ENST00000371838
  CDS Start-End: 118-1080
aggcaaccgtcgtgccgcgtcttcctgaggtagctcctgtcagcccactgatcccaccacccgctccctactgccccgcggtcttcgcgtgagctcggagactgagggacaacaaaaatggcggaggggagccagtcggcgcctgaggcaggcaatgatatgggaaatgatgatgccattggagggaatgtgagcaaatatatagtgcttccaactggctattgtggacagcccaagaaaggacatcttatctttgatgcttgctttgaaagtggtaacctgggccgggtggaccaggtctctgagtttgagtatgatctgttcattaggccggacacctgtaatccacgcttccgagtctggttcaactttactgttgaaaatgtgaaagaatcacagagggtcattttcaacattgttaacttcagtaaaaccaagagtctctatagagatgggatggcccctatggtgaaatctaccagcagaccaaaatggcaaaggctgccacccaaaaatgtttactactaccgctgcccggaccataggaagaactatgtgatgtcctttgccttttgttttgaccgagaagaagatatttaccagtttgcttactgctacccatatacatacactcgcttccaacattaccttgacagcctgcaaaagagaaacatggattacttctttcgggagcagctgggccagagtgtgcaacaacgaaagcttgacctcctgacgataaccagccctgacaatctccgggaaggggcagagcagaaggtggtattcatcacaggacgagtccacccaggggaaacaccctcatcatttgtgtgccaagggatcattgacttccttgtaagccagcaccctattgcctgtgtcctccgggaatacctggtcttcaagatcgcaccaatgctcaatcctgatggagtctacctgggcaattacaggtgttctctgatgggatttgatctgaatcgtcactggctggatccctctccatgggtccatcctaccctgcatggagtgaaacaactcatcgtccagatgtacaacgacccagtaagtaactgaatgccctccacagctgctgatctatggcttgatctgggaaagggcagcattgtattgggaaagtccactagaagctgcaaattaggaatacatagctaaaaccagggaggcactaggcctgctcttctctgaatccagcagacccaaggaccttctcccaatctcttttcctgcaacctctcacaaatagtggattcagttttggaggtctggagggttaaaggaaatatattggagtgtatccatatttgtcagggatctttggttacaagc

SEQ ID NO: 109576 - DNA, 2947 bp, Homo sapiens
  Payload ID: 1519
  Gene Symbol: AGBL4
  Gene Name: ATP/GTP binding protein-like 4
  Uniprot ID: Q5VU57
  ENST ID: ENST00000371839
  CDS Start-End: 118-1629
aggcaaccgtcgtgccgcgtcttcctgaggtagctcctgtcagcccactgatcccaccacccgctccctactgccccgcggtcttcgcgtgagctcggagactgagggacaacaaaaatggcggaggggagccagtcggcgcctgaggcaggcaatgatatgggaaatgatgatgccattggagggaatgtgagcaaatatatagtgcttccaactggctattgtggacagcccaagaaaggacatcttatctttgatgcttgctttgaaagtggtaacctgggccgggtggaccaggtctctgagtttgagtatgatctgttcattaggccggacacctgtaatccacgcttccgagtctggttcaactttactgttgaaaatgtgaaagaatcacagagggtcattttcaacattgttaacttcagtaaaaccaagagtctctatagagatgggatggcccctatggtgaaatctaccagcagaccaaaatggcaaaggctgccacccaaaaatgtttactactaccgctgcccggaccataggaagaactatgtgatgtcctttgccttttgttttgaccgagaagaagatatttaccagtttgcttactgctacccatatacatacactcgcttccaacattaccttgacagcctgcaaaagagaaacatggattacttctttcgggagcagctgggccagagtgtgcaacaacgaaagcttgacctcctgacgataaccagccctgacaatctccgggaaggggcagagcagaaggtggtattcatcacaggacgagtccacccaggggaaacaccctcatcatttgtgtgccaagggatcattgacttccttgtaagccagcaccctattgcctgtgtcctccgggaatacctggtcttcaagatcgcaccaatgctcaatcctgatggagtctacctgggcaattacaggtgttctctgatgggatttgatctgaatcgtcactggctggatccctctccatgggtccatcctaccctgcatggagtgaaacaactcatcgtccagatgtacaacgacccaaaaacaagcctggagttttatattgacatccatgcccactccaccatgatgaatggcttcatgtatggcaacatctttgaggatgaggaacggttccagaggcaggccatttttcccaagctcctctgccagaatgctgaggacttctcctattccagcacatcctttaaccgggacgctgtgaaagcaggaactggccgtcgcttcctcggtggactcctggaccacacttcctattgctacaccctagaggtctccttctacagctacatcatcagtggcaccacggctgctgtgccctacactgaagaagcctatatgaagctggggcggaatgtggcaagaacctttttggactattatcggctgaaccccgtggttgaaaaggtggcaattcccatgccgagactgcgaaataaagaaatagaagtccagagaaggaaagaaaaatcccctccttacaagcacccactcctgcggggcccagccagcaactaccccaacagcaaaggggacaagaagagctcagtgaaccacaaagacccttcaacccctttttaaagacacggagtcctgggaggtcttatggggacaggagcatgcattttctgctggggaatgaaattaatcactcttctctagcttccaaggatttgtggattaatgcataggctagtgaaagggaagggatacaatgagaaacttcatcactgattttccctttttccaatggaaaatcaattgtaagccttcagctcaaaaagctcaggaacaaaataggagatcggaaccaggtgagcacagatgctattttctacaacatagagatcttccaagatgaggaaaacctacacatcccttttaagagatttgacacatatcaggtcagttctttcaaagccactttacatttttaagttttatagttactgcagatggttaccttttaaataggcttggttgtttacagctttagaaatgcagtgtttgtattttctgatccaaaacaacagcaacaacacatgcaaccaaagggcaaatgcatcctagggaacaatgggacagaatttttgaaatcaacggtggacttaaatatatggtcactgtatctaagctgcatgcttgctgattccctcaaaccccagcatgcagatttagaaaactgttttgagagctgtttcccaatttcctcggtagtttaattaaaattttagctctaaagacaaaaagcactggtcactcattttaaaaggtttattatggttaaggtctccagatcccaggtgacagggattaagcctggcccctgaagatgtaggcattgctaatctgcaatgaggaaagggtgattgccaggcaaggaagatgcaaaagacagaaggatgcaccctgaggcagggaggaatgataaaataaaacagtagtagcaattcccaaggtgtggcaagctaaatattggcatttttgtgaagagtaaagtgcctttgtatgatgaatgggtccaggggggtctgctcccttcctgtctgtggaaacagcaggctgagtcaccatgacagcctgctaattaaaatgacctcccggaaatgaggattagaacacagggagaggaagggaggctccagggaggaaaatcccttagcacagagctccactaaagcattttttgtttgtttgtttgtttgtttgtttgtttgagttggagattattgaagtttgctacaaaaatcaaaaagaaaacttgttctcctttgcatgctagttttcagaaatgatgacaaagagccatatgttgattggctacaaatgtcatgttgtatatacagcttctcccctgggttcgttttgcccagaggaacacaaataaagtgttttgtgc

SEQ ID NO: 109577 - DNA, 3938 bp, Homo sapiens
  Payload ID: 1519
  Gene Symbol: AGBL4
  Gene Name: ATP/GTP binding protein-like 4
  ENST ID: ENST00000416121
  CDS Start-End: 1-899
accgagaagaagatatttaccagtttgcttactgctacccatatacatacactcgcttccaacattaccttgacagcctgcaaaagagaaacatggattacttctttcgggagcagctgggccagagtgtgcaacaacgaaagcttgacctcctgacgataaccagccctgacaatctccgggaaggggcagagcagaaggtggtattcatcacaggacgagtccacccaggggaaacaccctcatcatttgtgtgccaagggatcattgacttccttgtaagccagcaccctattgcctgtgtcctccgggaatacctggtcttcaagatcgcaccaatgctcaatcctgatggagtctacctgggcaattacaggtgttctctgatgggatttgatctgaatcgtcactggctggatccctctccatgggtccatcctaccctgcatggagtgaaacaactcatcgtccagatgtacaacgacccaaaaacaagcctggagttttatattgacatccatgcccactccaccatgatgaatggcttcatgtatggcaacatctttgaggatgaggaacggttccagaggcaggccatttttcccaagctcctctgccagaatgctgaggacttctcctattccagcacatcctttaaccgggacgctgtgaaagcaggaactggccgtcgcttcctcggtggactcctggaccacacttcctattgctacaccctagaggtctccttctacagctacatcatcagtggcaccacggctgctgtgccctacactgaagaagcctgtatccttagtccccacccagccttgggccagccctcatccagccgagagtatccaagtctgacaggtcaggaattaggcccccagctcaggtaagggctgagactctcaggtgaggatggaggtgcttcttcttctggtggcgtctttggattgtccagtttgcctcagcccttagtatgatactcctaccccaattgccatgctccaaatctttcccaggccagccggacccatggcctgcccatatcttactctgcttccatctctctcccctctcttctctcatgatgcagtgagtctcctgccatctaagctatgcaagtccacaggctggatgaccatccccagggttgctgaggaagagcttgatgatcttgactccttctaaccctgaacatacaaaaacatatgttctcttttcatcttttgtctaacctatcctctcccactttctcttccctctactcactatttccccttctacttacttttctcacccttgttccctctccttctatgccctcctcctccctcctcacctgtcctgtgcttctctttccttacttctttttccccctcctcccctcctttctgtcctctctctcatcccatcctccttttctttctctcctctttgcctgtcttctgtcttccttgtctttcccctctcatcctctgtgcatctttctctctgcctttgcatttcctttgacaaattccttttcctcttagtttcttcataaaatttctctgaaaactccaaagccttccatgatgaaattagaagttattttctagtttgcctaattttttaaggattaggtagtaactctagtttcccgagtgttgattttaatatcaaggtcactgcatcagagctgtaacagatcgtggcagattctgctttccttgatcctttgttttcgggttgatctatgtctcctttcctaacacttagttttctcagagaagtggagggaggaggaaggaactttagatgaaatgaactctgtatttctgcaaattccccctccctggaggtagaagtgctcttttagcattttttcaacccttggtgagtgtttatggaattcctctgtgcaggaaaacatcttttctgaacgtggcatgacttagggctagtcccaccagccaactgcaacttagtggctctgtttgtatgtgtgtttgggagggttgggggtatggtgtccaggtaccttgccaggaacatcggaagtagggcaatggccctagaaggaggggctgtcagggggtaggccaggtgttagagcaatgttccacatcctgttggacacagagatattatgattggaactgagagttccctatgtacagtcatcaagactgagggtcatcttgcagtctgctttaatacccacctgactcagcaaggccaagggagtaggctctgctctgaggaagagggtctgtgggttccaaagtcctggccacctgttatgtgccacattgcccctcttcatgccccatacacaccttagatgatgcatatggcctatgccttctccagaatctgctaactcctataacacatgcatatgcttcattccacattgtacttgctttgctctcccataatattatggcaaagggacagagagctgcctggaataagagtttgagcttgtgcactaaaggggattctgcaacccttattcatagtgagatgagggtccctccagaggaggcctgcccttagtttgttgttttttgctgtccaatctgacaggctctcctaccttttcttagcacttctgacatgcttctgtcttagaagaaaatgtgtttcttagtagaaagcccacccttggttcaggcccaaggtttccacccctcaacagccaacactcatttatcaaaagtaaacacagcattagtacataccaggaatcataaaaggcacctagggtaaaatactgaataaaaaggcatgattcctgactcacagaactttcagtctacttggggagacagaaaagggaagagataattacaatgtatgtgataaattctggtggaggaattccagaaggctctgggacattttcatttgacaagtatatattgagtgcctgtcataggtcaggtaaagttctaggcacagggaatgtaacagagaacatactaaagacaagaatgtctttacatgggggaaagagggaactcacacgcagtcctaggagtcagggaagatttcccaggaaaagagacatctaaactgagattttttgtttgtttgtttttgagatggagtctcactctgttacccaggctagagtgtagtggcatgatctcagctcactgcaacttctgcctcctgggttcaagcgattcccctgcctcagcctcctgagtagctgggattacaggtgtgcgccaccatgtccggctaatttttgtatttttagcagagatggggttttaccatgttggtcaggctggtctcaaacttctgacctcgtgatccacctgcttcggcctcccaaagtgctgagattacaggtgtaagccactgagcccggcctaaactgagtttttaatatgaactagtcaaactgggtgagggtgttgttgaagggaggatgtggtagacagagaggggagtacagaaggtatgggcagaagctgtaagtggtcccttagggctgaaggacttcagactcaatgataagtctgaagtggaaagatgtaagaagtttgatcttgaatgtagacaatggaaggacagattcgagggggccagtattgtagacagggacatgcattaggaggctgttataaaaatccaggtgagaaataatccaggccaagaccagagtggtggctgtagaatacttagaatgtggaactgagaagacttggtaattgactatttgggagtggcgacagggaatgggagctcgtgattggaaggggttaaggtgagtagagaggctatgcacaagctgagcaggtcgtgatactgatggacctaccctgccttgttctgtcctctagaggatgagaagaggaaacaaactgcaccagggaagctcaggccgattcaatgcatgcaagggtgatttaacctgggttctgtttgaaatactt

SEQ ID NO: 109578 - DNA, 2382 bp, Homo sapiens
  Payload ID: 1520
  Gene Symbol: AGBL5
  Gene Name: ATP/GTP binding protein-like 5
  Uniprot ID: Q8NDL9
  ENST ID: ENST00000323064
  CDS Start-End: 163-2316
cccggcaccgcggcgctcgggtgtttttgggggcccgggtggagggcccgggtgccggggcccaaggtgcggcctcgctagcgggagagggagcgggatcaccggcccggagagagctctcagggccagagcggggcaggaggatgctttcccagccccaccatggagctgcgctgtgggggattgctgttcagttctcgctttgattcagggaatctagcccacgtggagaaggtggaatctttgtccagtgatggggaaggggtaggaggtggggcgtcagccctgaccagtggcattgcctcttcccctgactatgaattcaacgtgtggacccgaccagactgtgctgaaacggaatttgagaatgggaacaggtcatggttctacttcagcgtccggggaggaatgccaggaaaactcatcaagatcaacattatgaacatgaacaagcagagcaagctgtattcccagggcatggccccctttgtgcgcacactgcccacccggccacgctgggaacgcattcgagaccggcccacctttgagatgacagagacgcagtttgtgttatcctttgttcatcgtttcgtggagggccgtggggccaccaccttcttcgccttctgctaccccttctcctacagtgactgccaggaactgctaaaccagctagaccagcgctttccggagaaccaccctacccatagcagccccctggataccatctattaccatcgggagctcctttgctattctctggatggacttcgtgtagatctgctgacgatcacttcctgccatgggcttcgagaagatcgagagccccgtctagagcagctatttcctgataccagcacccctcgaccattccgtttcgcaggcaagaggatattcttcttaagcagtagagtacacccaggggagactccatctagctttgtcttcaatggctttctggacttcatcctccgacctgatgatccccgggcccaaaccctccgtcgcctcttcgtctttaagctgattcccatgttgaaccccgatggtgtggtccggggacactaccgcacagactcacgtggagtgaatctgaaccgtcagtacctgaagcctgatgccgtcctgcacccggccatctatggggccaaagctgtgcttctctaccaccatgtgcactctcgtctgaactcccagagttcctctgagcaccagcccagttcctgtctccctcctgatgctcctgtttctgacctggagaaagccaacaatctccaaaatgaagctcagtgtgggcactcagctgacaggcataacgctgaagcctggaaacaaacagagccagcagaacagaagctcaacagtgtgtggattatgccacaacagtctgcggggcttgaagagtcagcccctgataccatcccccccaaagagagtggcgttgcttactatgtggacctgcatggacatgcttccaaaaggggctgcttcatgtacggaaacagctttagtgatgagagcacccaggtggaaaacatgctatatccaaagctcatctccttgaattcagcccacttcgacttccagggctgcaatttctcagagaagaatatgtatgcccgagaccgtagagatggccagtctaaagagggaagcggccgtgttgcaatctacaaagcctcagggataatccacagctacacacttgaatgcaactacaacactggacgctcagtaaacagcatccctgctgcctgccatgacaatgggcgtgccagcccccctcccccgccggctttcccctccagatacactgtggaactatttgagcaggtgggacgagctatggccattgcagccctggacatggcggaatgtaatccgtggccccgaattgtactgtcagagcacagcagccttactaatctacgggcctggatgctgaaacatgtacgcaacagccgaggcctaagcagcactctgaatgtgggtgtcaacaagaagaggggccttcgaactccacccaaaagtcacaatgggttgcctgtctcctgctccgaaaacaccttgagtcgggcacgaagttttagcaccggcacaagtgccggtggtagcagcagcagccaacaaaattctccacagatgaagaattcccccagctttccttttcatggcagtcggcctgcagggctgccaggcctgggctctagtacccaaaaggtcacccaccgggtgctgggccccgtcagaggtaagccagtctgggagcccctgcaacatgtgttcggttgtctggggcattgctgggggaagtaagagcttgaagatatactgttggcccaggaccaaggggtgaatcaataaaattagtttgtagcagaa

SEQ ID NO: 109579 - DNA, 3177 bp, Homo sapiens
  Payload ID: 1520
  Gene Symbol: AGBL5
  Gene Name: ATP/GTP binding protein-like 5
  Uniprot ID: Q8NDL9
  ENST ID: ENST00000360131
  CDS Start-End: 160-2820
ggcaccgcggcgctcgggtgtttttgggggcccgggtggagggcccgggtgccggggcccaaggtgcggcctcgctagcgggagagggagcgggatcaccggcccggagagagctctcagggccagagcggggcaggaggatgctttcccagccccaccatggagctgcgctgtgggggattgctgttcagttctcgctttgattcagggaatctagcccacgtggagaaggtggaatctttgtccagtgatggggaaggggtaggaggtggggcgtcagccctgaccagtggcattgcctcttcccctgactatgaattcaacgtgtggacccgaccagactgtgctgaaacggaatttgagaatgggaacaggtcatggttctacttcagcgtccggggaggaatgccaggaaaactcatcaagatcaacattatgaacatgaacaagcagagcaagctgtattcccagggcatggccccctttgtgcgcacactgcccacccggccacgctgggaacgcattcgagaccggcccacctttgagatgacagagacgcagtttgtgttatcctttgttcatcgtttcgtggagggccgtggggccaccaccttcttcgccttctgctaccccttctcctacagtgactgccaggaactgctaaaccagctagaccagcgctttccggagaaccaccctacccatagcagccccctggataccatctattaccatcgggagctcctttgctattctctggatggacttcgtgtagatctgctgacgatcacttcctgccatgggcttcgagaagatcgagagccccgtctagagcagctatttcctgataccagcacccctcgaccattccgtttcgcaggcaagaggatattcttcttaagcagtagagtacacccaggggagactccatctagctttgtcttcaatggctttctggacttcatcctccgacctgatgatccccgggcccaaaccctccgtcgcctcttcgtctttaagctgattcccatgttgaaccccgatggtgtggtccggggacactaccgcacagactcacgtggagtgaatctgaaccgtcagtacctgaagcctgatgccgtcctgcacccggccatctatggggccaaagctgtgcttctctaccaccatgtgcactctcgtctgaactcccagagttcctctgagcaccagcccagttcctgtctccctcctgatgctcctgtttctgacctggagaaagccaacaatctccaaaatgaagctcagtgtgggcactcagctgacaggcataacgctgaagcctggaaacaaacagagccagcagaacagaagctcaacagtgtgtggattatgccacaacagtctgcggggcttgaagagtcagcccctgataccatcccccccaaagagagtggcgttgcttactatgtggacctgcatggacatgcttccaaaaggggctgcttcatgtacggaaacagctttagtgatgagagcacccaggtggaaaacatgctatatccaaagctcatctccttgaattcagcccacttcgacttccagggctgcaatttctcagagaagaatatgtatgcccgagaccgtagagatggccagtctaaagagggaagcggccgtgttgcaatctacaaagcctcagggataatccacagctacacacttgaatgcaactacaacactggacgctcagtaaacagcatccctgctgcctgccatgacaatgggcgtgccagcccccctcccccgccggctttcccctccagatacactgtggaactatttgagcaggtgggacgagctatggccattgcagccctggacatggcggaatgtaatccgtggccccgaattgtactgtcagagcacagcagccttactaatctacgggcctggatgctgaaacatgtacgcaacagccgaggcctaagcagcactctgaatgtgggtgtcaacaagaagaggggccttcgaactccacccaaaagtcacaatgggttgcctgtctcctgctccgaaaacaccttgagtcgggcacgaagttttagcaccggcacaagtgccggtggtagcagcagcagccaacaaaattctccacagatgaagaattcccccagctttccttttcatggcagtcggcctgcagggctgccaggcctgggctctagtacccaaaaggtcacccaccgggtgctgggccccgtcagagagccccgaagccaggacaggagacggcagcagcagcccctgaaccatcgtcctgcaggcagcctcgctccatccccagctcctactagttctggcccagcctcctcacacaagctgggctcctgtctactgcctgattcattcaacataccagggagcagttgctcactcttgtcctctggagacaaaccagaggctgtcatggtaatcgggaaaggtctgctagggactggagctcggatgccctgcatcaagactcgattgcaggctaggcccaggttgggccggggctcaccgccgactcgcagagggatgaaaggctcttcaggccccacatcccctaccccccggaccagggagagcagtgagctggagctgggatcctgctctgctacaccagggctgcctcaggccaggcccccacggccccgctctgcccctgccttttctcctatatcctgtagtctatctgactccccatcctggaattgttacagcaggggtcccttgggccaacctgaggtttgttttgtccctaaatctcccccactgactgtttctccccgggtctgataatgcctttatgttcaagcccaggatatagccccaagatggggtaacagtgggaaatatgctagttcccctccaggccgctgattccatgtgacagccgttaagtccttggaatgccagccacgctgtccaaggcattacagagtatcaccttgagacagaacaaaacagggacctgccaccccttccctccctccgcagcacaagattttgggaccacaaaaaaaagtctatatttttatattggggggagggagtagaaaagcaagcccctatactgggccctattcagtggcagcttcttgttccataggattaaggaagactctgaggaaataaaagttgtttggaaaaatc

SEQ ID NO: 109580 - DNA, 673 bp, Homo sapiens
  Payload ID: 1520
  Gene Symbol: AGBL5
  Gene Name: ATP/GTP binding protein-like 5
  ENST ID: ENST00000453161
  CDS Start-End: 202-673
tttctgcgttcaatgtacatgtgttgagtcccagtttctgccgctttatctttcccgcctcccggcaggcaggccgttaaccgtcttccggaagacgctgctagaaccctccggccgctcctgcccgccatcgtccccgaacgacactcgctcagctctcagggccagagcggggcaggaggatgctttcccagccccaccatggagctgcgctgtgggggattgctgttcagttctcgctttgattcagggaatctagcccacgtggagaaggtggaatctttgtccagtgatggggaaggggtaggaggtggggcgtcagccctgaccagtggcattgcctcttcccctgactatgaattcaacgtgtggacccgaccagactgtgctgaaacggaatttgagaatgggaacaggtcatggttctacttcagcgtccggggaggaatgccaggaaaactcatcaagatcaacattatgaacatgaacaagcagagcaagctgtattcccagggcatggccccctttgtgcgcacactgcccacccggccacgctgggaacgcattcgagaccggcccacctttgagatgacagagacgcagtttgtgttatcctttgttcatcgtttcgtggagggccgtggggccaccaccttcttcgccttctgctacc

SEQ ID NO: 109581 - DNA, 559 bp, Homo sapiens
  Payload ID: 1520
  Gene Symbol: AGBL5
  Gene Name: ATP/GTP binding protein-like 5
  ENST ID: ENST00000421915
  CDS Start-End: 364-559
aaagtgaggtcatgaatacaacagcatctcgtgttcgctacgtttcctctggaattagcccacaagcagaccccttgctctcctagtggcaattaaccatgaccatcttcctggagaagagaaactacctggcaaagggccaaagtcttaggactgctgggcaggagaactggcctgtgttcaagttgagtcccagtttctgccgctttatctttcccgcctcccggcaggcaggccgttaaccgtcttccggaagacgctgctagaaccctccggccgctcctgcccgccatcgtccccgaacgacactcgctcagctctcagggccagagcggggcaggaggatgctttcccagccccaccatggagctgcgctgtgggggattgctgttcagttctcgctttgattcagggaatctagcccacgtggagaaggtggaatctttgtccagtgatggggaaggggtaggaggtggggcgtcagccctgaccagtggcattgcctcttcccctgactatgaattcaacgtgtggacccgaccagactgtgctgaaacgg

SEQ ID NO: 109582 - DNA, 489 bp, Homo sapiens
  Payload ID: 1520
  Gene Symbol: AGBL5
  Gene Name: ATP/GTP binding protein-like 5
  ENST ID: ENST00000437006
  CDS Start-End: 414-489
ccccgctcccgacctggcttacgcggtcccgaccccgcccagctccgtggcctcacctctgactcctaggccctccctgcctaatcccctgccgcgggagcccgtctcgaccccttccatgcctcccagtcccaccctgcccagggcaagcccgctcggtgtgacggttccccgcgagtcgagggtggagaagccagcctccttcccccgagtgggactctagcagcccacctcttttaggggtgctgagaacacccattactcatccacagctactagggtagctttctcagggtgcagtgcttacggggcggagggggatggaaacagacccatgccctggctggaagggagctccagtcgctagctctcagggccagagcggggcaggaggatgctttcccagccccaccatggagctgcgctgtgggggattgctgttcagttctcgctttgattcagggaatctagcccacgtggagaaggtgg

SEQ ID NO: 109583 - DNA, 481 bp, Homo sapiens
  Payload ID: 1520
  Gene Symbol: AGBL5
  Gene Name: ATP/GTP binding protein-like 5
  ENST ID: ENST00000441931
  CDS Start-End: 1-414
agcagcagcagccaacaaaattctccacagatgaagaattcccccagctttccttttcatggcagtcggcctgcagggctgccaggcctgggctctagtacccaaaaggtcacccaccgggtgctgggccccgtcagagagccccgaagccaggacaggagacggcagcagcagcccctgaaccatcgtcctgcaggcagcctcgctccatccccagctcctactagttctggcccagcctcctcacacaagctgggctcctgtctactgcctgattcattcaacataccaggtctgtacccactgccactgaaatctgggtttgccagcctcctccatggccaggccaggttctttaagcctagttgggagaccaggggcatcacttatcctcttggtatcctaaacctctaacactggtgcctttgtataggaagctggaatttattaatgtgtctgtgtaataaaacaatagttaaca

SEQ ID NO: 109584 - DNA, 581 bp, Homo sapiens
  Payload ID: 1520
  Gene Symbol: AGBL5
  Gene Name: ATP/GTP binding protein-like 5
  ENST ID: ENST00000451003
  CDS Start-End: 384-581
agagcggggtcccggcaccgcggcgctcgggtgtttttgggggcccgggtggagggcccgggtgccggggcccaaggtgcggcctcgctagcgggagagggagcgggatcaccggcccggagagaggcataaggtaggaacaaaaaaggaagaaccagcccttccagggctcaggggagcaacaccagaatgtccgctcagtacttgtgaggacagaggctggagagaggactacccatttacactcagaacctcgattcctctctctgctctgtgctggagagtgcagagccagagatccagaacggcccatctctaaaggtggccatgtatggtgctctcagggccagagcggggcaggaggatgctttcccagccccaccatggagctgcgctgtgggggattgctgttcagttctcgctttgattcagggaatctagcccacgtggagaaggtggaatctttgtccagtgatggggaaggggtaggaggtggggcgtcagccctgaccagtggcattgcctcttcccctgactatgaattcaacgtgtggacccgaccagactgtgctgaaacggaa

SEQ ID NO: 109585 - DNA, 3261 bp, Homo sapiens
  Payload ID: 1520
  Gene Symbol: AGBL5
  Gene Name: ATP/GTP binding protein-like 5
  Uniprot ID: Q8NDL9
  ENST ID: ENST00000487078
  CDS Start-End: 195-2645
gagagacttcttgtttcctggcagagcggggtcccggcaccgcggcgctcgggtgtttttgggggcccgggtggagggcccgggtgccggggcccaaggtgcggcctcgctagcgggagagggagcgggatcaccggcccggagagagctctcagggccagagcggggcaggaggatgctttcccagccccaccatggagctgcgctgtgggggattgctgttcagttctcgctttgattcagggaatctagcccacgtggagaaggtggaatctttgtccagtgatggggaaggggtaggaggtggggcgtcagccctgaccagtggcattgcctcttcccctgactatgaattcaacgtgtggacccgaccagactgtgctgaaacggaatttgagaatgggaacaggtcatggttctacttcagcgtccggggaggaatgccaggaaaactcatcaagatcaacattatgaacatgaacaagcagagcaagctgtattcccagggcatggccccctttgtgcgcacactgcccacccggccacgctgggaacgcattcgagaccggcccacctttgagatgacagagacgcagtttgtgttatcctttgttcatcgtttcgtggagggccgtggggccaccaccttcttcgccttctgctaccccttctcctacagtgactgccaggaactgctaaaccagctagaccagcgctttccggagaaccaccctacccatagcagccccctggataccatctattaccatcgggagctcctttgctattctctggatggacttcgtgtagatctgctgacgatcacttcctgccatgggcttcgagaagatcgagagccccgtctagagcagctatttcctgataccagcacccctcgaccattccgtttcgcaggcaagaggatattcttcttaagcagtagagtacacccaggggagactccatctagctttgtcttcaatggctttctggacttcatcctccgacctgatgatccccgggcccaaaccctccgtcgcctcttcgtctttaagctgattcccatgttgaaccccgatggtgtggtccggggacactaccgcacagactcacgtggagtgaatctgaaccgtcagtacctgaagcctgatgccgtcctgcacccggccatctatggggccaaagctgtgcttctctaccaccatgtgcactctcgtctgaactcccagagttcctctgagcaccagcccagttcctgtctccctcctgatgctcctgtttctgacctggagaaagccaacaatctccaaaatgaagctcagtgtgggcactcagctgacaggcataacgctgaagcctggaaacaaacagagccagcagaacagaagctcaacagtgtgtggattatgccacaacagtctgcggggcttgaagagtcagcccctgataccatcccccccaaagagagtggcgttgcttactatgtggacctgcatggacatgcttccaaaaggggctgcttcatgtacggaaacagctttagtgatgagagcacccaggtggaaaacatgctatatccaaagctcatctccttgaattcagcccacttcgacttccagggctgcaatttctcagagaagaatatgtatgcccgagaccgtagagatggccagtctaaagagggaagcggccgtgttgcaatctacaaagcctcagggataatccacagctacacacttgaatgcaactacaacactggacgctcagtaaacagcatccctgctgcctgccatgacaatgggcgtgccagcccccctcccccgccggctttcccctccagatacactgtggaactatttgagcaggtgggacgagctatggccattgcagccctggacatggcggaatgtaatccgtggccccgaattgtactgtcagagcacagcagccttactaatctacgggcctggatgctgaaacatgtacgcaacagccgaggcctaagcagcactctgaatgtgggtgtcaacaagaagaggggccttcgaactccacccaaaagtcacaatgggttgcctgtctcctgctccgaaaacaccttgagtcgggcacgaagttttagcaccggcacaagtgccggtggtagcagcagcagccaacaaaattctccacagatgaagaattcccccagctttccttttcatggcagtcggcctgcagggctgccaggcctgggctctagtacccaaaaggtcacccaccgggtgctgggccccgtcagagagccccgaagccaggacaggagacggcagcagcagcccctgaaccatcgtcctgcaggcagcctcgctccatccccagctcctactagttctggcccagcctcctcacacaagctgggctcctgtctactgcctgattcattcaacataccagggagcagttgctcactcttgtcctctggagacaaaccagaggctgtcatggtaatcgggaaaggtctgctagggactggagctcggatgccctgcatcaagactcgattgcagacctgtccgaggagagtttccgccaggaggggtcccggattccccaggctaggcccaggttgggccggggctcaccgccgactcgcagagggatgaaaggctcttcaggccccacatcccctaccccccggaccagggagagcagtgagctggagctgggatcctgctctgctacaccagggctgcctcaggccaggcccccacggccccgctctgcccctgccttttctcctatatcctgtagtctatctgactccccatcctggaattgttacagcaggggtcccttgggccaacctgaggtttgttttgtccctaaatctcccccactgactgtttctccccgggtctgataatgcctttatgttcaagcccaggatatagccccaagatggggtaacagtgggaaatatgctagttcccctccaggccgctgattccatgtgacagccgttaagtccttggaatgccagccacgctgtccaaggcattacagagtatcaccttgagacagaacaaaacagggacctgccaccccttccctccctccgcagcacaagattttgggaccacaaaaaaaagtctatatttttatattggggggagggagtagaaaagcaagcccctatactgggccctattcagtggcagcttcttgttccataggattaaggaagactctgaggaaataaaagttgtttggaaaaatcca

SEQ ID NO: 109586 - DNA, 2491 bp, Homo sapiens
  Payload ID: 1521
  Gene Symbol: ATP5J2-PTCD1
  Gene Name: ATP5J2-PTCD1 readthrough
  ENST ID: ENST00000413834
  CDS Start-End: 24-2273
acagcggacaccaggactccaaaatggcgtcagttgtaccagtgaaggacaagaaacttctggaggtcaaactgggggagctgccaagctggatcttgatgcgggacttcagtcctagtggcattttcggagcgtttcaaagaggccctggagggacaggaaagccagaaatggacttcgtgagactcgctcgactgttcgccagggcccgccccatgggactgttcatcctgcaacacctggacccctgtagagccaggtgggcaggaggcagggaggggctgatgcggccaatgtgggcgcccttcagcagctcctcctctcagctgcccctcggccaggagcgtcaggaaaacacgggcagcctgggctctgacccgagccactccaactccacggccacgcaggaagaagacgaggaggaggaggagagttttgggaccctctctgacaaatactcctcccggagactattccgcaaatccgcagcccagttccataacctgcggtttggggaacggagagatgagcaaatggaaccggagcccaaattatggcgaggccggagaaacaccccgtactggtacttcttgcagtgcaaacacctgatcaaggaagggaagctggttgaagccctggacctgtttgagaggcagatgctgaaggaggagcgattgcagcccatggagagcaactacacggtgctgattgggggctgcgggcgggttggctacctgaagaaggccttcaacctctacaaccagatgaaaaagcgggacctggagccctcggacgccacctacacggccctgttcaacgtctgtgccgagtccccctggaaggactcagctctacagagcgccctgaagctccggcagcagctgcaggccaaaaacttcgagctcaacttgaaaacataccacgcgctgctgaagatggctgccaagtgcgcagaccttaggatgtgcctcgatgtgttcaaggaaatcatccacaaagggcacgtggtcacagaggagaccttcagtttcctgctcatgggctgcatccaagacaagaagacaggcttccggtacgccctccaggtgtggcggctgatgctgagtctagggctacagccgagccgggacagctacaacctgctgttggtggcagctcgggactgtggcctaggggacccccaggtggcctcagagctgcttctgaagcccagggaggaggcgactgtgcttcagcccccagtgagcaggcagcggccaaggaggacagcccaggccaaggcaggcaacctcatgtcagccatgctgcatgtggaggccctggagaggcagctgtttctggaaccttctcaggcacttgggcctccagagcctccggaagccagagtgcccggcaaggcccaaccagaggtggatactaaggcagagcccagccacacagcagccctcaccgcagtggccctgaagccacctcccgtggagctggaagtcaacctcctgacccccggggccgttccccctacagtggtctcctttggaacggtgaccaccccagctgaccggctggccttgatagggggcctggagggcttcctgagcaagatggcagagcacaggcagcagcccgacatcaggaccctcacgctactggccgaggtggtggagtccgggagtcctgcagagtccttgctgctggccctcctggatgagcaccaggtagaggccgacctgacattctttaacacgctggtgagaaagaagagcaagctgggagacctggagggggccaaggcgctgttgccggtcctggcaaagaggggcctcgtccccaacctgcagacattctgcaacctggccatcgggtgccacaggccgaaggacggtctacagcttctcacagacatgaagaagtcccaggtgacccccaacactcacatctacagtgccctcatcaacgcggccatcaggaagctgaactacacctatctcatcagcatcttgaaggacatgaagcagaacagggtcccggtgaacgaagtggtcatccgccagctggagtttgcagcccagtaccctcccacctttgaccggtaccaagggaagaacacctacctggagaagattgacggcttccgagcctattacaagcagtggctgacagtgatgcccgcagaggaaaccccgcacccctggcagaagttccggaccaagccccagggggaccaggacaccggcaaggaggctgatgacggatgtgcccttgggggcaggtgatgggagcacagctggaacaatgtgctcggcccccagtgctctgtgggagccccaggacaagtgagctggtgtcacctcctgcctgggggaagagccaggccctgaggaacagccgcagcgtgtcacaggtgttggtgaggacacacactaggcccaaggtgcctgtgctcccagcaggtccaagtgcagctccagccacctttgcgtgtcaccttcac

SEQ ID NO: 109587 - DNA, 331 bp, Homo sapiens
  Payload ID: 1521
  Gene Symbol: ATP5J2-PTCD1
  Gene Name: ATP5J2-PTCD1 readthrough
  ENST ID: ENST00000451138
  CDS Start-End: 22-186
agcggacaccaggactccaaaatggcgtcagttgtaccagtgaaggacaagaaacttctggaggtcaaactgggggagctgccaagctggatcttgatgcgggacttcagtcctagtggcattttcggagcgtttcaaagaggatatggacaagcagcgagtgtggagggtgcctaccgactctgaagccctggctggagcaacacccatggctaggtgtgtcccgggcctcaggaacaggccctggagggacaggaaagccagaaatggacttcgtgagactcgctcgactgttcgccagggcccgccccatgggactgttcatcctgca

SEQ ID NO: 109588 - DNA, 1692 bp, Homo sapiens
  Payload ID: 1522
  Gene Symbol: ATP5SL
  Gene Name: ATP5S-like
  Uniprot ID: Q9NW81
  ENST ID: ENST00000221943
  CDS Start-End: 7-780
agcaagatggcggctccctgggcgtccctgcgcctggtcgcccccatgtggaatgggcgtatcaggggcatccatcgcctgggtgcggcagtggccccagagggcaatcagaagaagaaaaggacaatactccagttcctgaccaactatttctacgatgtggaggctctgagggattacttgctccaaagggagatgtacaaggtgcatgagaaaaatcgatcttacacctggctggagaagcaacatggtccatacggcgcaggtgcctttttcatcctgaagcagggaggcgcagtcaagtttcgagacaaggagtggatcaggccagataagtatggccatttctctcaggagttctggaatttctgtgaagtgcctgtcgaagctgtggatgccggtgactgtgacatcaactacgagggcctggataacctcctccgcctgaaggagctccagtccttgtcgctgcagcgctgctgccacgtggacgactggtgtctcagccgcctctacccactggccgactcgttgcaggagctctcgctggccggttgcccccgcatctccgaacggggcctcgcctgcctccaccacctccagaacctccgcaggctggacatctcggacctccctgccgtgtccaaccctggcctcactcagatattggtggaggagatgctgcccaattgcgaggttgtgggagtcgactgggctgagggcctgaagtcagggccggaggagcagcctcgggacacagccagccctgtccctgcctagcctttagccctgtccccactcacgtggcttctcagcgggctgcatggaatgtctggtagctcaccacacttctggcttccatttgtcttcactcaacgtcagggtgggggagtggtgctggccaatcacaggagagagcgtgagttcccagtatttattcctggctgcccttggctaaaggtcacagctcctgtcaccctgtcaggcagccctttccatgcccctgttcaggcctggggaggtaaaggctcaggctgttagtagccgcagagagccacactcaccttgtcaggagactcttctcaaactgtccttatgtgagtgcactgccatttcttgcagggaccctgactgacacaggggctactactgacactttacagggatggttctcccccgtgcagggccgctgtgcccactgcaggacatgcagcatccttcgccccactccactcactaaaggccagcgcaccccaggccccatagtattgctggttatggatttattgactttatgttccaaattcagctttttcagttggctgttttttgaaaggggataagctttgtcagtagagggcaccaaacaggcattataggaggaaaggcgcctccttcgtggttcttgttggttgtgcttctgcctctggacgccgcagtgcatgtggcttccccagcacccagctcctgaagcaccaggcggtcagcagctgcccttggcaccctccagccctcagaagttgcgtaggagacacagcgcctccactgaggcacctctctgggaataacgttccccagcaccccaaatggatttccagtcaattcagaagcattttaccagtgaagccctcattattccagttcactgttaaagccagtaattctctatattaaactttccctgttcaagtt

SEQ ID NO: 109589 - DNA, 1134 bp, Homo sapiens
  Payload ID: 1522
  Gene Symbol: ATP5SL
  Gene Name: ATP5S-like
  Uniprot ID: Q9NW81
  ENST ID: ENST00000301183
  CDS Start-End: 31-606
ataagagagcttggaagggattgttcgaggatgtgggatttggtcttagaagaccgaaggatgaattccctgcgcctggtcgcccccatgtggaatgggcgtatcaggggcatccatcgcctgggtgcggcagtggccccagagggcaatcagaagaagaaaaggacaatactccagttcctgaccaactatttctacgatgtggaggctctgagggattacttgctccaaagggagatgtacaaggtgcatgagaaaaatcgatcttacacctggctggagaagcaacatggtccatacggcgcaggtgcctttttcatcctgaagcagggaggcgcagtcaagtttcgagacaaggagtggatcaggccagataagtatggccatttctctcaggagttctggaatttctgtgaagtgcctgtcgaagctgtggatgccggtgactgtgacatcaactacgagggcctggataacctccgaacctccgcaggctggacatctcggacctccctgccgtgtccaaccctggcctcactcagatattggtggaggagatgctgcccaattgcgaggttgtgggagtcgactgggctgagggcctgaagtcagggccggaggagcagcctcgggacacagccagccctgtccctgcctagcctttagccctgtccccactcacgtggcttctcagcgggctgcatggaatgtctggtagctcaccacacttctggcttccatttgtcttcactcaacgtcagggtgggggagtggtgctggccaatcacaggagagagcgtgagttcccagtatttattcctggctgcccttggctaaaggtcacagctcctgtcaccctgtcaggcagccctttccatgcccctgttcaggcctggggaggtaaaggctcaggctgttagtagccgcagagagccacactcaccttgtcaggagactcttctcaaactgtccttatgtgagtgcactgccatttcttgcagggaccctgactgacacaggggctactactgacactttacagggatggttctcccccgtgcagggccgctgtgcccactgcaggacatgcagcatccttcgccccactccactcactaaaggccagcgcacccc

SEQ ID NO: 109590 - DNA, 1454 bp, Homo sapiens
  Payload ID: 1522
  Gene Symbol: ATP5SL
  Gene Name: ATP5S-like
  Uniprot ID: Q9NW81
  ENST ID: ENST00000438807
  CDS Start-End: 12-488
accttagcaagatggcggctccctgggcgtccctgcgcctggtcgcccccatgtggaatgggcgtatcaggggcatccatcgcctgggtgcggcagtggccccagagggcaatcagaagaagaaaaggacaatactccagttcctgaccaactatttctacgatgtggaggctctgagggattacttgctccaaagggagatgtacaaggtgcatgagaaaaatcggtttcgagacaaggagtggatcaggccagataagtatggccatttctctcaggagttctggaatttctgtgaagtgcctgtcgaagctgtggatgccggtgactgtgacatcaactacgagggcctggataacctccgaacctccgcaggctggacatctcggacctccctgccgtgtccaaccctggcctcactcagatattggtggaggagatgctgcccaattgcgaggttgtgggagtcgactgggctgagggcctgaagtcagggccggaggagcagcctcgggacacagccagccctgtccctgcctagcctttagccctgtccccactcacgtggcttctcagcgggctgcatggaatgtctggtagctcaccacacttctggcttccatttgtcttcactcaacgtcagggtgggggagtggtgctggccaatcacaggagagagcgtgagttcccagtatttattcctggctgcccttggctaaaggtcacagctcctgtcaccctgtcaggcagccctttccatgcccctgttcaggcctggggaggtaaaggctcaggctgttagtagccgcagagagccacactcaccttgtcaggagactcttctcaaactgtccttatgtgagtgcactgccatttcttgcagggaccctgactgacacaggggctactactgacactttacagggatggttctcccccgtgcagggccgctgtgcccactgcaggacatgcagcatccttcgccccactccactcactaaaggccagcgcaccccaggccccatagtattgctggttatggatttattgactttatgttccaaattcagctttttcagttggctgttttttgaaaggggataagctttgtcagtagagggcaccaaacaggcattataggaggaaaggcgcctccttcgtggttcttgttggttgtgcttctgcctctggacgccgcagtgcatgtggcttccccagcacccagctcctgaagcaccaggcggtcagcagctgcccttggcaccctccagccctcagaagttgcgtaggagacacagcgcctccactgaggcacctctctgggaataacgttccccagcaccccaaatggatttccagtcaattcagaagcattttaccagtgaagccctcattattccagttcactgttaaagccagtaattctctatattaaactttccctgttcaagtta

SEQ ID NO: 109591 - DNA, 1065 bp, Homo sapiens
  Payload ID: 1522
  Gene Symbol: ATP5SL
  Gene Name: ATP5S-like
  Uniprot ID: Q9NW81
  ENST ID: ENST00000417807
  CDS Start-End: 31-822
ataagagagcttggaagggattgttcgaggatgtgggatttggtcttagaagaccgaaggatgaattccctgcgcctggtcgcccccatgtggaatgggcgtatcaggggcatccatcgcctgggtgcggcagtggccccagagggcaatcagaagaagaaaaggacaatactccagttcctgaccaactatttctacgatgtggaggctctgagggattacttgctccaaagggagatgtacaaggtgcatgagaaaaatcgatcttacacctggctggagaagcaacatggtccatacggcgcaggtgcctttttcatcctgaagcagggaggcgcagtcaagtttcgagacaaggagtggatcaggccagataagtatggccatttctctcaggagttctggaatttctgtgaagtgcctgtcgaagctgtggatgccggtgactgtgacatcaactacgagggcctggataacctcctccgcctgaaggagctccagtccttgtcgctgcagcgctgctgccacgtggacgactggtgtctcagccgcctctacccactggccgactcgttgcaggagctctcgctggccggttgcccccgcatctccgaacggggcctcgcctgcctccaccacctccagaacctccgcaggctggacatctcggacctccctgccgtgtccaaccctggcctcactcagatattggtggaggagatgctgcccaattgcgaggttgtgggagtcgactgggctgagggcctgaagtcagggccggaggagcagcctcgggacacagccagccctgtccctgcctagcctttagccctgtccccactcacgtggcttctcagcgggctgcatggaatgtctggtagctcaccacacttctggcttccatttgtcttcactcaacgtcagggtgggggagtggtgctggccaatcacaggagagagcgtgagttcccagtatttattcctggctgcccttggctaaaggtcacagctcctgtcaccctgtcaggcagccctttccatgcccctgttcaggcctggggaggt

SEQ ID NO: 109592 - DNA, 541 bp, Homo sapiens
  Payload ID: 1522
  Gene Symbol: ATP5SL
  Gene Name: ATP5S-like
  ENST ID: ENST00000589102
  CDS Start-End: 12-541
accttagcaagatggcggctccctgggcgtccctgcgcctggtcgcccccatgtggaatgggcgtatcaggggcatccatcgcctgggtgcggcagtggccccagagggcaatcagaagaagaaaaggacaatactccagttcctgaccaactatttctacgatgtggaggctctgagggattacttgctccaaagggagatgtacaagatcttacacctggctggagaagcaacatggtccatacggcgcaggtttcgagacaaggagtggatcaggccagataagtatggccatttctctcaggagttctggaatttctgtgaagtgcctgtcgaagctgtggatgccggtgactgtgacatcaactacgagggcctggataacctcctccgcctgaaggagctccagtccttgtcgctgcagcgctgctgccacgtggacgactggtgtctcagccgcctctacccactggccgactcgttgcaggagctctcgctggccggttgcccccgcatctccgaacggggcctcgcctgcct

SEQ ID NO: 109593 - DNA, 979 bp, Homo sapiens
  Payload ID: 1522
  Gene Symbol: ATP5SL
  Gene Name: ATP5S-like
  Uniprot ID: Q9NW81
  ENST ID: ENST00000589970
  CDS Start-End: 10-567
cttagcaagatggcggctccctgggcgtccctgcgcctggtcgcccccatgtggaatgggcgtatcaggggcatccatcgcctgggtgcggcagtggccccagagggcaatcagaagaagaaaaggacaatactccagttcctgaccaactatttctacgatgtggaggctctgagggattacttgctccaaagggagatgtacaaggtgcatgagaaaaatcgatcttacacctggctggagaagcaacatggtccatacggcgcaggtgcctttttcatcctgaagcagggaggcgcagtcaagtttcgagacaaggagtggatcaggccagataagtatggccatttctctcaggagttctggaatttctgtgaagtgcctgtcgaagctgtggatgccggtgactgtgacatcaactacgagggcctggataacctccgaacctccgcaggctggacatctcggacctccctgccgtgtccaaccctggcctcactcagatattggtggaggagatgctgcccaattgcgaggttgtgggagtcgactgggctgagggcctgaagtcagggccggaggagcagcctcgggacacagccagccctgtccctgcctagcctttagccctgtccccactcacgtggcttctcagcgggctgcatggaatgtctggtagctcaccacacttctggcttccatttgtcttcactcaacgtcagggtgggggagtggtgctggccaatcacaggagagagcgtgagttcccagtatttattcctggctgcccttggctaaaggtcacagctcctgtcaccctgtcaggcagccctttccatgcccctgttcaggcctggggaggtaaaggctcaggctgttagtagccgcagagagccacactcaccttgtcaggagactcttctcaaactgtccttatgtgagtgcactgccatttcttgcagggaccctgactgacaca

SEQ ID NO: 109594 - DNA, 1622 bp, Homo sapiens
  Payload ID: 1522
  Gene Symbol: ATP5SL
  Gene Name: ATP5S-like
  Uniprot ID: Q9NW81
  ENST ID: ENST00000592922
  CDS Start-End: 38-730
taagaccggccccttccggttacgaaaccttagcaagatggcggctccctgggcgtccctgcgcctggtcgcccccatgtggaatgggcgtatcaggggcatccatcgcctgggtgcggcagtggccccagagggcaatcagaagaagaaaaggacaatactccagttcctgaccaactatttctacgatgtggaggctctgagggattacttgctccaaagggagatgtacaaggtgcatgagaaaaatcggtttcgagacaaggagtggatcaggccagataagtatggccatttctctcaggagttctggaatttctgtgaagtgcctgtcgaagctgtggatgccggtgactgtgacatcaactacgagggcctggataacctcctccgcctgaaggagctccagtccttgtcgctgcagcgctgctgccacgtggacgactggtgtctcagccgcctctacccactggccgactcgttgcaggagctctcgctggccggttgcccccgcatctccgaacggggcctcgcctgcctccaccacctccagaacctccgcaggctggacatctcggacctccctgccgtgtccaaccctggcctcactcagatattggtggaggagatgctgcccaattgcgaggttgtgggagtcgactgggctgagggcctgaagtcagggccggaggagcagcctcgggacacagccagccctgtccctgcctagcctttagccctgtccccactcacgtggcttctcagcgggctgcatggaatgtctggtagctcaccacacttctggcttccatttgtcttcactcaacgtcagggtgggggagtggtgctggccaatcacaggagagagcgtgagttcccagtatttattcctggctgcccttggctaaaggtcacagctcctgtcaccctgtcaggcagccctttccatgcccctgttcaggcctggggaggtaaaggctcaggctgttagtagccgcagagagccacactcaccttgtcaggagactcttctcaaactgtccttatgtgagtgcactgccatttcttgcagggaccctgactgacacaggggctactactgacactttacagggatggttctcccccgtgcagggccgctgtgcccactgcaggacatgcagcatccttcgccccactccactcactaaaggccagcgcaccccaggccccatagtattgctggttatggatttattgactttatgttccaaattcagctttttcagttggctgttttttgaaaggggataagctttgtcagtagagggcaccaaacaggcattataggaggaaaggcgcctccttcgtggttcttgttggttgtgcttctgcctctggacgccgcagtgcatgtggcttccccagcacccagctcctgaagcaccaggcggtcagcagctgcccttggcaccctccagccctcagaagttgcgtaggagacacagcgcctccactgaggcacctctctgggaataacgttccccagcaccccaaatggatttccagtcaattcagaagcattttaccagtgaagccctcattattccagttcactgttaaagccagtaattctctatatt

SEQ ID NO: 109595 - DNA, 1026 bp, Homo sapiens
  Payload ID: 1522
  Gene Symbol: ATP5SL
  Gene Name: ATP5S-like
  ENST ID: ENST00000590641
  CDS Start-End: 68-604
aaggagctaatggacaggcaagggtggggcctgtaggataagagagcttggaagggattgttcgaggatgtgggatttggtcttagaagaccgaaggatgaattccctgcgcctggtcgcccccatgtggaatgggcgtatcaggggcatccatcgcctgggtgcggcagtggccccagagggcaatcagaagaagaaaaggacaatactccagttcctgaccaactatttctacgatgtggaggctctgagggattacttgctccaaagggagatgtacaaggtgcatgagaaaaatcggtttcgagacaaggagtggatcaggccagataagtatggccatttctctcaggagttctggaatttctgtgaagtgcctgtcgaagctgtggatgccggtgactgtgacatcaactacgagggcctggataacctcctccgcctgaaggagctccagtccttgtcgctgcagcgctgctgccacgtggacgactggtgtctcagccgcctctacccactggccgactcgttgcaggagctctcgctggccggttgcccccgcatctccgaacggggcctcgcctgcctccaccacctccagtgagacctcagctcaggctgggccacatgcccaggcacctctcccacctaacccagatgcaggagaggaagtggggaggggcaatgttaggcagttctcatatccccctgcatccatcacaaacctagagtatttatggtagatgagcagtcacagtgagtctctggaagaattaaatgactcctggttttcttcctttttgttttagtcaaaactgtgtgatatcgacgctgttgcagaacagcaggagctggagttgcatatttgcaattaacacagtgggcttcatgtgcctggacagctataaagattttattttaggaagctaaggttgaaatttggggccagtacctccctatacacacacacatgcacgcatgcacgcacgcacacacacacacgcacgcacacacactgtcctgtaa

SEQ ID NO: 109596 - DNA, 562 bp, Homo sapiens
  Payload ID: 1522
  Gene Symbol: ATP5SL
  Gene Name: ATP5S-like
  ENST ID: ENST00000586786
  CDS Start-End: 259-562
cacaatggctcttcatgctgcgatctagctttcaactccaaactggtcttgagatctcacctcagtctctaaccttgacatctaacctcttcacccactctcttacctgaccctaatttttaaaaatgacgtggtcagcttttcagccccctcattccctgtttttaggaggtagtgagtggaagctggaagaataagaaagcttggggagactgcaattgcagtcaggaaagaaagtccctgcgcctggtcgcccccatgtggaatgggcgtatcaggggcatccatcgcctgggtgcggcagtggccccagagggcaatcagaagaagaaaaggacaatactccagttcctgaccaactatttctacgatgtggaggctctgagggattacttgctccaaagggagatgtacaaggtgcatgagaaaaatcgatcttacacctggctggagaagcaacatggtccatacggcgcaggtgcctttttcatcctgaagcagggaggcgcagtcaagtttcgagacaaggagtggatcaggccagataagtatggccatttct

SEQ ID NO: 109597 - DNA, 782 bp, Homo sapiens
  Payload ID: 1522
  Gene Symbol: ATP5SL
  Gene Name: ATP5S-like
  ENST ID: ENST00000594339
  CDS Start-End: 29-97
aagagagcttggaagggattgttcgaggatgtgggatttggtcttagaagaccgaaggatgaatgtttcgagacaaggagtggatcaggccagataagtatggccatttctctcaggagttctggaatttctgtgaagtgcctgtcgaagctgtggatgccggtgactgtgacatcaactacgagggcctggataacctcctccgcctgaaggagctccagtccttgtcgctgcagcgctgctgccacgtggacgactggtgtctcagccgcctctacccactggccgactcgttgcaggagctctcgctggccggttgcccccgcatctccgaacggggcctcgcctgcctccaccacctccagtgagacctcagctcaggctgggccacatgcccaggcacctctcccacctaacccagatgcaggagaggaagtggggaggggcaatgttaggcagttctcatatccccctgcatccatcacaaacctagagtatttatggtagatgagcagtcacagtgagtctctggaagaattaaatgactcctggttttcttcctttttgttttagtcaaaactgtgtgatatcgacgctgttgcagaacagcaggagctggagttgcatatttgcaattaacacagtgggcttcatgtgcctggacagctataaagattttattttaggaagctaaggttgaaatttggggccagtacctccctatacacacacacatgcacgcatgcacgcacgcacacacacacacgcacgcacacacactg

SEQ ID NO: 109598 - DNA, 572 bp, Homo sapiens
  Payload ID: 1522
  Gene Symbol: ATP5SL
  Gene Name: ATP5S-like
  ENST ID: ENST00000595425
  CDS Start-End: 10-528
cttagcaagatggcggctccctgggcgtccctgcgcctggtcgcccccatgtggaatgggcgtatcaggggcatccatcgcctgggtgcggcagtggccccagagggcaatcagaagaagaaaaggacaatactccagttcctgaccaactatttctacgatgtggaggctctgagggattacttgctccaaagggagatgtacaaggtgcatgagaaaaatcggtttcgagacaaggagtggatcaggccagataagtatggccatttctctcaggagttctggaatttctgtgaagtgcctgtcgaagctgtggatgccggtgactgtgacatcaactacgagggcctggataacctcctccgcctgaaggagctccagtccttgtcgctgcagcgctgctgccacgtggacgactggtgtctcagccgcctctacccactggccgactcgttgcaggagctctcgctggccggttgcccccgcatctccgaacggggcctcgcctgcctccaccacctccagtgagacctcagctcaggctgggccacatgcccaggcacctctcccac

SEQ ID NO: 109599 - DNA, 582 bp, Homo sapiens
  Payload ID: 1522
  Gene Symbol: ATP5SL
  Gene Name: ATP5S-like
  ENST ID: ENST00000594660
  CDS Start-End: 1-451
atacggcgcaggtgcctttttcatcctgaagcagggaggcgcagtcaagtttcgagacaaggagtggatcaggccagataagtatggccatttctctcaggagttctggaatttctgtgaagtgcctgtcgaagctgtggatgccggtgactgtgacatcaactacgagggcctggataacctcctccgcctgaaggagctccagtccttgtcgctgcagcgctgctgccacgtggacgactggtgtctcagccgcctctacccactggccgactcgttgcaggagctctcgctggccggttgcccccgcatctccgaacggggcctcgcctgcctccaccacctccagaacctccgcaggctggacatctcggacctccctgccgtgtccaaccctggcctcactcagatattggtggaggagatgctgcccaattgcgagggaccctgactgacacaggggctactactgacactttacagggatggttctcccccgtgcagggccgctgtgcccactgcaggacatgcagcatccttcgccccactccactcactaaaggccagcgcaccccaggcccc

SEQ ID NO: 109600 - DNA, 492 bp, Homo sapiens
  Payload ID: 1522
  Gene Symbol: ATP5SL
  Gene Name: ATP5S-like
  ENST ID: ENST00000597457
  CDS Start-End: 7-372
agcaagatggcggctccctgggcgtccctgcgcctggtcgcccccatgtggaatgggcgtatcaggggcatccatcgcctgggtgcggcagtggccccagagggcaatcagaagaagaaaaggacaatactccagttcctgaccaactatttctacgatgtggaggctctgagggattacttgctccaaagggagatgtacaaggtgcatgagaaaaatcggtttcgagacaaggagtggatcaggccagataagtatggccatttctctcaggagttctggaatttctgtgaagtgcctgtcgaagctgtggatgccggtgactgtgacatcaactacgagggcctggataacctcctcaaaactgtgtgatatcgacgctgttgcagaacagcaggagctggagttgcatatttgcaattaacacagtgggcttcatgtgcctggacagctataaagattttattttaggaagctaaggttgaaatttgg

SEQ ID NO: 109601 - DNA, 2039 bp, Homo sapiens
  Payload ID: 1523
  Gene Symbol: ATP6V1G2-DDX39B
  Gene Name: ATP6V1G2-DDX39B readthrough (NMD candidate)
  ENST ID: ENST00000376185
  CDS Start-End: 24-323
cagcatcggccataacaacagaaatggccagtcagtcccaaggtatccagcagcttctgcaagctgagaagcgggcagctgagaaggtggcagatgccagaaagaggaaggcccggcgactgaagcaggcaaaggaggaggcacagatggaggtggagcaataccgcagagagcgagagcacgaattccagagcaagcagcaggcgacaggcattttccaaaggcaagcctggagcgcacggatctgtataaccgcggaaggccctgtttccggtcccttgcgcctgcgctcttgcagccaagaaggcgggaggctggagtagagggaagcctgcaaccggaagtgaaggcagatttccctccttcgtcgctgttgctgccgccatacgcgctctccctgtttagctcttctgttagaaatagtatctttgttttcctttgctgttcctcaatcccctactcttcaccccttgttttcacctattttgcgagaacccatccagatcccccttcccttcttcccctgccggcccagttatggcagagaacgatgtggacaatgagctcttggactatgaagatgatgaggtggagacagcagctgggggagatggggctgaggcccctgccaagaaggatgtcaagggctcctatgtctccatccacagctctggctttcgtgacttcctgctcaagccagagttgctccgggccattgtcgactgtggctttgagcatccgtcagaagtccagcatgagtgcatccctcaggccattctgggaatggatgtcctgtgccaggccaagtcgggcatgggaaagacagcagtgtttgtcttggccacactgcaacagctggagccagttactgggcaggtgtctgtactggtgatgtgtcacactcgggagttggcttttcagatcagcaaggaatatgagcgcttctctaaatacatgcccaatgtcaaggttgctgttttttttggtggtctgtctatcaagaaggatgaagaggtgctgaagaagaactgcccgcatatcgtcgtggggactccaggccgtatcctagccctggctcgaaataagagcctcaacctcaaacacattaaacactttattttggatgaatgtgataagatgcttgaacagctcgacatgcgtcgggatgtccaggaaatttttcgcatgaccccccacgagaagcaggtcatgatgttcagtgctaccttgagcaaagagatccgtccagtctgccgcaagttcatgcaagatccaatggagatcttcgtggatgatgagacgaagttgacgctgcatgggttgcagcagtactacgtgaaactgaaggacaacgagaagaaccggaagctctttgaccttctggatgtccttgagttcaaccaggtggtgatctttgtgaagtctgtgcagcggtgcattgccttggcccagctactagtggagcagaacttcccagccattgccatccaccgtgggatgccccaggaggagaggctttctcggtatcagcagtttaaagattttcaacgacgaattcttgtggctaccaacctatttggccgaggcatggacatcgagcgggtgaacattgcttttaattatgacatgcctgaggattctgacacctacctgcatcgggtggccagagcaggccggtttggcaccaagggcttggctatcacatttgtgtccgatgagaatgatgccaagatcctcaatgatgtgcaggatcgctttgaggtcaatattagtgagctgcctgatgagatagacatctcctcctacattgaacagacacggtagaagactcgcccattttggaatgtgaccgtctgtccttcaggagaggacaccagggtgggggtgaaggagacactactgcccccacccctgacagcccccaccccatggcttccatcttttgcatcaccaccactcctgaacccccatttctgatttgtcagaatttttttttaacaaaactaaaaatgaaacacatgtgtctgtggtatctataa

SEQ ID NO: 109602 - DNA, 552 bp, Homo sapiens
  Payload ID: 1523
  Gene Symbol: ATP6V1G2-DDX39B
  Gene Name: ATP6V1G2-DDX39B readthrough (NMD candidate)
  ENST ID: ENST00000480131
  CDS Start-End: 50-349
atctggtactttgacagcattcaaaacagcatcggccataacaacagaaatggccagtcagtcccaaggtatccagcagcttctgcaagctgagaagcgggcagctgagaaggtggcagatgccagaaagaggaaggcccggcgactgaagcaggcaaaggaggaggcacagatggaggtggagcaataccgcagagagcgagagcacgaattccagagcaagcagcaggcgacaggcattttccaaaggcaagcctggagcgcacggatctgtataaccgcggaaggccctgtttccggtcccttgcgcctgcgctcttgcagccaagaaggcgggaggctggagtagagggaagcctgcaaccggaagtgaaggcagatttccctccttcgtcgctgttgctgccgccatacgcgctctccctgtttagttatggcagagaacgatgtggacaatgagctcttggactatgaagatgatgaggtggagacagcagctgggggagatggggctgaggcccctgccaagaaggatgtcaagggctcctatgt

SEQ ID NO: 109603 - DNA, 2939 bp, Homo sapiens
  Payload ID: 1524
  Gene Symbol: ATAD1
  Gene Name: ATPase family, AAA domain containing 1
  Uniprot ID: Q8NBU5
  ENST ID: ENST00000328142
  CDS Start-End: 284-1369
gtatttttcaaataaaatgattaattctactaccaaataaatcttaatttctagtctacttctagtttgcaagaggagctttaaatgtatttgtttacttaacatttaaaaatccatttctccttaaaatgaaacactttttttaaggtaggtaatattttaatttgactagaagttagtttttctttcttagtttaagctactttgttagtcttacaattttaataagtatagttattacctagtgacatttctgtttgtttttttaaggttaacattcaagatggtacatgctgaagccttttctcgtcctttgagtcggaatgaagttgttggtttaattttccgtttgacaatatttggtgcagtgacatactttactatcaaatggatggtagatgcaattgatccaaccagaaagcaaaaagtagaagctcagaaacaggcagaaaaactaatgaagcaaattggagtgaaaaatgtgaagctctcagaatatgaaatgagtattgctgctcatcttgtagaccctcttaatatgcatgttacttggagtgatatagcaggtttagatgatgtcattacggatctgaaagacacagtcatcttacctatcaaaaagaaacatttgtttgagaattccaggcttctgcagcctccaaaaggtgttcttctctatgggcctccaggctgtggtaaaacgttgattgccaaggccacagccaaagaagcaggctgtcgatttattaaccttcagccttcgacactgaccgataagtggtatggagaatctcagaaattggctgctgctgtcttctcccttgccataaagctacaaccatccatcatctttatagatgaaatagactcctttctacgaaaccgttcaagttctgaccatgaagctacagccatgatgaaagctcagtttatgagtctctgggatggattggatactgatcacagctgccaggtcatagtaatgggagctaccaatcgtcctcaggaccttgactcggctataatgagaagaatgcctacaagatttcatatcaaccagcctgctttaaaacagagagaagcaatcctgaaactcatcttgaaaaatgaaaatgtggataggcatgtagacctgctagaagttgcccaggaaactgatgggttttcaggaagtgacctaaaagagatgtgtcgagatgctgccctcctctgtgttagagaatatgttaattctacatcagaagaaagccatgacgaagatgaaattcggcctgttcaacagcaggacctgcatcgggcaattgaaaagatgaagaaatcaaaggatgcagcatttcagaatgttttaacacatgtttgtttagattaagagtaaagatcatttgtacagttcagtgatctagtttggtgtgtcctcttatcagttagtggaaatagaacggaaagagtgctctttaaacaatgagggagctcagtgtttatggttttatactctgaattctaagttattgagatatagttgttacataggtggtattactgttggtcaaaaatcatgaggaggaacagttgaatccagcctgaacgtgggtgcttgtgtttgaccttttcagccatatattgtacagccttatagaatctaagctggtcttaaagtcataaatgattcattgggtcattagtgagaaacggggatgtggttaggtgctggttcctagacatgtgagtatgcgtttgtgtgtgtgcgtgtatgtatgtgtatattaaatgtatatatccacacattttatattgacattctgtagatatgtttgaatatagaaactttttttaccccaactactgaatccaggagtaccaaataatatatagtaaaactaagatttaaggttgtgtcaaaaaggtacagtgattcagccatttccatttgtcatttgtttcaaccttttttaagttgagtgtttttatttctgcagttattagttggatcctccacatcttgcatatatacatgggctcaattattatgtttgtcaggataatcaaatgaaaatactagttcagtgatcagcattgaatggttgttaggcagccatgtgctcaacactgatttcacctcttgagtataaactttttaaatttaaattggtttacatgaaagtggattaaaaggcctttcaaaagaatgggtttgaaaaacctcagtaccctttaatacatgtacatttctttccttttttcatttaatgtaacatgtctgttgtaactatgtttcttaaatattattttaaggttatgtgttctttaattatggtcaaatataatttggtcaccaaaaatgaaataatagtttaaaacaagtagctgttactaagtgtgctaaaaatactcattttataattaattttagttttcttagtatattattataaattgtgccctaagtcaggtacaaatgtacacatcaaaatgcccatattgtatctatctgtagtcgtttaatgtgaattatatgtgaatttttttcaaaattttactaaccagaattctgttataggcacctaaccacgcagcatgaggaaaacggcacaacacaatcttgaggtgccttctgaatcatcagattaaattatgcttcatatgtttttgcttttactgtatttctttaaaaactctaaatctttattcatgtgtcactggattaatttatctgataatgtgtctcacaagaatctgttagatcgtttattcttcagttgtactttgaatggtggggtggaagtttcaggtgaacaatggataacaaaaagcaagttatggaagattgtgaagaggatggaaaaactgaatacaagataccaaaaatgaaaaaaagtgtcccatttttaataactatattctattattttataaatgtgtaataaaggggtccctcttta

SEQ ID NO: 109604 - DNA, 4640 bp, Homo sapiens
  Payload ID: 1524
  Gene Symbol: ATAD1
  Gene Name: ATPase family, AAA domain containing 1
  Uniprot ID: Q8NBU5
  ENST ID: ENST00000308448
  CDS Start-End: 380-1465
agctggttcccgtggggcctcatgggatggttgtcgtatccttctgaggtcctttaaggaccgtctcggacctgggaacccccggaggaaaggtcaccccggtcttctcccacgccctacctcagtgccgcccccaagcgccccgcagcccttagtatctagaggattaacctccaagggcgtcccgggcctcgccttggcgtccggcccggcctgggcccttagggtctgcttagctcttccccaagactcgtgccattcccgagggaatctttgtcggcatcctggtcactgtgggggtttgaggtcgtcccggaagacttcagaaccaggcgaacctagacgaaggcggctggaatgaaccaggttaacattcaagatggtacatgctgaagccttttctcgtcctttgagtcggaatgaagttgttggtttaattttccgtttgacaatatttggtgcagtgacatactttactatcaaatggatggtagatgcaattgatccaaccagaaagcaaaaagtagaagctcagaaacaggcagaaaaactaatgaagcaaattggagtgaaaaatgtgaagctctcagaatatgaaatgagtattgctgctcatcttgtagaccctcttaatatgcatgttacttggagtgatatagcaggtttagatgatgtcattacggatctgaaagacacagtcatcttacctatcaaaaagaaacatttgtttgagaattccaggcttctgcagcctccaaaaggtgttcttctctatgggcctccaggctgtggtaaaacgttgattgccaaggccacagccaaagaagcaggctgtcgatttattaaccttcagccttcgacactgaccgataagtggtatggagaatctcagaaattggctgctgctgtcttctcccttgccataaagctacaaccatccatcatctttatagatgaaatagactcctttctacgaaaccgttcaagttctgaccatgaagctacagccatgatgaaagctcagtttatgagtctctgggatggattggatactgatcacagctgccaggtcatagtaatgggagctaccaatcgtcctcaggaccttgactcggctataatgagaagaatgcctacaagatttcatatcaaccagcctgctttaaaacagagagaagcaatcctgaaactcatcttgaaaaatgaaaatgtggataggcatgtagacctgctagaagttgcccaggaaactgatgggttttcaggaagtgacctaaaagagatgtgtcgagatgctgccctcctctgtgttagagaatatgttaattctacatcagaagaaagccatgacgaagatgaaattcggcctgttcaacagcaggacctgcatcgggcaattgaaaagatgaagaaatcaaaggatgcagcatttcagaatgttttaacacatgtttgtttagattaagagtaaagatcatttgtacagttcagtgatctagtttggtgtgtcctcttatcagttagtggaaatagaacggaaagagtgctctttaaacaatgagggagctcagtgtttatggttttatactctgaattctaagttattgagatatagttgttacataggtggtattactgttggtcaaaaatcatgaggaggaacagttgaatccagcctgaacgtgggtgcttgtgtttgaccttttcagccatatattgtacagccttatagaatctaagctggtcttaaagtcataaatgattcattgggtcattagtgagaaacggggatgtggttaggtgctggttcctagacatgtgagtatgcgtttgtgtgtgtgcgtgtatgtatgtgtatattaaatgtatatatccacacattttatattgacattctgtagatatgtttgaatatagaaactttttttaccccaactactgaatccaggagtaccaaataatatatagtaaaactaagatttaaggttgtgtcaaaaaggtacagtgattcagccatttccatttgtcatttgtttcaaccttttttaagttgagtgtttttatttctgcagttattagttggatcctccacatcttgcatatatacatgggctcaattattatgtttgtcaggataatcaaatgaaaatactagttcagtgatcagcattgaatggttgttaggcagccatgtgctcaacactgatttcacctcttgagtataaactttttaaatttaaattggtttacatgaaagtggattaaaaggcctttcaaaagaatgggtttgaaaaacctcagtaccctttaatacatgtacatttctttccttttttcatttaatgtaacatgtctgttgtaactatgtttcttaaatattattttaaggttatgtgttctttaattatggtcaaatataatttggtcaccaaaaatgaaataatagtttaaaacaagtagctgttactaagtgtgctaaaaatactcattttataattaattttagttttcttagtatattattataaattgtgccctaagtcaggtacaaatgtacacatcaaaatgcccatattgtatctatctgtagtcgtttaatgtgaattatatgtgaatttttttcaaaattttactaaccagaattctgttataggcacctaaccacgcagcatgaggaaaacggcacaacacaatcttgaggtgccttctgaatcatcagattaaattatgcttcatatgtttttgcttttactgtatttctttaaaaactctaaatctttattcatgtgtcactggattaatttatctgataatgtgtctcacaagaatctgttagatcgtttattcttcagttgtactttgaatggtggggtggaagtttcaggtgaacaatggataacaaaaagcaagttatggaagattgtgaagaggatggaaaaactgaatacaagataccaaaaatgaaaaaaagtgtcccatttttaataactatattctattattttataaatgtgtaataaaggggtccctctttattggttgttctccacttaatctttggtctttttcagtaattttaagttttctgggattttttttggtttataaaacttgtgtttagactttatcttgctatggagttttcacacttctatagcacatatcctagtatctagtcatttctgttttaatatgaatttcagtaatttaattttaatctggtgacatattaatcgaaaataaggagtaatgtatacctccacatgtcctttctttttgtcttctcttaaattcacaatatccagtaggagtggttattcaatttcttcgtggttttaatcatcaaatgaagttagagaagtatactaatcccagcaactatgactcatctaggcatgttaagaccataaagtaattcaggaaactattttcctgatttttaaataacttttagtgttatgtaacatctatccttctgttttagacatgcatttcacatatagttgaattctagattctaagataattcattttgggtaatacttcagagtactggatctagaatcaggcttcctgaatttaaactcaggctccccattaactgtgtgtctgtgagcccagtttctcatctgtaaaatggggcaacagtggcactcatcttaaagggttggataataaaataatgcatgtaaggccctcagcatagtgcctggcacagaattactgctcaaatgttagctgtcgtattaatattgtcacttttgcacactgatgtacatttcctgttgaccaggctcattctttaagcattctccatgcttaaaccagttccataatccctaggcctgtactccagggattgagactgaaaggatcatttatgccatgtttctctaaaagcatcattgctggaagacttttgataagtctgatgtgtctcaagctattctcaggccttttttgtagagtttagaaatgaagtatttgaatcaatttagtatctcctttactatgtttctccttttaatctcagccaaccccctacctgcaggtaaacccagcattcattaagagctgggttggggtactctattctgtatgcatcataatagcttaacattatttagtagctgtaacttacaggtttaatgctagatgaggatgtctcaagccgtgagtgtgcttgtgtaaaaatggtggcaacatcatctcgttggtaggaattttttacttgaattgttattttgggaaaatgttaacagatttcttctggataaagaaaataaattggatgatgtatattttatgtttctttttagcttctcttaaaatcagaatattgaacagaattctgatatgctgaatatatatagtgcatggctgaaactccagcaccaactgggtgcttcaaatgaagtcatagaataattccatctagagctgacagaaatctttcagagccttcattattaaatttgttatagatttagttatcaaagatagagttctctaatcttttttttaaagctaaagttctctttatttacatgtataggaaaacattctgcctaaatcatgatgttaatgaaaatcatattgaggagaacttgaaccttattaaatatgagcttctaacataa

SEQ ID NO: 109605 - DNA, 2939 bp, Homo sapiens; identical to SEQ ID NO: 109603
  Payload ID: 1524
  Gene Symbol: ATAD1
  Gene Name: ATPase family, AAA domain containing 1
  ENST ID: ENST00000634773
  CDS Start-End: 284-1369

SEQ ID NO: 109606 - DNA, 4640 bp, Homo sapiens; identical to SEQ ID NO: 109604
  Payload ID: 1524
  Gene Symbol: ATAD1
  Gene Name: ATPase family, AAA domain containing 1
  ENST ID: ENST00000634970
  CDS Start-End: 380-1465

SEQ ID NO: 109607 - DNA, 5565 bp, Homo sapiens
  Payload ID: 1525
  Gene Symbol: ATAD2
  Gene Name: ATPase family, AAA domain containing 2
  Uniprot ID: Q6PL18
  ENST ID: ENST00000287394
  CDS Start-End: 109-4281
cgcggagcttgtggcgccagaattcggagcgcggaagagccagagctgcgagcgcctggagctggatctctctccggtcgcgcacgccgaggccagtagggagagaagatggtggttctccgcagcagcttggagctgcacaaccactccgcggcctcggccacgggctccttggacctgtccagtgacttcctcagtctggagcacatcggccggaggcggctccgctcggccggcgcggcgcagaagaaacccgcggcgaccacagccaaagcgggcgatgggtcatcagttaaggaagttgaaacctaccaccggacacgtgctttaagatctttgagaaaagatgcacagaattcttcagattctagttttgagaagaatgtggaaataacggagcaacttgctaatggcaggcattttacaaggcagttggccagacagcaggctgataaaaaaaaagaagagcacagagaagacaaagtgattccagttactcggtcattgagggctagaaacatcgttcaaagtacagaacacttacatgaagataatggtgatgttgaagtgcgtcgaagttgtaggattagaagtcgttatagtggtgtaaaccagtccatgctgtttgacaaacttataactaacactgctgaagctgtacttcaaaaaatggatgacatgaagaagatgcgtagacagcgaatgagagaacttgaagacttgggagtgtttaatgaaacagaagaaagcaatcttaatatgtacacaagaggaaaacagaaagatattcaaagaactgatgaagaaacaactgataatcaagaaggcagtgtggagtcatctgaagagggtgaagaccaagaacatgaagatgatggtgaagatgaagatgatgaagatgatgatgatgatgacgatgatgatgatgatgatgatgatgaagatgatgaagatgaagaagatggagaagaagagaatcagaagcgatattatcttagacagagaaaagctactgtttactatcaggctccattggaaaaacctcgtcaccagagaaagcccaacatattttatagtggcccagcttctcctgcaagaccaagataccgattatcttccgcaggaccaagaagtccttactgtaaacgaatgaacaggcgaaggcatgcaatccacagtagtgactcgacttcatcttcctcctctgaagatgaacagcactttgagaggcggaggaaaaggagtcgtaatagggctatcaataggtgcctcccactaaattttcggaaagatgaattaaaaggcatttataaagatcgaatgaaaattggagcaagccttgccgatgttgatccaatgcaactagattcttcagtacgatttgatagtgttggtggcctgtctaatcatatagcagctctaaaagagatggtggtgtttccattactttatccagaagtctttgaaaaatttaaaattcaacccccaagaggttgtttgttttatgggccacctggaactggaaagactctggttgccagagcacttgccaatgagtgcagtcaaggggataaaagagtagcatttttcatgaggaaaggtgctgattgtctaagtaaatgggtaggagaatctgaaagacagctacgattgctgtttgatcaggcctatcagatgcgcccatcaattattttttttgacgaaattgatggtctggctccagtacggtcaagcaggcaagatcagattcacagttctattgtttccaccctgctagctcttatggatggattggacagcagaggggaaattgtggtcattggtgctacgaacaggctagattctatagatcctgctttacgaaggcctggtcgctttgatagagaattcctctttagcctgcctgataaagaggctcgaaaagagattctaaagattcacaccagggattggaatcccaaaccactggacacatttttagaagagctagcagaaaactgtgttggatactgtggagcagatattaaatcaatatgtgctgaagctgctttatgtgctttacgacgacgctacccacagatctataccactagtgagaaactgcagttggatctctcttcaattaatatctcagctaaggatttcgaggtagctatgcaaaagatgataccagcctcccaaagagctgtgacatcacctgggcaggcactgtccaccgttgtgaaaccactcctgcaaaacactgttgacaagattttagaagccctgcagagagtatttccacatgcagaattcagaacaaataaaacattagactcagatatttcttgtcctctgctagaaagtgacttggcttacagtgatgatgatgttccatcagtttatgaaaatggactttctcagaaatcttctcataaggcaaaagacaattttaattttcttcatttgaatagaaatgcttgttaccaacctatgtcttttcgaccaagaatattgatagtaggagaaccaggatttgggcaaggttctcacttggcaccagctgtcattcatgctttggaaaagtttactgtatatacattagacattcctgttctttttggagttagtactacatcccctgaagaaacatgtgcccaggtgattcgtgaagctaagagaacagcaccaagtatagtgtatgttcctcatatccacgtgtggtgggaaatagttggaccgacacttaaagccacatttaccacattattacagaatattccttcatttgctccagttttactacttgcaacttctgacaaaccccattccgctttgccagaagaggtgcaagaattgtttatccgtgattatggagagatttttaatgtccagttaccggataaagaagaacggacaaaattttttgaagatttaattctaaaacaagctgctaagcctcctatatcaaaaaagaaagcagttttgcaggctttggaggtactcccagtagcaccaccacctgagccaagatcactgacagcagaagaagtgaaacgactagaagaacaagaagaagatacatttagagaactgaggattttcttaagaaatgttacacataggcttgctattgacaagcgattccgagtgtttactaagcctgttgaccctgatgaggttcctgattatgtcactgtaataaagcaaccaatggacctttcatctgtaatcagtaaaattgatctacacaagtatctgactgtgaaagactatttgagagatattgatctaatctgtagtaatgccttagaatacaatccagatagagatcctggagatcgtcttattaggcatagagcctgtgctttaagagatactgcctatgccataattaaagaagaacttgatgaagactttgagcagctctgtgaagaaattcaggaatctagaaagaaaagaggttgtagctcctccaaatatgccccgtcttactaccatgtgatgccaaagcaaaattccactcttgttggtgataaaagatcagacccagagcagaatgaaaagctaaagacaccgagtactcctgtggcttgcagcactcctgctcagttgaagaggaaaattcgcaaaaagtcaaactggtacttaggcaccataaaaaagcgaaggaagatttcacaggcaaaggatgatagccagaatgccatagatcacaaaattgagagtgatacagaggaaactcaagacacaagtgtagatcataatgagaccggaaacacaggagagtcttcggtggaagaaaatgaaaaacagcaaaatgcctctgaaagcaaactggaattgagaaataattcaaatacttgtaatatagagaatgagcttgaagactctaggaagactacagcatgtacagaattgagagacaagattgcttgtaatggagatgcttctagctctcagataatacatatttctgatgaaaatgaaggaaaagaaatgtgtgttctgcgaatgactcgagctagacgttcccaggtagaacagcagcagctcatcactgttgaaaaggctttggcaattctttctcagcctacaccctcacttgttgtggatcatgagcgattaaaaaatcttttgaagactgttgttaaaaaaagtcaaaactacaacatatttcagttggaaaatttgtatgcagtaatcagccaatgtatttatcggcatcgcaaggaccatgataaaacatcacttattcagaaaatggagcaagaggtagaaaacttcagttgttccagatgatgatgtcatggtatcgagtattctttatattcagttcctatttaagtcatttttgtcatgtccgcctaattgatgtagtatgaaaccctgcatctttaaggaaaagattaaaatagtaaaataaaagtatttaaactttcctgatatttatgtacatattaagataaatgtcatgtgtaagataactgataaatattggaactttgctagaacaagaccctgtagtaatagtaataatagttgaagtttggccaactcttaataaagttattttggtaactaatgttttatggcacttaagaataattagcagcgttaaattttgtttgtattaagcacttttaattttatccttcctaaaaatagtttattgtatctgacaagaaacttacttaaccattgtgtccttcccatcttttttgtcatctttgttttcttcaaatgccctcctcccatctgccttgagattccctcgtcttcacttaaaagccagagtgcaagtcatgatttgcgggagggctcttgaaccacttctggctgcaccacaattctgtacttgagtatcacagtcattgtttttgagacaaacatttttataattctaatttgggttaataaagattttaaatatttcttggtttacttttgtaattatatacacaacaaatgtattaataactaccttgttaaacaccttttaatagcacaaggtttttatatttgcaagctgttgatatctttctaaaactgtttaggttatagtctattgatactttttatatacaattttataaatataaatattataattttatattaatggtaccaaaaatacatttcttaaggttaaaagcatgcacttccatgcatacttgcttttggggagagtggggagaagacattctaataatcagtttgtgaaatagcttctgttggaaaccttttgaggggaataaggaatggtcatctaaaatgagagattctggattttaatgcagttcaaagttgagctgtatttttgttgttgatttatctggattttttttaaagccttctaaaacccagtgaattcaataccttaattagtacatactatcttatgtaatgcataaagcaatgccagtcactgagaacatttaaatatatttatattcctggagatacacattctcatttttgttggtttattataaattattcttctagatgcatcttttataactaggatttcattttgtgtgtatagcttatgtaataaattttaaaggtgaaaactctcttaaa

SEQ ID NO: 109608 - DNA, 5143 bp, Homo sapiens
  Payload ID: 1525
  Gene Symbol: ATAD2
  Gene Name: ATPase family, AAA domain containing 2
  ENST ID: ENST00000521903
  CDS Start-End: 2385-4511
aggtttgggcttggagttgggccctgaatggcgctttgctgtgaatctccgcggggaggctcttccaaccaggggctgagcttctgcgctgtggagaagccaggatctcatttgcctctttcaacatcactcctgctggagccaccaccagctcaatccttggcatcatcacctcactgaggagggtggtgtggtccttctcagcaagaaagtcgatgtctcgggaagtgacgatgcccaccggcttgctgcccatggtgcctgtctcagtgatggggataccagagaagccatgccgcatcgtggcctccagcacatcacccacagggtgcgaggggctcagcaccatggggtccgtgatgaagccatgttcaaacttcttgaccttccgcacctccttggcctggaactctggggtgcagttgtggtgaatgaaaccaatacctcccaccagagccatcgtgatggccatgttgccctctgtcacagtgtccatggaggaggagatcagcggcgtcttcagcgtgatcttccaggatgggtcatcagttaaggaagttgaaacctaccaccggacacgtgctttaagatctttgagaaaagatgcacagaattcttcagattctagttttgagaagaatgtggaaataacggagcaacttgctaatggcaggcattttacaaggcagttggccagacagcaggctgataaaaaaaaagaagagcacagagaagacaaagtgattccagttactcggtcattgagggctagaaacatcgttcaaagtacagaacacttacatgaagataatggtgatgttgaagtgcgtcgaagttgtaggattagaagtcgttatagtggtgtaaaccagtccatgctgtttgacaaacttataactaacactgctgaagctgtacttcaaaaaatggatgacatgaagaagatgcgtagacagcgaatgagagaacttgaagacttgggagtgtttaatgaaacagaagaaagcaatcttaatatgtacacaagaggaaaacagaaagatattcaaagaactgatgaagaaacaactgataatcaagaaggcagtgtggagtcatctgaagagggtgaagaccaagaacatgaagatgatggtgaagatgaagatgatgaagatgatgatgatgatgacgatgatgatgatgatgatgatgatgaagatgatgaagatgaagaagatggagaagaagagaatcagaagcgatattatcttagacagagaaaagctactgtttactatcaggctccattggaaaaacctcgtcaccagagaaagcccaacatattttatagtggcccagcttctcctgcaagaccaagataccgattatcttccgcaggaccaagaagtccttactgtaaacgaatgaacaggcgaaggcatgcaatccacagtagtgactcgacttcatcttcctcctctgaagatgaacagcactttgagaggcggaggaaaaggagtcgtaatagggctatcaataggtgcctcccactaaattttcggaaagatgaattaaaaggcatttataaagatcgaatgaaaattggagcaagccttgccgatgttgatccaatgcaactagattcttcagtacgatttgatagtgttggtggcctgtctaatcatatagcagctctaaaagagatggtggtgtttccattactttatccagaagtctttgaaaaatttaaaattcaacccccaagaggttgtttgttttatgggccacctggaactggaaagactctggttgccagagcacttgccaatgagtgcagtcaaggggataaaagagtagcatttttcatgaggaaaggtgctgattgtctaagtaaatgggtaggagaatctgaaagacagctacgattgctgtttgatcaggcctatcagatgcgcccatcaattattttttttgacgaaattgatggtctggctccagtacggtcaagcaggcaagatcagattcacagctcttatggatggattggacagcagaggggaaattgtggtcattggtgctacgaacaggctagattctatagatcctgctttacgaaggcctggtcgctttgatagagaattcctctttagcctgcctgataaagaggctcgaaaagagattctaaagattcacaccagggattggaatcccaaaccactggacacatttttagaagagctagcagaaaactgtgatactgtggagcagatattaaatcaatatgtgctgaagctgctttatgtgctttacgacgacgctacccacagatctataccactagtgagaaactgcagttggatctctcttcaattaatatctcagctaaggatttcgaggtagctatgcaaaagatgataccagcctcccaaagagctgtgacatcacctgggcaggcactgtccaccgttgtgaaaccactcctgcaaaacactgttgacaagattttagaagccctgcagagagtatttccacatgcagaattcagaacaaataaaacattagactcagatatttcttgtcctctgctagaaagtgacttggcttacagtgatgatgatgttccatcagtttatgaaaatggactttctcagaaatcttctcataaggcaaaagacaattttaattttcttcatttgaatagaaatgcttgttaccaacctatgtcttttcgaccaagaatattgatagtaggagaaccaggatttgggcaaggttctcacttggcaccagctgtcattcatgctttggaaaagtttactgtatatacattagacattcctgttctttttggagttagtactacatcccctgaagaaacatgtgcccaggtgattcgtgaagctaagagaacagcaccaagtatagtgtatgttcctcatatccacgtgtggtgggaaatagttggaccgacacttaaagccacatttaccacattattacagaatattccttcatttgctccagttttactacttgcaacttctgacaaaccccattccgctttgccagaagaggtgcaagaattgtttatccgtgattatggagagatttttaatgtccagttaccggataaagaagaacggacaaaattttttgaagatttaattctaaaacaagctgctaagcctcctatatcaaaaaagaaagcagttttgcaggctttggaggtactcccagtagcaccaccacctgagccaagatcactgacagcagaagaagtgaaacgactagaagaacaagaagaagatacatttagagaactgaggattttcttaagaaatgttacacataggcttgctattgacaagcgattccgagtgtttactaagcctgttgaccctgatgaggttcctgattatgtcactgtaataaagcaaccaatggacctttcatctgtaatcagtaaaattgatctacacaagtatctgactgtgaaagactatttgagagatattgatctaatctgtagtaatgccttagaatacaatccagatagagatcctggagatcgtcttattaggcatagagcctgtgctttaagagatactgcctatgccataattaaagaagaacttgatgaagactttgagcagctctgtgaagaaattcaggaatctagaaagaaaagaggttgtagctcctccaaatatgccccgtcttactaccatgtgatgccaaagcaaaattccactcttgttggtgataaaagatcagacccagagcagaatgaaaagctaaagacaccgagtactcctgtggcttgcagcactcctgctcagttgaagaggaaaattcgcaaaaagtcaaactggtacttaggcaccataaaaaagcgaaggaagatttcacaggcaaaggatgatagccagaatgccatagatcacaaaattgagagtgatacagaggaaactcaagacacaagtgtagatcataatgagaccggaaacacaggagagtcttcggtggaagaaaatgaaaaacagcaaaatgcctctgaaagcaaactggaattgagaaataattcaaatacttgtaatatagagaatgagcttgaagactctaggaagactacagcatgtacagaattgagagacaagattgcttgtaatggagatgcttctagctctcagataatacatatttctgatgaaaatgaaggaaaagaaatgtgtgttctgcgaatgactcgagctagacgttcccaggtagaacagcagcagctcatcactgttgaaaaggctttggcaattctttctcagcctacaccctcacttgttgtggatcatgagcgattaaaaaatcttttgaagactgttgttaaaaaaagtcaaaactacaacatatttcagttggaaaatttgtatgcagtaatcagccaatgtatttatcggcatcgcaaggaccatgataaaacatcacttattcagaaaatggagcaagaggtagaaaacttcagttgttccagatgatgatgtcatggtatcgagtattctttatattcagttcctatttaagtcatttttgtcatgtccgcctaattgatgtagtatgaaaccctgcatctttaaggaaaagattaaaatagtaaaataaaagtatttaaactttcctgatatttatgtacatattaagataaatgtcatgtgtaagataactgataaatattggaactttgctagaacaagaccctgtagtaatagtaataatagttgaagtttggccaactcttaataaagttattttggtaactaatgttttatggcacttaagaataattagcagcgttaaattttgtttgtattaagcacttttaattttatccttcctaaaaatagtttattgtatctgacaagaaacttacttaaccattgtgtccttcccatcttttttgtcatctttgttttcttcaaatgccctcctcccatctgccttgagattccctcgtcttcacttaaaagccagagtgcaagtcatgatttgcgggagggctcttgaaccacttctggctgcaccacaattctgtacttgagtatcacagtcattgtttttgagacaaacatttttataattctaatttgggttaataaagattttaaatatt

SEQ ID NO: 109609 - DNA, 4995 bp, Homo sapiens
  Payload ID: 1525
  Gene Symbol: ATAD2
  Gene Name: ATPase family, AAA domain containing 2
  ENST ID: ENST00000517666
  CDS Start-End: 78-272
cggaagagccagagctgcgagcgcctggagctggatctctctccggtcgcgcacgccgaggccagtagggagagaagatggtggttctccgcagcagcttggagctgcacaaccactccgcggcctcggccacgggctccttggacctgtccagtgacttcctcagtctggagcacatcggccggaggcggctccgctcggccggcgcggcgcagaagaaacccgcggcgaccacagccaaagcgggcgcagttggccagacagcaggctgataaaaaaaaagaagagcacagagaagacaaagtgattccagttactcggtcattgagggctagaaacatcgttcaaagtacagaacacttacatgaagataatggtgatgttgaagtgcgtcgaagttgtaggattagaagtcgttatagtggtgtaaaccagtccatgctgtttgacaaacttataactaacactgctgaagctgtacttcaaaaaatggatgacatgaagaagatgcgtagacagcgaatgagagaacttgaagacttgggagtgtttaatgaaacagaagaaagcaatcttaatatgtacacaagaggaaaacagaaagatattcaaagaactgatgaagaaacaactgataatcaagaaggcagtgtggagtcatctgaagagggtgaagaccaagaacatgaagatgatggtgaagatgaagatgatgaagatgatgatgatgatgacgatgatgatgatgatgatgatgatgaagatgatgaagatgaagaagatggagaagaagagaatcagaagcgatattatcttagacagagaaaagctactgtttactatcaggctccattggaaaaacctcgtcaccagagaaagcccaacatattttatagtggcccagcttctcctgcaagaccaagataccgattatcttccgcaggaccaagaagtccttactgtaaacgaatgaacaggcgaaggcatgcaatccacagtagtgactcgacttcatcttcctcctctgaagatgaacagcactttgagaggcggaggaaaaggagtcgtaatagggctatcaataggtgcctcccactaaattttcggaaagatgaattaaaaggcatttataaagatcgaatgaaaattggagcaagccttgccgatgttgatccaatgcaactagattcttcagtacgatttgatagtgttggtggcctgtctaatcatatagcagctctaaaagagatggtggtgtttccattactttatccagaagtctttgaaaaatttaaaattcaacccccaagaggttgtttgttttatgggccacctggaactggaaagactctggttgccagagcacttgccaatgagtgcagtcaaggggataaaagagtagcatttttcatgaggaaaggtgctgattgtctaagtaaatgggtaggagaatctgaaagacagctacgattgctgtttgatcaggcctatcagatgcgcccatcaattattttttttgacgaaattgatggtctggctccagtacggtcaagcaggcaagatcagattcacagttctattgtttccaccctgctagctcttatggatggattggacagcagaggggaaattgtggtcattggtgctacgaacaggctagattctatagatcctgctttacgaaggcctggtcgctttgatagagaattcctctttagcctgcctgataaagaggctcgaaaagagattctaaagattcacaccagggattggaatcccaaaccactggacacatttttagaagagctagcagaaaactgtgttggatactgtggagcagatattaaatcaatatgtgctgaagctgctttatgtgctttacgacgacgctacccacagatctataccactagtgagaaactgcagttggatctctcttcaattaatatctcagctaaggatttcgaggtagctatgcaaaagatgataccagcctcccaaagagctgtgacatcacctgggcaggcactgtccaccgttgtgaaaccactcctgcaaaacactgttgacaagattttagaagccctgcagagagtatttccacatgcagaattcagaacaaataaaacattagactcagatatttcttgtcctctgctagaaagtgacttggcttacagtgatgatgatgttccatcagtttatgaaaatggactttctcagaaatcttctcataaggcaaaagacaattttaattttcttcatttgaatagaaatgcttgttaccaacctatgtcttttcgaccaagaatattgatagtaggagaaccaggatttgggcaaggttctcacttggcaccagctgtcattcatgctttggaaaagtttactgtatatacattagacattcctgttctttttggagttagtactacatcccctgaagaaacatgtgcccaggtgattcgtgaagctaagagaacagcaccaagtatagtgtatgttcctcatatccacgtgtggtgggaaatagttggaccgacacttaaagccacatttaccacattattacagaatattccttcatttgctccagttttactacttgcaacttctgacaaaccccattccgctttgccagaagaggtgcaagaattgtttatccgtgattatggagagatttttaatgtccagttaccggataaagaagaacggacaaaattttttgaagatttaattctaaaacaagctgctaagcctcctatatcaaaaaagaaagcagttttgcaggctttggaggtactcccagtagcaccaccacctgagccaagatcactgacagcagaagaagtgaaacgactagaagaacaagaagaagatacatttagagaactgaggattttcttaagaaatgttacacataggcttgctattgacaagcgattccgagtgtttactaagcctgttgaccctgatgaggttcctgattatgtcactgtaataaagcaaccaatggacctttcatctgtaatcagtaaaattgatctacacaagtatctgactgtgaaagactatttgagagatattgatctaatctgtagtaatgccttagaatacaatccagatagagatcctggagatcgtcttattaggcatagagcctgtgctttaagagatactgcctatgccataattaaagaagaacttgatgaagactttgagcagctctgtgaagaaattcaggaatctagaaagaaaagaggttgtagctcctccaaatatgccccgtcttactaccatgtgatgccaaagcaaaattccactcttgttggtgataaaagatcagacccagagcagaatgaaaagctaaagacaccgagtactcctgtggcttgcagcactcctgaaatgtgtgttctgcgaatgactcgagctagacgttcccaggtagaacagcagcagctcatcactgttgaaaaggctttggcaattctttctcagcctacaccctcacttgttgtggatcatgagcgattaaaaaatcttttgaagactgttgttaaaaaaagtcaaaactacaacatatttcagttggaaaatttgtatgcagtaatcagccaatgtatttatcggcatcgcaaggaccatgataaaacatcacttattcagaaaatggagcaagaggtagaaaacttcagttgttccagatgatgatgtcatggtatcgagtattctttatattcagttcctatttaagtcatttttgtcatgtccgcctaattgatgtagtatgaaaccctgcatctttaaggaaaagattaaaatagtaaaataaaagtatttaaactttcctgatatttatgtacatattaagataaatgtcatgtgtaagataactgataaatattggaactttgctagaacaagaccctgtagtaatagtaataatagttgaagtttggccaactcttaataaagttattttggtaactaatgttttatggcacttaagaataattagcagcgttaaattttgtttgtattaagcacttttaattttatccttcctaaaaatagtttattgtatctgacaagaaacttacttaaccattgtgtccttcccatcttttttgtcatctttgttttcttcaaatgccctcctcccatctgccttgagattccctcgtcttcacttaaaagccagagtgcaagtcatgatttgcgggagggctcttgaaccacttctggctgcaccacaattctgtacttgagtatcacagtcattgtttttgagacaaacatttttataattctaatttgggttaataaagattttaaatatttcttggtttacttttgtaattatatacacaacaaatgtattaataactaccttgttaaacaccttttaatagcacaaggtttttatatttgcaagctgttgatatctttctaaaactgtttaggttatagtctattgatactttttatatacaattttataaatataaatattataattttatattaatggtaccaaaaatacatttcttaaggttaaaagcatgcacttccatgcatacttgcttttggggagagtggggagaagacattctaataatcagtttgtgaaatagcttctgttggaaaccttttgaggggaataaggaatggtcatctaaaatgagagattctggattttaatgcagttcaaagttgagctgtatttttgttgttgatttatctggattttttttaaagccttctaaaacccagtgaattcaataccttaattagtacatactatcttatgtaatgcataaagcaatgccagtcactgagaacatttaaatatatttatattcctggagatacacattctcatttttgttggtttattataaattattcttctagatgcatcttttataactaggatttcattttgtgtgtatagcttatgtaataaattttaaaggtgaaaactctcttaaa

SEQ ID NO: 109610 - DNA, 4650 bp, Homo sapiens
  Payload ID: 1525
  Gene Symbol: ATAD2
  Gene Name: ATPase family, AAA domain containing 2
  ENST ID: ENST00000519124
  CDS Start-End: 23-214
ccgaggccagtagggagagaagatggtggttctccgcagcagcttggagctgcacaaccactccgcggcctcggccacgggctccttggacctgtccagtgacttcctcagtctggagcacatcggccggaggcggctccgctcggccggcgcggcgcagaagaaacccgcggcgaccacagccaaagcgggcgtgagatgggtcatcagttaaggaagttgaaacctaccaccggacacgtgctttaagatctttgagaaaagatgcacagaattcttcagattctagttttgagaagaatgtggaaataacggagcaacttgctaatggcaggcattttacaaggcagttggccagacagcaggctgataaaaaaaaagaagagcacagagaagacaaagtgattccagttactcggtcattgagggctagaaacatcgttcaaagtacagaacacttacatgaagataatggtgatgttgaagtgcgtcgaagttgtaggattagaagtcgttatagtggtgtaaaccagtccatgctgtttgacaaacttataactaacactgctgaagctgtacttcaaaaaatggatgacatgaagaagatgcgtagacagcgaatgagagaacttgaagacttgggagtgtttaatgaaacagaagaaagcaatcttaatatgtacacaagaggaaaacagaaagatattcaaagaactgatgaagaaacaactgataatcaagaaggcagtgtggtcatctgaagagggtgaagaccaagaacatgaagatgatggtgaagatgaagatgatgaagatgatgatgatgatgacgatgatgatgatgatgatgatgatgaagatgatgaagatgaagaagatggagaagaagagaatcagaagcgatattatcttagacagagaaaagctactgtttactatcaggctccattggaaaaacctcgtcaccagagaaagcccaacatattttatagtggcccagcttctcctgcaagaccaagataccgattatcttccgcaggaccaagaagtccttactgtaaacgaatgaacaggcgaaggcatgcaatccacagtagtgactcgacttcatcttcctcctctgaagatgaacagcactttgagaggcggaggaaaaggagtcgtaatagggctatcaataggtgcctcccactaaattttcggaaagatgaattaaaaggcatttataaagatcgaatgaaaattggagcaagccttgccgatgttgatccaatgcaactagattcttcagtacgatttgatagtgttggtggcctgtctaatcatatagcagctctaaaagagatggtggtgtttccattactttatccagaagtctttgaaaaatttaaaattcaacccccaagaggttgtttgttttatgggccacctggaactggaaagactctggttgccagagcacttgccaatgagtgcagtcaaggggataaaagagtagcatttttcatgaggaaaggtgctgattgtctaagtaaatgggtaggagaatctgaaagacagctacgattgctgtttgatcaggcctatcagatgcgcccatcaattattttttttgacgaaattgatggtctggctccagtacggtcaagcaggcaagatcagattcacagttctattgtttccaccctgctagctcttatggatggattggacagcagaggggaaattgtggtcattggtgctacgaacaggctagattctatagatcctgctttacgaaggcctggtcgctttgatagagaattcctctttagcctgcctgataaagaggctcgaaaagagattctaaagattcacaccagggattggaatcccaaaccactggacacatttttagaagagctagcagaaaactgtgttggatactgtggagcagatattaaatcaatatgtgctgaagctgctttatgtgctttacgacgacgctacccacagatctataccactagtgagaaactgcagttggatctctcttcaattaatatctcagctaaggatttcgaggtagctatgcaaaagatgataccagcctcccaaagagctgtgacatcacctgggcaggcactgtccaccgttgtgaaaccactcctgcaaaacactgttgacaagattttagaagccctgcagagagtatttccacatgcagaattcagaacaaataaaacattagactcagatatttcttgtcctctgctagaaagtgacttggcttacagtgatgatgatgttccatcagtttatgaaaatggactttctcagaaatcttctcataaggcaaaagacaattttaattttcttcatttgaatagaaatgcttgttaccaacctatgtcttttcgaccaagaatattgatagtaggagaaccaggatttgggcaaggttctcacttggcaccagctgtcattcatgctttggaaaagtttactgtatatacattagacattcctgttctttttggagttagtactacatcccctgaagaaacatgtgcccaggtgattcgtgaagctaagagaacagcaccaagtatagtgtatgttcctcatatccacgtgtggtgggaaatagttggaccgacacttaaagccacatttaccacattattacagaatattccttcatttgctccagttttactacttgcaacttctgacaaaccccattccgctttgccagaagaggtgcaagaattgtttatccgtgattatggagagatttttaatgtccagttaccggataaagaagaacggacaaaattttttgaagatttaattctaaaacaagctgctaagcctcctatatcaaaaaagaaagcagttttgcaggctttggaggtactcccagtagcaccaccacctgagccaagatcactgacagcagaagaagtgaaacgactagaagaacaagaagaagatacatttagagaactgaggattttcttaagaaatgttacacataggcttgctattgacaagcgattccgagtgtttactaagcctgttgaccctgatgaggttcctgattatgtcactgtaataaagcaaccaatggacctttcatctgtaatcagtaaaattgatctacacaagtatctgactgtgaaagactatttgagagatattgatctaatctgtagtaatgccttagaatacaatccagatagagatcctggagatcgtcttattaggcatagagcctgtgctttaagagatactgcctatgccataattaaagaagaacttgatgaagactttgagcagctctgtgaagaaattcaggaatctagaaagaaaagaggttgtagctcctccaaatatgccccgtcttactaccatgtgatgccaaagcaaaattccactcttgttggtgataaaagatcagacccagagcagaatgaaaagctaaagacaccgagtactcctgtggcttgcagcactcctgctcagttgaagaggaaaattcgcaaaaagtcaaactggtacttaggcaccataaaaaagcgaaggaagatttcacaggcaaaggatgatagccagaatgccatagatcacaaaattgagagtgatacagaggaaactcaagacacaagtgtagatcataatgagaccggaaacacaggagagtcttcggtggaagaaaatgaaaaacagcaaaatgcctctgaaagcaaactggaattgagaaataattcaaatacttgtaatatagagaatgagcttgaagactctaggaagactacagcatgtacagaattgagagacaagattgcttgtaatggagatgcttctagctctcagataatacatatttctgatgaaaatgaaggaaaagaaatgtgtgttctgcgaatgactcgagctagacgttcccaggtagaacagcagcagctcatcactgttgaaaaggctttggcaattctttctcagcctacaccctcacttgttgtggatcatgagcgattaaaaaatcttttgaagactgttgttaaaaaaagtcaaaactacaacatatttcagttggaaaatttgtatgcagtaatcagccaatgtatttatcggcatcgcaaggaccatgataaaacatcacttattcagaaaatggagcaagaggtagaaaacttcagttgttccagatgatgatgtcatggtatcgagtattctttatattcagttcctatttaagtcatttttgtcatgtccgcctaattgatgtagtatgaaaccctgcatctttaaggaaaagattaaaatagtaaaataaaagtatttaaactttcctgatatttatgtacatattaagataaatgtcatgtgtaagataactgataaatattggaactttgctagaacaagaccctgtagtaatagtaataatagttgaagtttggccaactcttaataaagttattttggtaactaatgttttatggcacttaagaataattagcagcgttaaattttgtttgtattaagcacttttaattttatccttcctaaaaatagtttattgtatctgacaagaaacttacttaaccattgtgtccttcccatcttttttgtcatctttgttttcttcaaatgccctcctcc

SEQ ID NO: 109611 - DNA, 8103 bp, Homo sapiens
  Payload ID: 1526
  Gene Symbol: ATAD2B
  Gene Name: ATPase family, AAA domain containing 2B
  Uniprot ID: Q9ULI0
  ENST ID: ENST00000238789
  CDS Start-End: 345-4721
cctgcggcgctggagccttgacgcacggagctcgagagcgagaacgggagagaaaggggtagaaatggcggctccgctcggctcccgctgaggagggcgaagccggcggagtgtctgtgctgccggtctgcagcaccgcccccgcttcccgcacgccgcctgctcacgccgacttcccttcctctgcccggctctctcttgtgctcgtctgcgctccgcacgctccgggccggctcgtctctcattgcccggctcggctccgctggccctgactgaccggccggcgggccggccttgctcggctctcccgggcgcggcgtggactccgtccccctggctggaccatggtgaacacccggaagagctctctccgccttctcgggtccaagtctcctggtcccgggcctgggcctggggccggagcagagcctggggcgaccggaggcagcagccatttcatctcctctcggacccgctcctccaagacccgcgccgccagctgccccgccgccaaagccgggggaagcggtggcgccggcgtcactctggatgaggccaggaaagttgaagttgatggtagtttaagtgatagccacgtatctcctccagccaaacgcactttgaaacaacctgattctgtttgcaaagacaaatcaaaatcacgaagtactggtcagcgagaggaatggaacttatcaactggacaggccaggttaacttctcagcctggtgctacattaccaaatggacatagtggcttatcccttcgaagccatccccttcgaggggaaaagaagggagatggggacctttcttgtataaatggtgacatggaagtcagaaaaagttgtcgttccaggaaaaacagatttgaaagtgtgaaccagagtttgttatttgatcaactagtaaatagcactgctgaagctgtactacaggaaatggacaacattaacatccgacggaatcgtcgatcaggagaagtagaacgacttcgaatgtggacagatacagaatttgaaaacatggatatgtattcaagagtgaaaaggcgaagaaagtcactaagaagaaatagttatgggatacaaaatcatcatgaagtttctactgagggtgaagaagaagaatctcaagaggaggatggagatatagaagttgaagaggcagaaggagaagaaaatgatagaccatataatttgagacagagaaaaacagtggatcgataccaagcacctccaatagtaccagctcatcaaaaaaagagggaaaacacgctgtttgatattcatagatctccagcaagaagaagccatattaggagaaagaagcatgccattcatagtagtgacacaacttcttctgatgaggaacgctttgaaagaaggaaatcaaagagcatggcaagagcaagaaatagatgtttgcctatgaacttcagagcagaggacttagctagcggtattctccgagaacgagtgaaagtgggtgcaagcttggctgatgttgatccaatgaacattgataaatcagtacggtttgatagcataggtggattgagccatcatattcatgcgctaaaggaaatggtagtattcccacttttatatccagaaatttttgaaaagtttaaaattcagcctccaaggggctgtttgttttatggccctcctggcacaggtaaaaccttggttgccagagcattagctaatgaatgcagccaaggagacaaaaaagtggctttttttatgcgaaaaggagcagattgtttgagcaagtgggttggtgaatctgaaaggcaacttaggcttctttttgatcaggcatatttgatgagaccttctataatattttttgatgaaatagatggattagctccagttcgctctagcagacaagatcagatccacagctctatagtatcaaccctccttgctcttatggatggattagataataggggtgaaattgttgttattggtgctacaaacagacttgactctatagatcctgcactcaggagacctggtcgttttgacagagaattcctcttcaacctgcctgatcaaaaggcaagaaaacacatcttacagatccataccagggactggaatccaaaattgtcagatgcatttttaggtgaattggctgaaaaatgtgttggctactgtggagccgatatcaaggccctgtgcactgaagccgccctgattgcactgcggaggcgttatccccagatctatgctagcagtcataaactgcagctggatgtttcctcaatagtgcttagtgcccaagatttttaccatgcaatgcagaatatcgtgcctgcttcccaacgtgctgtgatgtcttcagggcatgcactatcccccatcataagaccactgctggaaagaagcttcaacaacatcctagcagtcttgcaaaaagtgtttcctcatgctgaaattagccagagtgacaaaaaagaagatatagaaactttaattttagaggatagtgaagatgaaaatgctttatcaatttttgagaccaattgtcactcaggatcaccaaagaaacagtcatcatctgctgctatacataaaccctaccttcattttacaatgtcaccatatcatcagccaacctcttacaggccacgcttattgctctctggagaacggggctcaggtcaaacttctcaccttgctccagcacttttgcacactctagaaagattctctgtgcatagactagatctcccagcactttattcagttagtgccaaaacacctgaggaatcatgtgcacagatttttcgtgaagctcgaagaacagtacctagtattgtttacatgcctcacattggggattggtgggaagctgtcagtgaaactgtgagagcaacttttctgacattgctacaagatataccatcattttcacctatatttttattgtctacctctgaaaccatgtacagtgaactgcctgaagaggttaaatgtatctttagaatacagtatgaagaggtcttgtatattcaaaggcctattgaagaagacagaagaaaattttttcaagaattgattctcaatcaggcatcaatggctccaccacgaaggaaacatgctgctctttgtgctatggaagtgcttcctcttgcactaccttctccacctcgtcaattatcagaatcagaaaaaagtcgaatggaggaccaggaggaaaatactttaagagagttgcggttgtttctcagggatgtaaccaagaggctggccacagataaacgctttaacatcttcagcaaaccggtggatattgaagaggtttcagattatcttgaagtaatcaaggaaccaatggacttatcaacagtaataactaaaattgataaacataattacctgactgcaaaggatttcctgaaagatattgacctcatctgtagcaatgctttagagtataatccagataaggacccaggagataaaataattaggcacagggcttgtaccctgaaggacactgcacatgctatcattgcagctgaattagatccagaatttaataaactttgtgaggaaattaaggaagcaagaataaaaagaggcttatcagtaacatcagaacaaataaatcctcatagtactggagctcggaagacagaaactagagtcgaagaggcatttcggcacaaacaaagaaatccaatggatgtgtggcacaactctgcaaataaatgtgcatttcgggttcggagaaaatcaaggcggagatcacagtggggtaaaggaattattaagaaaaggaaagttaataatttaaaaaaagatgaagaagacaccaaatttgcagactatgagaaccatacggaggacaggaaattattagagaatggagagtttgaggtaagcactgactgccatgaggaaaatggagaagagactggagacttatctatgaccaatgatgaatcatcctgtgacatcatggacttggaccaggggcagaggcttaacaatggagcaggcacaaaagagaactttgcatctactgaggaggaaagttcaaatgaatctctactggtcaacagcagcagttccttaaacccggagcagacctccaggaaagagactttccttaaaggaaattgtctaaatggtgaggcttccactgacagttttgaaggaataccagttctggaatgtcagaatggcaagcttgaagtagtttctttctgtgatagtggagataaatgtagttctgaacaaaagattcttctggaggaccagtcaaaagaaaaaccagaaacttcgactgaaaatcatggagatgatcttgagaaactagaggcactggaatgtagcaataatgagaagttagaacctggctctgatgtggaggttaaagatgcagaactggataaagaaggtgcttctaaagtaaagaaataccgtaaattaattttagagcaggcaaaaacgacaagcctggaactggttccagaagagccatctgagcctgtgcctcctcttatagttgatcgtgagagattgaagaaattgcttgatttgttggtggataaaagcaacaatctggcagttgatcagcttgagagattatattctcttcttagtcagtgtatctaccgtcatcgtaaagattatgacaaatcacaacttgtagaggagatggaaagaacagttcatatgtttgagacattcctatgaacttttcaagatgagtggtttatcctctccaatctgctcctcacagagcagtcttctgagccattcaatttcaaattgcaccaattatgtgcagagccttggtgtaaagtgctctctcactcattctttctctctgttgaatttggtgctattgtctcaggtacctgaaaccaaccagcctacaagaaccaaacagaacttcagaaacatgttgtattttccacaaataaaaaatacaaccccacagcttggagattttggtgctacagaaactgctctcgcttctgctcctctttttgtgcactctcttttggagactcctctcttagggagcagaccagcaaacaggaggaaactggatgggggcagttctaactgtgttgaattgtttaaacagtgggcaacttgttatttttttttcctccattttacccctttaatcatatttttcccccatctgggtaatggactgaaacctgttttagagttggctatggtctgttctggtgggaagctgaagaaactggatgaaattaggtcaggctctttagaactgcctttaacgtgcctttttattcatttgaggaagataaggctaaaaggatgggctgtttgaagcaaataaattagaaatatttctttggtcacaaccttgaaaataagttttgatactctatgtcattaagagacaaccagtgtttgggtatgaaatgcctgtcttattctcaaagctcaatcaagacacccagtaagccacataatatactaaaatggtaagttttcttgtaaggtctgttttggtttaagaaacatgaataacaacaaagaataatacacagtccacacacaaaaaaacaaaaaacaaaactgcacacgttttggtattgccaacaatgatgactagaaaataaatagatagtggccattttttcttctgtcagtggcaatttaatagttattcatgtttgagttcccagagaaaaatggttttcatatgtagtaaattgttgttttgttttaaagccaggacttgccaaatggacagaaaagagaggaattcatcagaagctccataaaattcattttctgtatgcttaattgcaaacgagctctggtatggtccttgaataacagtattaatgtttaaatcccatctcctaagcttaccttcacaactcttctttttgattggaaaccattttgaatcttgttgagtgatttctgtgaattgtatgtatctgaaattaattatgggttactagttttacaaaaactttctacaaatttggagacacagtctaggcagttgcaatgaggcaaaggatgcagtgactttttttatcagatgatttttaaacaaaaagaaaattttgccagcaagttggcttggtatcttcattcattgtagccgttagctgcaggtgtgtctttccaatatatgcaacacatgtagtttgggttttaattagggcgaatggtcttggactactgcagagattctgagctacctcagctttttgtattttagttaccaacagtgtttacagagtcttgtaatcactttgccaccgtttacatcctgaagctaaggtacttgtctccttgtctttggctctttgtagtgtgcagaaagcatactttggccatagcctactgcagtaatccaaagtgcttctttgcatttacatttacatctaacgccttctaattctagcttaatttttttttaaatgccacgtgttttctttgtacctagtctgtgaagtttctgtaatatccagttagtcatacaagtcaagatgctacccatgtagacacactgtatttttaaggtgggcaagtgcgattaacgatgaaccattttaaaggggaggttatttgaaacctctaatttgattattgggaggattttcatgctttctttagtatttattaccatcataccgattcaaactattttattgtctaatacattagcattttgtattttgatggaaattgttacagaatttaaagatttgatgaaataagatgtagcagattttttgtagcaagtttctggtaaaagggttttttgcaagtctcaggttcttgctgcactatttttttttaaatatttattccagttattctaattcagaagcattcttttcaagtaacagcagcacttgtgaaaggaaaaaaaaatgcacatgtttcttagtaggttactaaatttgtacaattaattaagattttagccatcagtgagtttgaaaagggaaatgtatttattttcagcattaaaatgcttccaaaagatcaagttgcttttgtttgtttgtttttttaaccgtaatgtagatggagaaattggaggcaacctcagtataggaactgccactttgaacagtttaggtcttaaagagaaagtcaatctaatgccaaggggagaacaatgagctgaaattgtaccaactcctctggccctccttccctcaattaaaaaaacacacttaccagttttgcttattttacagatatctggtggttctatagtttaaagcagcttgtgaaattaaaaaagtggactcaattttgtttacctttctgtaagtttttcatttttgctgtatagcattggcaaaaatatgtacaaattgacctctgttcttatttcctattgtgagcattataaagataagctcctatgtaaaaccttgctctcagatgagtaaaatatgtatcacagcatagctcagcaataattcatgctcagctgtggggaccctgggggctttttgaagatgatggaaccgcactagggttgaaactgatggctgtggagttaattgtgttttcgagcttgaatctcacctgtgattttttttttttaatgttgtttcatgacttgatttttctcataagccaatgtatttgtaggtttactggattttatttttagggagtgggtaatttcttcccttttttgattaagttggttcagctatggtgctattcagtaggtatcttcagtgtcaggtcccgtagctgaatgccattgttattataattattatttgtaatcacattgtaagcttgaatttgggcttgtacctgcatcttttgtattctgtacatctggttacttagactttgggagtccaatttggtttcagtcatgtatgtctactttgtagtttaagtagacttcatcaactatggtctattttgggtttgtagttttaatttagaattgtgttaaattgatgttttgcatttgacttcatttgacattagttgaagtaaattatttaatttttgaattctggaatttgaacatttactgtaatttgtaatataactgctgtgaaatacttgaataaagatgacaagaaaaaca

SEQ ID NO: 109612 - DNA, 5579 bp, Homo sapiens
  Payload ID: 1526
  Gene Symbol: ATAD2B
  Gene Name: ATPase family, AAA domain containing 2B
  ENST ID: ENST00000381024
  CDS Start-End: 1-2204
gtgaagatgaaaatgctttatcaatttttgagaccaattgtcactcaggatcaccaaagaaacagtcatcatctgctgctatacataaaccctaccttcattttacaatgtcaccatatcatcagccaacctcttacaggccacgcttattgctctctggagaacggggctcaggtcaaacttctcaccttgctccagcacttttgcacactctagaaagattctctgtgcatagactagatctcccagcactttattcagttagtgccaaaacacctgaggaatcatgtgcacagatttttcgtgaagctcgaagaacagtacctagtattgtttacatgcctcacattggggattggtgggaagctgtcagtgaaactgtgagagcaacttttctgacattgctacaagatataccatcattttcacctatatttttattgtctacctctgaaaccatgtacagtgaactgcctgaagaggttaaatgtatctttagaatacagtatgaagaggtcttgtatattcaaaggcctattgaagaagacagaagaaaattttttcaagaattgattctcaatcaggcatcaatggctccaccacgaaggaaacatgctgctctttgtgctatggaagtgcttcctcttgcactaccttctccacctcgtcaattatcagaatcagaaaaaagtcgaatggaggaccaggaggaaaatactttaagagagttgcggttgtttctcagggatgtaaccaagaggctggccacagataaacgctttaacatcttcagcaaaccggtttcagattatcttgaagtaatcaaggaaccaatggacttatcaacagtaataactaaaattgataaacataattacctgactgcaaaggatttcctgaaagatattgacctcatctgtagcaatgctttagagtataatccagataaggacccaggagataaaataattaggcacagggcttgtaccctgaaggacactgcacatgctatcattgcagctgaattagatccagaatttaataaactttgtgaggaaattaaggaagcaagaataaaaagaggcttatcagtaacatcagaacaaataaatcctcatagtactggagctcggaagacagaaactagagtcgaagaggcatttcggcacaaacaaagaaatccaatggatgtgtggcacaactctgcaaataaatgtgcatttcgggttcggagaaaatcaaggcggagatcacagtggggtaaaggaattattaagaaaaggaaagttaataatttaaaaaaagatgaagaagacaccaaatttgcagactatgagaaccatacggaggacaggaaattattagagaatggagagtttgaggtaagcactgactgccatgaggaaaatggagaagagactggagacttatctatgaccaatgatgaatcatcctgtgacatcatggacttggaccaggggcagaggcttaacaatggagcaggcacaaaagagaactttgcatctactgaggaggaaagttcaaatgaatctctactggtcaacagcagcagttccttaaacccggagcagacctccaggaaagagactttccttaaaggaaattgtctaaatggtgaggcttccactgacagttttgaaggaataccagttctggaatgtcagaatggcaagcttgaagtagtttctttctgtgatagtggagataaatgtagttctgaacaaaagattcttctggaggaccagtcaaaagaaaaaccagaaacttcgactgaaaatcatggagatgatcttgagaaactagaggcactggaatgtagcaataatgagaagttagaacctggctctgatgtggaggttaaagatgcagaactggataaagaaggtgcttctaaagtaaagaaataccgtaaattaattttagagcaggcaaaaacgacaagcctggaactggttccagaagagccatctgagcctgtgcctcctcttatagttgatcgtgagagattgaagaaattgcttgatttgttggtggataaaagcaacaatctggcagttgatcagcttgagagattatattctcttcttagtcagtgtatctaccgtcatcgtaaagattatgacaaatcacaacttgtagaggagatggaaagaacagttcatatgtttgagacattcctatgaacttttcaagatgagtggtttatcctctccaatctgctcctcacagagcagtcttctgagccattcaatttcaaattgcaccaattatgtgcagagccttggtgtaaagtgctctctcactcattctttctctctgttgaatttggtgctattgtctcaggtacctgaaaccaaccagcctacaagaaccaaacagaacttcagaaacatgttgtattttccacaaataaaaaatacaaccccacagcttggagattttggtgctacagaaactgctctcgcttctgctcctctttttgtgcactctcttttggagactcctctcttagggagcagaccagcaaacaggaggaaactggatgggggcagttctaactgtgttgaattgtttaaacagtgggcaacttgttatttttttttcctccattttacccctttaatcatatttttcccccatctgggtaatggactgaaacctgttttagagttggctatggtctgttctggtgggaagctgaagaaactggatgaaattaggtcaggctctttagaactgcctttaacgtgcctttttattcatttgaggaagataaggctaaaaggatgggctgtttgaagcaaataaattagaaatatttctttggtcacaaccttgaaaataagttttgatactctatgtcattaagagacaaccagtgtttgggtatgaaatgcctgtcttattctcaaagctcaatcaagacacccagtaagccacataatatactaaaatggtaagttttcttgtaaggtctgttttggtttaagaaacatgaataacaacaaagaataatacacagtccacacacaaaaaaacaaaaaacaaaactgcacacgttttggtattgccaacaatgatgactagaaaataaatagatagtggccattttttcttctgtcagtggcaatttaatagttattcatgtttgagttcccagagaaaaatggttttcatatgtagtaaattgttgttttgttttaaagccaggacttgccaaatggacagaaaagagaggaattcatcagaagctccataaaattcattttctgtatgcttaattgcaaacgagctctggtatggtccttgaataacagtattaatgtttaaatcccatctcctaagcttaccttcacaactcttctttttgattggaaaccattttgaatcttgttgagtgatttctgtgaattgtatgtatctgaaattaattatgggttactagttttacaaaaactttctacaaatttggagacacagtctaggcagttgcaatgaggcaaaggatgcagtgactttttttatcagatgatttttaaacaaaaagaaaattttgccagcaagttggcttggtatcttcattcattgtagccgttagctgcaggtgtgtctttccaatatatgcaacacatgtagtttgggttttaattagggcgaatggtcttggactactgcagagattctgagctacctcagctttttgtattttagttaccaacagtgtttacagagtcttgtaatcactttgccaccgtttacatcctgaagctaaggtacttgtctccttgtctttggctctttgtagtgtgcagaaagcatactttggccatagcctactgcagtaatccaaagtgcttctttgcatttacatttacatctaacgccttctaattctagcttaatttttttttaaatgccacgtgttttctttgtacctagtctgtgaagtttctgtaatatccagttagtcatacaagtcaagatgctacccatgtagacacactgtatttttaaggtgggcaagtgcgattaacgatgaaccattttaaaggggaggttatttgaaacctctaatttgattattgggaggattttcatgctttctttagtatttattaccatcataccgattcaaactattttattgtctaatacattagcattttgtattttgatggaaattgttacagaatttaaagatttgatgaaataagatgtagcagattttttgtagcaagtttctggtaaaagggttttttgcaagtctcaggttcttgctgcactatttttttttaaatatttattccagttattctaattcagaagcattcttttcaagtaacagcagcacttgtgaaaggaaaaaaaaatgcacatgtttcttagtaggttactaaatttgtacaattaattaagattttagccatcagtgagtttgaaaagggaaatgtatttattttcagcattaaaatgcttccaaaagatcaagttgcttttgtttgtttgtttttttaaccgtaatgtagatggagaaattggaggcaacctcagtataggaactgccactttgaacagtttaggtcttaaagagaaagtcaatctaatgccaaggggagaacaatgagctgaaattgtaccaactcctctggccctccttccctcaattaaaaaaacacacttaccagttttgcttattttacagatatctggtggttctatagtttaaagcagcttgtgaaattaaaaaagtggactcaattttgtttacctttctgtaagtttttcatttttgctgtatagcattggcaaaaatatgtacaaattgacctctgttcttatttcctattgtgagcattataaagataagctcctatgtaaaaccttgctctcagatgagtaaaatatgtatcacagcatagctcagcaataattcatgctcagctgtggggaccctgggggctttttgaagatgatggaaccgcactagggttgaaactgatggctgtggagttaattgtgttttcgagcttgaatctcacctgtgattttttttttttaatgttgtttcatgacttgatttttctcataagccaatgtatttgtaggtttactggattttatttttagggagtgggtaatttcttcccttttttgattaagttggttcagctatggtgctattcagtaggtatcttcagtgtcaggtcccgtagctgaatgccattgttattataattattatttgtaatcacattgtaagcttgaatttgggcttgtacctgcatcttttgtattctgtacatctggttacttagactttgggagtccaatttggtttcagtcatgtatgtctactttgtagtttaagtagacttcatcaactatggtctattttgggtttgtagttttaatttagaattgtgttaaattgatgttttgcatttgacttcatttgacattagttgaagtaaattatttaatttttgaattctggaatttgaacatttactgtaatttgtaatataactgctgtgaaatacttgaataaagatgacaag

SEQ ID NO: 109613 - DNA, 554 bp, Homo sapiens
  Payload ID: 1526
  Gene Symbol: ATAD2B
  Gene Name: ATPase family, AAA domain containing 2B
  ENST ID: ENST00000458510
  CDS Start-End: 363-554
aaacgttctattttggcattgttcttcgagcagcgtgcattttggtagacactagccgtatgtggctattgagcacttaaaatgtggctagtgtaactaaagaactgcattttaaattttatttagtcttagttaatttaaaatttaaataaaatggcattatgtggctcatggcttactatattgcacagcatggatcttgaacatcgttttccacattaactttccctttctaacatttcgaggaaacagttttgtgagactgaaatctaagtcattcttctcaagcctgggtctgtggaaaggcctatgctggctgtttacctttttcccttaaatagtttttaaggtcccgagactagatgagattaccaagtcttctctcttacagagcagtcagtaaggcaagaaaacacatcttacagatccataccagggactggaatccaaaattgtcagatgcatttttaggtgaattggctgaaaaatgtgttggctactgtggagccgatatcaaggccctgtgcactgaagccgccctgattgcactgcgg

SEQ ID NO: 109614 - DNA, 1406 bp, Homo sapiens
  Payload ID: 1526
  Gene Symbol: ATAD2B
  Gene Name: ATPase family, AAA domain containing 2B
  ENST ID: ENST00000439915
  CDS Start-End: 296-1406
gagaaaggggtagaaatggcggctccgctcggctcccgctgaggagggcgaagccggcggagtgtctgtgctgccggtctgcagcaccgcccccgcttcccgcacgccgcctgctcacgccgacttcccttcctctgcccggctctctcttgtgctcgtctgcgctccgcacgctccgggccggctcgtctctcattgcccggctcggctccgctggccctgactgaccggccggcgggccggccttgctcggctctcccgggcgcggcgtggactccgtccccctggctggaccatggtgaacacccggaagagctctctccgccttctcgggtccaagtctcctggtcccgggcctgggcctggggccggagcagagcctggggcgaccggaggcagcagccatttcatctcctctcggacccgctcctccaagacccgcgccgccagctgccccgccgccaaagccgggggaagcggtggcgccggcgtcactctggatgaggccaggaaagttgaagttgatggtagtttaagtgatagccacgtatctcctccagccaaacgcactttgaaacaacctgattctgtttgcaaagacaaatcaaaatcacgaagtactggtcagcgagaggaatggaacttatcaactggacaggccaggttaacttctcagcctggtgctacattaccaaatggacatagtggcttatcccttcgaagccatccccttcgaggggaaaagaagggagatggggacctttcttgtataaatggtgacatggaagtcagaaaaagttgtcgttccaggaaaaacagatttgaaagtgtgaaccagagtttgttatttgatcaactagtaaatagcactgctgaagctgtactacaggaaatggacaacattaacatccgacggaatcgtcgatcaggagaagtagaacgacttcgaatgtggacagatacagaatttgaaaacatggatatgtattcaagagtgaaaaggcgaagaaagtcactaagaagaaatagttatgggatacaaaatcatcatgaagtttctactgagggtgaagaagaagctagaacctctaaattgcttcctttggagaaaatcagtatagaatctcaagaggaggatggagatatagaagttgaagaggcagaaggagaagaaaatgatagaccatataatttgagacagagaaaaacagtggatcgataccaagcacctccaatagtaccagctcatcaaaaaaagagggaaaacacgctgtttgatattcatagatctccagcaagaagaagccatattaggagaaagaagcatgccattcatagtagtgacacaacttcttctgatgaggaacgctttgaaagaaggaaatcaaagagcatggcaagagcaa

SEQ ID NO: 109615 - DNA, 2330 bp, Homo sapiens
  Payload ID: 1527
  Gene Symbol: ATAD3A
  Gene Name: ATPase family, AAA domain containing 3A
  ENST ID: ENST00000339113
  CDS Start-End: 1-1717
gggagccctggcccttgccgctcctcgccgctgtcggcagccacttcccgggcgagactgcgcccccggagcacccccggccggagccgtgtcgcgtgccgggaggatcggactctttccgtcacccgtttgcacctctgcagctgtcaggagcgggtcaggttatgccaaggacgccctgaatctggcacagatgcaggagcagacgctgcagttggagcaacagtccaagctcaaagagtatgaggccgccgtggagcagctcaagagcgagcagatccgggcgcaggctgaggagaggaggaagaccctgagcgaggagacccggcagcaccaggccagggcccagtatcaagacaagctggcccggcagcgctacgaggaccaactgaagcagcagcaacttctcaatgaggagaatttacggaagcaggaggagtccgtgcagaagcaggaagccatgcggcgagccaccgtggagcgggagatggagctgcggcacaagaatgagatgctgcgagtggaggccgaggcccgggcgcgcgccaaggccgagcgggagaatgcagacatcatccgcgagcagatccgcctgaaggcggccgagcaccgtcagaccgtcttggagtccatcaggacggctggcaccttgtttggggaaggattccgtgcctttgtgacagactgggacaaagtgacagccacggtggctgggctgacgctgctggctgttggggtctactcagccaagaatgccacgcttgtcgccggccgcttcatcgaggctcggctggggaagccgtccctagtgagggagacgtcccgcatcacggtgcttgaggcgctgcggcaccccatccaggtcagccggcggctcctcagtcgaccccaggacgcgctggagggtgttgtgctcagtcccagcctggaagcacgggtgcgcgacatcgccatagcaacaaggaacaccaagaagaaccgcagcctgtacaggaacatcctgatgtacgggccaccaggcaccgggaagacgctgtttgccaagaaactcgccctgcactcaggcatggactacgccatcatgacaggcggggacgtggcccccatggggcgggaaggcgtgaccgccatgcacaagctctttgactgggccaataccagccggcgcggcctcctgctctttgtggatgaagcggacgccttccttcggaagcgagccaccgagaagataagcgaggacctcagggccacactgaacgccttcctgtaccgcacgggccagcacagcaacaagttcatgctggtcctggccagcaaccaaccagagcagttcgactgggccatcaatgaccgcatcaatgagatggtccacttcgacctgccagggcaggaggaacgggagcgcctggtgagaatgtattttgacaagtatgttcttaagccggccacagaaggaaagcagcgcctgaagctggcccagtttgactacgggaggaagtgctcggaggtcgctcggctgacggagggcatgtcgggccgggagatcgctcagctggccgtgtcctggcaggccacggcgtatgcctccgaggacggggtcctgaccgaggccatgatggacacccgcgtgcaagatgctgtccagcagcaccagcagaagatgtgctggctgaaggcggaagggcctgggcgtggggacgagccctccccatcctgagtccacagggagatccacagctcacggagcctggccgcggacccctcccacccctgccttgccggcccctgcacatttaggatatgctcctgggtggggactgggctgtgcccagggcctctgtcccccaggatgtcttgtggtgcgggtcggccgttctgccccccagggcaccccctgttgtaggcactggctagggaggggcaggcctccttcctgcccctcgagacactcttgggagatgcattttccgtctggctcacagggggagggtgaggctttgcaccccagcccctgcccaggccactgtgagggtgggtgctggctgagcccccggggcagcaggagccaggcaggtgatgtctttgttctcggctcccacagcagagccaggtgagggggcgcctgccagggccagacccaggtggggcagcctgaaccctgcttccccctgtggccggcatgccccgatctttcacacactggtgaccctgagagaggagggaggagggaacctggcgggggtgtctgaggccgcactgtcagctggccggtccaagcctgtggctggagctggggtctgtttacctaataaagtcccacaggtgcctca

SEQ ID NO: 109616 - DNA, 2612 bp, Homo sapiens
  Payload ID: 1527
  Gene Symbol: ATAD3A
  Gene Name: ATPase family, AAA domain containing 3A
  Uniprot ID: Q9NVI7
  ENST ID: ENST00000378755
  CDS Start-End: 95-1999
accggctcgcggcgcgtggaggctgctcccagccgcgcgcgagtcagactcgggtgggggtcccggcggcggtagcggcggcggcggtgcgagcatgtcgtggctcttcggcattaacaagggccccaagggtgaaggcgcggggccgccgccgcctttgccgcccgcgcagcccggggccgagggcggcggggaccgcgggttgggagaccggccggcgcccaaggacaaatggagcaacttcgaccccaccggcctggagcgcgccgccaaggcggcgcgcgagctggagcactcgcgttatgccaaggacgccctgaatctggcacagatgcaggagcagacgctgcagttggagcaacagtccaagctcaaaatgcggctggaagccctgagcctgctgcacacactagtctgggcatggagtctctgccgtgccggagccgtgcagacacaggagcggctgtcaggcagtgccagccctgagcaagtgccagctggtgagtgctgtgctctgcaggagtatgaggccgccgtggagcagctcaagagcgagcagatccgggcgcaggctgaggagaggaggaagaccctgagcgaggagacccggcagcaccaggccagggcccagtatcaagacaagctggcccggcagcgctacgaggaccaactgaagcagcagcaacttctcaatgaggagaatttacggaagcaggaggagtccgtgcagaagcaggaagccatgcggcgagccaccgtggagcgggagatggagctgcggcacaagaatgagatgctgcgagtggaggccgaggcccgggcgcgcgccaaggccgagcgggagaatgcagacatcatccgcgagcagatccgcctgaaggcggccgagcaccgtcagaccgtcttggagtccatcaggacggctggcaccttgtttggggaaggattccgtgcctttgtgacagactgggacaaagtgacagccacggtggctgggctgacgctgctggctgttggggtctactcagccaagaatgccacgcttgtcgccggccgcttcatcgaggctcggctggggaagccgtccctagtgagggagacgtcccgcatcacggtgcttgaggcgctgcggcaccccatccaggtcagccggcggctcctcagtcgaccccaggacgcgctggagggtgttgtgctcagtcccagcctggaagcacgggtgcgcgacatcgccatagcaacaaggaacaccaagaagaaccgcagcctgtacaggaacatcctgatgtacgggccaccaggcaccgggaagacgctgtttgccaagaaactcgccctgcactcaggcatggactacgccatcatgacaggcggggacgtggcccccatggggcgggaaggcgtgaccgccatgcacaagctctttgactgggccaataccagccggcgcggcctcctgctctttgtggatgaagcggacgccttccttcggaagcgagccaccgagaagataagcgaggacctcagggccacactgaacgccttcctgtaccgcacgggccagcacagcaacaagttcatgctggtcctggccagcaaccaaccagagcagttcgactgggccatcaatgaccgcatcaatgagatggtccacttcgacctgccagggcaggaggaacgggagcgcctggtgagaatgtattttgacaagtatgttcttaagccggccacagaaggaaagcagcgcctgaagctggcccagtttgactacgggaggaagtgctcggaggtcgctcggctgacggagggcatgtcgggccgggagatcgctcagctggccgtgtcctggcaggccacggcgtatgcctccgaggacggggtcctgaccgaggccatgatggacacccgcgtgcaagatgctgtccagcagcaccagcagaagatgtgctggctgaaggcggaagggcctgggcgtggggacgagccctccccatcctgagtccacagggagatccacagctcacggagcctggccgcggacccctcccacccctgccttgccggcccctgcacatttaggatatgctcctgggtggggactgggctgtgcccagggcctctgtcccccaggatgtcttgtggtgcgggtcggccgttctgccccccagggcaccccctgttgtaggcactggctagggaggggcaggcctccttcctgcccctcgagacactcttgggagatgcattttccgtctggctcacagggggagggtgaggctttgcaccccagcccctgcccaggccactgtgagggtgggtgctggctgagcccccggggcagcaggagccaggcaggtgatgtctttgttctcggctcccacagcagagccaggtgagggggcgcctgccagggccagacccaggtggggcagcctgaaccctgcttccccctgtggccggcatgccccgatctttcacacactggtgaccctgagagaggagggaggagggaacctggcgggggtgtctgaggccgcactgtcagctggccggtccaagcctgtggctggagctggggtctgtttacctaataaagtcccacaggtgcctca

SEQ ID NO: 109617 - DNA, 2492 bp, Homo sapiens
  Payload ID: 1527
  Gene Symbol: ATAD3A
  Gene Name: ATPase family, AAA domain containing 3A
  Uniprot ID: Q9NVI7
  ENST ID: ENST00000378756
  CDS Start-End: 119-1879
ggcgcctgcgcagtggcggtgaccaccggctcgcggcgcgtggaggctgctcccagccgcgcgcgagtcagactcgggtgggggtcccggcggcggtagcggcggcggcggtgcgagcatgtcgtggctcttcggcattaacaagggccccaagggtgaaggcgcggggccgccgccgcctttgccgcccgcgcagcccggggccgagggcggcggggaccgcgggttgggagaccggccggcgcccaaggacaaatggagcaacttcgaccccaccggcctggagcgcgccgccaaggcggcgcgcgagctggagcactcgcgttatgccaaggacgccctgaatctggcacagatgcaggagcagacgctgcagttggagcaacagtccaagctcaaagagtatgaggccgccgtggagcagctcaagagcgagcagatccgggcgcaggctgaggagaggaggaagaccctgagcgaggagacccggcagcaccaggccagggcccagtatcaagacaagctggcccggcagcgctacgaggaccaactgaagcagcagcaacttctcaatgaggagaatttacggaagcaggaggagtccgtgcagaagcaggaagccatgcggcgagccaccgtggagcgggagatggagctgcggcacaagaatgagatgctgcgagtggaggccgaggcccgggcgcgcgccaaggccgagcgggagaatgcagacatcatccgcgagcagatccgcctgaaggcggccgagcaccgtcagaccgtcttggagtccatcaggacggctggcaccttgtttggggaaggattccgtgcctttgtgacagactgggacaaagtgacagccacggtggctgggctgacgctgctggctgttggggtctactcagccaagaatgccacgcttgtcgccggccgcttcatcgaggctcggctggggaagccgtccctagtgagggagacgtcccgcatcacggtgcttgaggcgctgcggcaccccatccaggtcagccggcggctcctcagtcgaccccaggacgcgctggagggtgttgtgctcagtcccagcctggaagcacgggtgcgcgacatcgccatagcaacaaggaacaccaagaagaaccgcagcctgtacaggaacatcctgatgtacgggccaccaggcaccgggaagacgctgtttgccaagaaactcgccctgcactcaggcatggactacgccatcatgacaggcggggacgtggcccccatggggcgggaaggcgtgaccgccatgcacaagctctttgactgggccaataccagccggcgcggcctcctgctctttgtggatgaagcggacgccttccttcggaagcgagccaccgagaagataagcgaggacctcagggccacactgaacgccttcctgtaccgcacgggccagcacagcaacaagttcatgctggtcctggccagcaaccaaccagagcagttcgactgggccatcaatgaccgcatcaatgagatggtccacttcgacctgccagggcaggaggaacgggagcgcctggtgagaatgtattttgacaagtatgttcttaagccggccacagaaggaaagcagcgcctgaagctggcccagtttgactacgggaggaagtgctcggaggtcgctcggctgacggagggcatgtcgggccgggagatcgctcagctggccgtgtcctggcaggccacggcgtatgcctccgaggacggggtcctgaccgaggccatgatggacacccgcgtgcaagatgctgtccagcagcaccagcagaagatgtgctggctgaaggcggaagggcctgggcgtggggacgagccctccccatcctgagtccacagggagatccacagctcacggagcctggccgcggacccctcccacccctgccttgccggcccctgcacatttaggatatgctcctgggtggggactgggctgtgcccagggcctctgtcccccaggatgtcttgtggtgcgggtcggccgttctgccccccagggcaccccctgttgtaggcactggctagggaggggcaggcctccttcctgcccctcgagacactcttgggagatgcattttccgtctggctcacagggggagggtgaggctttgcaccccagcccctgcccaggccactgtgagggtgggtgctggctgagcccccggggcagcaggagccaggcaggtgatgtctttgttctcggctcccacagcagagccaggtgagggggcgcctgccagggccagacccaggtggggcagcctgaaccctgcttccccctgtggccggcatgccccgatctttcacacactggtgaccctgagagaggagggaggagggaacctggcgggggtgtctgaggccgcactgtcagctggccggtccaagcctgtggctggagctggggtctgtttacctaataaagtcccacaggtgcctca

SEQ ID NO: 109618 - DNA, 603 bp, Homo sapiens
  Payload ID: 1527
  Gene Symbol: ATAD3A
  Gene Name: ATPase family, AAA domain containing 3A
  ENST ID: ENST00000400830
  CDS Start-End: 1-603
aaactcgccctgcactcaggcatggactacgccatcatgacaggcggggacgtggcccccatggggcgggaaggcgtgaccgccatgcacaagctctttgactgggccaataccagccggcgcggcctcctgctctttgtggatgaagcggacgccttccttcggaagcgagccaccgagaagataagcgaggacctcagggccacactgaacgccttcctgtaccgcacgggccagcacagcaacaaccccagtcacgtgtcacacggaggatcaagtcctgctggtcggccgtggctgactcctcaggcacgttgggctcccaggttcatgctggtcctggccagcaaccaaccagagcagttcgactgggccatcaatgaccgcatcaatgagatggtccacttcgacctgccagggcaggaggaacgggagcgcctggtgagaatgtattttgacaagtatgttcttaagccggccacagaaggaaagcagcgcctgaagctggcccagtttgactacgggaggaagtgctcggaggtcgctcggctgacggagggcatgtcgggccgggagatcgctcagctggccgtgtcctggcag

SEQ ID NO: 109619 - DNA, 2332 bp, Homo sapiens
  Payload ID: 1527
  Gene Symbol: ATAD3A
  Gene Name: ATPase family, AAA domain containing 3A
  Uniprot ID: Q9NVI7
  ENST ID: ENST00000536055
  CDS Start-End: 194-1717
gggagccctggcccttgccgctcctcgccgctgtcggcagccacttcccgggcgagactgcgcccccggagcacccccggccggagccgtgtcgcgtgccgggaggatcggactctttccgtcacccgtttgcacctctgcagctgtcaggagcgggtcaggttatgccaaggacgccctgaatctggcacagatgcaggagcagacgctgcagttggagcaacagtccaagctcaaagagtatgaggccgccgtggagcagctcaagagcgagcagatccgggcgcaggctgaggagaggaggaagaccctgagcgaggagacccggcagcaccaggccagggcccagtatcaagacaagctggcccggcagcgctacgaggaccaactgaagcagcagcaacttctcaatgaggagaatttacggaagcaggaggagtccgtgcagaagcaggaagccatgcggcgagccaccgtggagcgggagatggagctgcggcacaagaatgagatgctgcgagtggaggccgaggcccgggcgcgcgccaaggccgagcgggagaatgcagacatcatccgcgagcagatccgcctgaaggcggccgagcaccgtcagaccgtcttggagtccatcaggacggctggcaccttgtttggggaaggattccgtgcctttgtgacagactgggacaaagtgacagccacggtggctgggctgacgctgctggctgttggggtctactcagccaagaatgccacgcttgtcgccggccgcttcatcgaggctcggctggggaagccgtccctagtgagggagacgtcccgcatcacggtgcttgaggcgctgcggcaccccatccaggtcagccggcggctcctcagtcgaccccaggacgcgctggagggtgttgtgctcagtcccagcctggaagcacgggtgcgcgacatcgccatagcaacaaggaacaccaagaagaaccgcagcctgtacaggaacatcctgatgtacgggccaccaggcaccgggaagacgctgtttgccaagaaactcgccctgcactcaggcatggactacgccatcatgacaggcggggacgtggcccccatggggcgggaaggcgtgaccgccatgcacaagctctttgactgggccaataccagccggcgcggcctcctgctctttgtggatgaagcggacgccttccttcggaagcgagccaccgagaagataagcgaggacctcagggccacactgaacgccttcctgtaccgcacgggccagcacagcaacaagttcatgctggtcctggccagcaaccaaccagagcagttcgactgggccatcaatgaccgcatcaatgagatggtccacttcgacctgccagggcaggaggaacgggagcgcctggtgagaatgtattttgacaagtatgttcttaagccggccacagaaggaaagcagcgcctgaagctggcccagtttgactacgggaggaagtgctcggaggtcgctcggctgacggagggcatgtcgggccgggagatcgctcagctggccgtgtcctggcaggccacggcgtatgcctccgaggacggggtcctgaccgaggccatgatggacacccgcgtgcaagatgctgtccagcagcaccagcagaagatgtgctggctgaaggcggaagggcctgggcgtggggacgagccctccccatcctgagtccacagggagatccacagctcacggagcctggccgcggacccctcccacccctgccttgccggcccctgcacatttaggatatgctcctgggtggggactgggctgtgcccagggcctctgtcccccaggatgtcttgtggtgcgggtcggccgttctgccccccagggcaccccctgttgtaggcactggctagggaggggcaggcctccttcctgcccctcgagacactcttgggagatgcattttccgtctggctcacagggggagggtgaggctttgcaccccagcccctgcccaggccactgtgagggtgggtgctggctgagcccccggggcagcaggagccaggcaggtgatgtctttgttctcggctcccacagcagagccaggtgagggggcgcctgccagggccagacccaggtggggcagcctgaaccctgcttccccctgtggccggcatgccccgatctttcacacactggtgaccctgagagaggagggaggagggaacctggcgggggtgtctgaggccgcactgtcagctggccggtccaagcctgtggctggagctggggtctgtttacctaataaagtcccacaggtgcctcatt

SEQ ID NO: 109620 - DNA, 2448 bp, Homo sapiens
  Payload ID: 1528
  Gene Symbol: ATAD3B
  Gene Name: ATPase family, AAA domain containing 3B
  Uniprot ID: Q5T9A4
  ENST ID: ENST00000308647
  CDS Start-End: 117-2063
cgcctgcgcagtggtcctggccaccggctcgcggcgcgtggaggctgctcccagccgcgcccgagtcagactcgggtgggggtcccggcggcggtagcggcggcggcggtgcgagcatgtcgtggctcttcggcgttaacaagggccccaagggtgaaggcgcggggccgccgccgcctttgccgcccgcgcagcccggggccgagggcggcggggaccgcggtttgggagaccggccggcgcccaaggacaaatggagcaacttcgaccccaccggcctggagcgcgccgccaaggcggcgcgcgagctggagcactcgcgttacgccaaggaggccctgaatctggcgcagatgcaggagcagacgctgcagttggagcaacagtccaagctcaaagagtatgaggccgccgtggagcagctcaagagcgagcagatccgggcgcaggctgaggagaggaggaagaccctgagcgaggagacccggcagcaccaggccagggcccagtatcaagacaagctggcccggcagcgctacgaggaccaactgaagcagcagcaacttctcaatgaggagaatttacggaagcaggaggagtccgtgcagaagcaggaagccatgcggcgagccaccgtggagcgggagatggagctgcggcacaagaatgagatgctgcgagtggagaccgaggcccgggcgcgcgccaaggccgagcgggagaatgcagacatcatccgcgagcagatccgcctgaaggcgtccgagcaccgtcagaccgtcttggagtccatcaggacggctggcaccttgtttggggaaggattccgtgcctttgtgacagaccgggacaaagtgacagccacggtggctgggctgacgctgctggctgtcggggtctactcagccaagaatgcgacagccgtcactggccgcttcatcgaggctcggctggggaagccgtccctagtgagggagacgtcccgcatcacggtgctggaggcgctgcggcaccccatccaggtcagccggcggctcctcagtcgaccccaggacgtgctggagggtgttgtgcttagtcccagcctggaagcacgggtgcgcgacatcgccatagcaaccaggaacaccaagaagaaccggggcctgtacaggcacatcctgctgtatgggccaccaggcaccgggaagacgctgtttgccaagaaactcgccctgcactcaggcatggactacgccatcatgacaggcggggacgtggcccccatggggcgggaaggcgtgaccgccatgcacaagctctttgactgggccaataccagccggcgcggcctcctgctcttcatggatgaagcagacgccttccttcggaagcgagccactgaggagataagcaaggacctcagagccacactgaacgccttcctgtaccacatgggccaacacagcaacaaattcatgctggtcctggccagcaatctgcctgagcagttcgactgtgccatcaacagccgcattgacgtgatggtccacttcgacctgccgcagcaggaggagcgggagcgcctggtgagactgcattttgacaactgtgttcttaagccggccacagaaggaaaacggcgcctgaagctggcccagtttgactacgggaggaagtgctcggaggtcgctcggctgacggagggcatgtcgggccgggagatcgctcagctggccgtgtcctggcaggccacggcatatgcctccaaggacggggtcctcactgaggccatgatggacgcctgtgtgcaagatgctgtccagcagtaccgacagaagatgcgctggctgaaggcggaggggcctgggcgcggggtcgagcaccccctatccggagtccaaggcgagaccctcacctcatggagcctggccacggacccctcctacccctgccttgccggcccctgcacatttaggatatgctcctggatggggactgggctgtgcccagggcctctgtcccccaggatgtcttgtggtggcggtcggccgttctgccccccagggcaccccctgttgtaggcactggctagggaggggcaggcctccttcctgcccctcgagacactcttgggagatgcattttccgtctggctcacagggggagggtgaggctttgtaccccagcccctgcccaggccactgtgagggtgggtgctggctgagcccctggggcagaaggagtggggcaggcggggtctttgttctcggctcccacagcagagccaggtgagggggggcctgccaggactagacagaagtggggcggcctgaaccctgcttccagccatggccaggggccacggaacccggcaggggtgtctgaggccgccctgtcagctggccggtccaagcctgtggctggagctggtgtgtgtttatctaataaagtcccacaggtgcctca

SEQ ID NO: 109621 - DNA, 3859 bp, Homo sapiens
  Payload ID: 1529
  Gene Symbol: ATAD3C
  Gene Name: ATPase family, AAA domain containing 3C
  Uniprot ID: Q5T2N8
  ENST ID: ENST00000378785
  CDS Start-End: 996-2231
cttcatgattaactccccaaggtcctgcatattttctcaatgggccaccgcgcccggccagaagatttttatggtaaaattttgtgatgggaaaactcatcccggaaaatgttgagacctgatgctgagtcctcagcagctcagagaatacgtacttctgtcccaggtcacccaaacattgacctgtgtcggttccccactaggaacaaaatgtaactgaggacgttgtcagatgcttgtcctcgtcaccctgagcttgttggctgctatctaattcttattctttcattttcttgcccgcacgttcttgatagcagatcactgacaacagccattggaagcttaggaaaagggtatgtgccgggcgcggtggctcacacctgtaatcccagcactttgggaggctgaggtgggcggatcacgaggtcaggagatcgagaccatcctggctaacacggtgaaaccgtctctactaaaactacaaaaattagccgggtgtggtggcggtcgcctgtagtcccagctactcgggaggctgaggcaggagagtgacgtgaacccgagaggtagagcttgcagtaagcagagatcatgccactgcactccagcctgggccagaatgagactccgtctcaaaaaaaaaaaaaaaaaaagcatgtgtaacgtgaaaaaatggacactttagccatcgcctgactttctgttgaattgggaaagagcctcctcccgtccacatgggatggccttcctgatgtggctctccaagaccatccctggagggcataaaacctcacaaatgcatcaggccgtgtgctggggatggggcatcgtcacgccaggtctgactaggaaggaggatggggaggcagggctgggggctttgaggtcgaggcgtggccgtggattccagaaagccccttggctggtgtgcgtgcctgcccagcggcatccgtgtatcctaacacctgccctccgtgtccctgcatctgcaggccatgtcaaaggacgccctgaatctggcgcagatgcaggagcagacgctgcagttggagcaacagtccaagctcaaacaacttgtcaatgaggatttacggaagcaggaggagtccgtgcagaagcaccatcagaccttcttggagtccatcagggcggctggcaccttgtttggggaaggattccgtgcctttgtgacagaccgggacaaagtgacagccacggtggctgggctgacgctgctggctgtcggggtctactcagccaagaatgcgacagccgtcactggccgctacatcgaggctcggctggggaagccgtccctagtgagggagacgtcccgcatcacggtgcttgaggcgctgcggcaccccatccagcaggtcagccggcggctcctcagtcgaccccaggacgtgctggagggtgttgtgcttagtcccagcctggaagcacgggtgcgcgacatcgccataatgacaaggaacatcaagaagaaccggggcctgtacaggcacatcctgctgtacgggccaccaggcaccgggaagacgctgtttgccaagaaactcgccctgcactcaggcatggactacgccatcatgacaggcggggacgtggcccccatggggcgggaaggcgtgaccgccatgcacaagctctttgactgggccaataccagccggcgcggcctcctgctctttgtggatgaagcggacgccttccttcggaagcgagccactgagaagataagcgaggacctcagggccacactgaacgccttcctgtaccgcacgggccagcacagcaacaaattcatgctgatcctggccagctgccaccccgagcagttcgactgggccatcaatgcctgcatcgacgtgatggtccacttcgacctgccagggcaggaggagcgggcgcgcctggtgagaatgtatcttaacgagtatgttcttaagccggccacagaaggaaagcggcgtctgaagctggcccagtttgactacgggaggaagtgcttagagatcgctcggctgacagagggcatgtcatgccggaagatcgcacagctggccgtgtcctggcaggccacggcgtatgcctccaaggacggggtcctgaccgaggccatgatggacgcctgcgtgcaagactttgtccagcagcaccagcagatgatgcgctggctgaagggggagaggcctgggcccgaggacgagcaaccctcatcctgagtccatggggagaccacacctcacggagcctggccgcggacccctcccacccctgcctttgcggccccgcacatttaggaaatactccccgtaataaagtcccacgggggccgcaccgctgtgtctattggctgacacggggcggggtttggggccccctaacgtccccctggggtcaaaggtgacagaaaaggcagaagctggggctttctggaggatttaaccacagaggggtgggcttcacaggaggtggctgccacggcggggccgggtgcccgtgccccatcctgaggccgtgcatacgcgggtgccccttcgcctccctcccctccgccagagctgcctgtggccagacacacggtggagggaagtgcacgcgaaacagacacagcggcttcaaatagatgccgcccctgcccgcgctttgcagctagtccctgcaaaccttgatgatggggctgggcgcggtggctcacgcctggaatctcagcgaggccaaggagagtggatcacctgaggtcgggagttccagaccagcctggccaacatggtgaaactccatctctcctaaaaaaaaaaaaaaaaaaaaaaaaaaaaaaaaaaaaattagccggccgtggtggcaagtgcctgaaatcccaggtactcaggaggctgaggcaggagaatcacttgagcccgggaagtggaggttgcactgagctgagaccatggaattgcactgcagcatgggcaacaagagtcaaactccctctaaaaaaaaaaaaaaaaaaagggccaggtggcacatgccggtggtcccagcttcttggcttggaggctgaggtaggaggatcgcctgagcatgggaggcagaggttgcagtgagccaagatcgcaccattgcactccagcctggatgatagagtgagactgtacctctaaataaccaaaaccttgattacagccatggggtgggggtgggggtcaggggcgtctgactatggctggggaactcatttggtttttctcctctcttatttttttgggtagagacagggtccctttgttgcccaggctggtctccaactcctgggctcaagcaatcctcctgcctcggcttcctaaagtgttgggattacaggcttgagccaccgtgcctggtctgttttttttttttttttggcaatagagtcttgctcgcccagggtggagtgcagtggtgtgatctcggctcactgcaacctccaccttcagggtgtcaggcctctgggcccaagctaagccatcatatctcctgtgacctgcacttatacatccagatggcctgaagcaactgaagatccacaaaataagtgaaaagagccttaactgatgacattccaccattgtgatttgtttctgccccaccctagctgatcaatgtactttgcaatctcccccacccttaagaaggttctttgtcattctccccacccttgagaatgtactttgtgagatccatcccctgcccgcaaaacattgtccctaactccaccgcctatcccaaaacctgtaagaactagtgataatcccaccaccctttgctgactctctttttgaactcagcccgcctgcacccaggtgaaataaacagccttgttgctcac

SEQ ID NO: 109622 - DNA, 525 bp, Homo sapiens
  Payload ID: 1529
  Gene Symbol: ATAD3C
  Gene Name: ATPase family, AAA domain containing 3C
  ENST ID: ENST00000475091
  CDS Start-End: 132-525
ttgtcagatgcttgtcctcgtcaccctgagcttgttggctgctatctaattcttattctttcattttcttgcccgcacgttcttgatagcagatcactgacaacagccattggaagcttaggaaaagggccatgtcaaaggacgccctgaatctggcgcagatgcaggagcagacgctgcagttggagcaacagtccaagctcaaacaacttgtcaatgaggatttacggaagcaggaggagtccgtgcagaagcaccatcagaccttcttggagtccatcagggcggctggcaccttgtttggggaaggattccgtgcctttgtgacagaccgggacaaagtgacagccacgcaggtcagccggcggctcctcagtcgaccccaggacgtgctggagggtgttgtgcttagtcccagcctggaagcacgggtgcgcgacatcgccataatgacaaggaacatcaagaagaaccggggcctgtacaggcacatcctgctgtacgggccaccaggcaccgggaaga

SEQ ID NO: 109623 - DNA, 6869 bp, Homo sapiens
  Payload ID: 1530
  Gene Symbol: ATAD5
  Gene Name: ATPase family, AAA domain containing 5
  Uniprot ID: Q96QE3
  ENST ID: ENST00000321990
  CDS Start-End: 379-5913
gcaggacggcgcgaaaacccaattgacaagaattccctccgaagctctgtggtccgatctgcggtccgcttgctttccctgcccggtcccgagcgctcagcctgaagcgccgctttcgagggcaccctgcatacactggccgcgcctcagggatctcattgcccgcgctttctcattgcctctttccgtgttcgattcggctgatctgggcccagcctccgctcccgctctctgtcggtgggcgcgggggaatccgaaacggctcagcagaatcccagcagcttgctgctactggagcgggccgcctccatggcctccaggcaggccgggctggaccgcgtgaggtcctaggagacgggattccgggaagcggggagtatggtgggggtcctggccatggcggctgcagctgctccgcctcccgtgaaggactgcgagattgagccatgcaaaaagcgaaagaaagatgatgacacatctacctgcaaaacaattacaaaatatttatcaccactagggaagactagagacagggtttttgctccaccaaaacctagtaatattctggattattttagaaagacttcacccacaaatgagaagacacaattagggaaagagtgcaagataaagtcacctgaatcagtacctgttgacagcaacaaagactgtacgacacctttggaaatgttctcaaatgtagagtttaagaagaaaagaaagagggttaatttatctcatcaactaaataatattaaaactgaaaatgaagctccaattgaaattagtagcgacgatagcaaagaagactatagtttaaataatgattttgtggaaagtagtacttctgttttacgttacaagaaacaagtagaggtacttgcagaaaacattcaagatacaaaaagtcaaccaaatactatgacctccctgcaaaattctaaaaaagtaaatcctaaacaagggaccacaaaaaatgacttcaaaaagttgagaaaaaggaaatgcagagatgtagtagatctatctgaaagcttacccttggcagaggaactaaatttgcttaaaaaagatggtaaagatactaaacagatggagaatactacaagccatgcaaactctagagataacgtaactgaagcagcccagttaaatgatagtataataactgtctcatatgaggaatttttaaaaagtcacaaggaaaataaagtggaagagataccagactctacaatgtcaatttgtgttccttctgaaactgtcgacgaaatagtcaaaagtggttatataagtgaatcagaaaactccgaaatttcccagcaggtacgctttaagacagttactgttcttgcacaggttcaccctattccgcccaaaaagacagggaaaataccccgaattttcttgaaacaaaagcaatttgaaatggaaaatagtttatctgatcctgagaatgaacagacagttcagaaaagaaaatctaatgttgttatacaggaggaagaattagaattggctgttttggaagctggaagttctgaagctgtgaaaccaaaatgcactctagaagaaagacagcaatttatgaaagcatttaggcagccagcatcagatgcacttaaaaatggagttaaaaagtcttctgataagcagaaagaccttaatgaaaaatgtctatatgaagtaggaagagatgataattctaaaaaaatcatggaaaattctggtatccaaatggtttcaaaaaatggcaatttacagttacacactgataaaggaagttttctgaaggagaaaaataaaaagctaaagaagaagaataagaaaacattagatactggggctattccaggcaaaaacagagagggaaacactcaaaagaaagaaacaacctttttcttaaaagagaaacaatatcaaaatagaatgagtttaagacaaaggaaaacagagtttttcaaaagcagcactttatttaacaatgaaagtcttgtttatgaagatatagcaaatgatgaccttctaaaggtttcctctctgtgtaacaataataaattgtcaagaaaaaccagcataccagttaaagatattaagcttacacagtctaaagctgaatctgaagccagcttgctaaatgtttccacgcccaagtcaactagaagatctggaagaattagcagcacacctactacagaaaccattagaggtattgattctgacgatgtacaagataatagtcaactaaaggcttccactcaaaaagcagccaacttatcggaaaagcacagcttatatacagcagaattaataacagtaccctttgattcagagagccctattagaatgaaattcaccagaattagtactcccaaaaaatctaagaaaaaatctaacaaaagatctgagaaatctgaagcaactgatggaggttttacttctcagattagaaaggcaagcaatacttcaaaaaacatatcaaaagcaaaacaattgattgaaaaagcaaaagctttacacatcagtaggtcaaaggtgactgaagaaatagcgatacccttaaggcgctcctctagacatcagacacttcctgaaaggaagaaattgtcagaaacagaagattctgttataataatagattcaagtcctactgctttaaagcatccagagaaaaatcagaagaaacttcagtgtttgaatgatgtgctaggaaaaaaacttaacacatccactaaaaatgtacctggaaaaatgaaagtcgctcctttatttcttgtcagaaaagcacaaaaagcagctgatcctgtccctagttttgatgaaagcagtcaagatacatctgaaaaatctcaggattgtgatgttcaatgtaaagcaaagcgtgacttcctaatgagtggtttgccagatttgttgaaacggcaaattgcaaagaaagctgctgcgctggatgtgtacaatgcagtgagtaccagtttccagagagtcgtacatgtgcaacaaaaggatgatgggtgttgtttgtggcatttgaaaccaccctcttgtcctctcttaactaaatttaaagaactgaacactaaagtaatagatctctcaaaatgtggtattgctcttggtgaattttcaacattgaattcaaagttgaaaagcggtaactctgctgctgtgttcatgaggacaaggaaggaatttactgaagaagtaagaaatcttttgcttgaggaaattaggtggtcaaatcctgaattttcattgaaaaaatattttcccttactcctaaaaaaacaaattgagcaccaagtactttcttccgagtgtcatagtaaacaagaactggaggctgatgtcagccataaagaaaccaaaaggaaactcgtagaagcagaaaattctaagtcaaaaagaaagaaaccaaatgagtattcaaaaaatctggagaagaccaataggaagtcagaagaacttagcaaaagaaacaactcttctgggataaagctagattcttccaaagattctggaactgaagacatgctttggacagaaaagtatcaacctcagactgccagtgaacttataggaaatgagttagctataaaaaagttacatagttggttgaaagactggaaaagaagagctgaattggaagaaaggcagaatctgaagggaaaaagagatgagaaacatgaagatttctcgggtggcatagactttaaaggcagttcagatgatgaagaagagagtcgtctttgcaatactgtccttataacagggccaacaggagtgggaaaaactgctgcagtgtatgcttgtgcccaggagcttggatttaagatatttgaagtgaatgcctcttcccagcgcagtggtagacaaattctatctcagttgaaggaagctactcagtcccatcaagtagacaaacaaggtgtaaactcacaaaaaccctgtttttttaatagctactacataggcaagtcaccaaaaaaaataagctcccctaagaaagttgttacatcaccaagaaaagttcctccaccatcaccaaaaagtagtggaccaaagcgagcacttcctcccaaaaccttggcaaattattttaaagtatctcccaaacctaaaaataatgaagaaataggaatgcttctggaaaataataaaggaataaaaaattcttttgaacagaaacaaattactcagactaaatctacaaatgcaactaattcaaatgtcaaagacgttggagctgaagaacccagcagaaaaaatgcaacatctcttattctttttgaggaggttgatgtaatttttgatgaagatgctgggtttttgaatgcaatcaaaacattcatggcaacaactaaacgacctgtaatccttactacaagtgacccaacatttagtttaatgtttgatggctgctttgaagaaatcaagttcagtactccttccctgctaaatgttgccagctacctacaaatgatttgcttaactgagaattttagaactgatgtaaaagactttgtaaccttgttaactgcaaatacttgtgatatcagaaaaagtatcctttacttacaattctggattagaagtggaggtggagttttagaagaacgaccattaaccctttatcgtggaaatagcagaaatgtacaactagtttgctctgaacatggccttgataacaaaatttaccctaaaaatactaaaaagaaacgtgtagaccttccaaaatgtgacagtggctgtgctgagaccttgtttggccttaagaacattttttccccatctgaagacttattttcatttttaaagcacaaaatcacaatgaaggaagaatggcataaattcatccagcttcttacagaattccaaatgcggaatgtagattttttatatagtaatcttgagtttattctaccattaccagttgataccattccagaaactaaaaacttttgtggcccatcagtaactgtggatgccagtgcagcaacaaaaagtatgaattgtcttgctaggaaacactctgaaagagaacagccattgaaaaagtcccagaaaaagaaacaaaagaaaacattggtaatattagatgatagtgatctatttgacactgacttggactttcctgatcaatctattagcctgtcctctgtatcatcttcctcaaatgcagaagaaagcaaaaccggagacgaagaaagcaaagccagagacaaaggaaacaatccagagacaaagaaatctattccttgtcctcctaaaacaactgcaggaaaaaaatgttctgcccttgtttctcattgtttaaattctctctctgagttcatggataacatgtccttcttagatgcacttttaactgatgtaagggaacaaaacaaatacggtagaaatgactttagttggacaaatggaaaggttacaagtggactttgtgatgagtttagtcttgagagtaatgatggatggacttctcaaagctctggagaattaaaggcagctgcagaagctctcagctttactaaatgttcttctgctatttcaaaagcattggaaaccttgaattcttgcaagaaattaggaagagatccaaccaacgatcttactttttatgtttcacaaaagcgcaataatgtatactttagtcagtcagcagctaatttagacaatgcttggaagaggatatcagtcattaaaagtgtattttcgagtcgatctcttctctatgtgggtaatagacaagctagtataattgaatacctgccaacccttcgaaacatctgtaagactgagaagctaaaagaacaaggaaaaagtaaaagaagattcctgcactattttgaaggaattcatcttgacattccaaaagagactgtgaatactttggcagctgacttcccttaatgttccatactaacaatgctttgtatagattatcatgtggtccttaagatacatttttatattatgtggatcttcatggaaaagtatatttctcgatgtacattttaaacaaacaatttgtatatttttttattggcgggtaaatatttaaaatatttgagttacaaattttatatatgattgtaattttttttctgaattttttgtattatctgatttagctttgttggagtattttttgtatgtgagtgaactgtttctggaaggtagagttcattaagatgaactccctatttcaagtgtttatattatatattagcttaatattcagatacattatcttggctgctaacattagtgtcactaaagttggtatacaatctcccactgctaaatttgactggctttacaaaaacaaaaacattatctggtgaattatatttttaacctaaaagttaaggatcctcatattgtacagttttttttgtgtgctttttttttttttttttgagacggaatcttgctctgtcacccaggctggagtgcagtggcctggtatcggctcagtgcaacttttgcctcccgggttcaagcgattatcctgcctcagcctcctgaatagctgggattacaggcatgtgccaccttgcccagctaatttttgtatttttagaagagacagggttttaccatgttggttaggctggtctcttaactcctgacctcaagtgatccatctgcctcggcctcccaaagtgctgggatcacaggcgtgagccacctcacctggcctatattgtacagttttgaacagtatagatgcatacctgtttacaaatgtgtatgaagatagatatttttacctcttatttgttcaatttactttttcttgtattaattagtatattgatctaattaaaggttaaagctaaaggctttatgaaatgtttaaaaaa

SEQ ID NO: 109624 - DNA, 4051 bp, Homo sapiens
  Payload ID: 1530
  Gene Symbol: ATAD5
  Gene Name: ATPase family, AAA domain containing 5
  ENST ID: ENST00000578295
  CDS Start-End: 379-4051
gcaggacggcgcgaaaacccaattgacaagaattccctccgaagctctgtggtccgatctgcggtccgcttgctttccctgcccggtcccgagcgctcagcctgaagcgccgctttcgagggcaccctgcatacactggccgcgcctcagggatctcattgcccgcgctttctcattgcctctttccgtgttcgattcggctgatctgggcccagcctccgctcccgctctctgtcggtgggcgcgggggaatccgaaacggctcagcagaatcccagcagcttgctgctactggagcgggccgcctccatggcctccaggcaggccgggctggaccgcgtgaggtcctaggagacgggattccgggaagcggggagtatggtgggggtcctggccatggcggctgcagctgctccgcctcccgtgaaggactgcgagattgagccatgcaaaaagcgaaagaaagatgatgacacatctacctgcaaaacaattacaaaatatttatcaccactagggaagactagagacagggtttttgctccaccaaaacctagtaatattctggattattttagaaagacttcacccacaaatgagaagacacaattagggaaagagtgcaagataaagtcacctgaatcagtacctgttgacagcaacaaagactgtacgacacctttggaaatgttctcaaatgtagagtttaagaagaaaagaaagagggttaatttatctcatcaactaaataatattaaaactgaaaatgaagctccaattgaaattagtagcgacgatagcaaagaagactatagtttaaataatgattttgtggaaagtagtacttctgttttacgttacaagaaacaagtagaggtacttgcagaaaacattcaagatacaaaaagtcaaccaaatactatgacctccctgcaaaattctaaaaaagtaaatcctaaacaagggaccacaaaaaatgacttcaaaaagttgagaaaaaggaaatgcagagatgtagtagatctatctgaaagcttacccttggcagaggaactaaatttgcttaaaaaagatggtaaagatactaaacagatggagaatactacaagccatgcaaactctagagataacgtaactgaagcagcccagttaaatgatagtataataactgtctcatatgaggaatttttaaaaagtcacaaggaaaataaagtggaagagataccagactctacaatgtcaatttgtgttccttctgaaactgtcgacgaaatagtcaaaagtggttatataagtgaatcagaaaactccgaaatttcccagcaggtacgctttaagacagttactgttcttgcacaggttcaccctattccgcccaaaaagacagggaaaataccccgaattttcttgaaacaaaagcaatttgaaatggaaaatagtttatctgatcctgagaatgaacagacagttcagaaaagaaaatctaatgttgttatacaggaggaagaattagaattggctgttttggaagctggaagttctgaagctgtgaaaccaaaatgcactctagaagaaagacagcaatttatgaaagcatttaggcagccagcatcagatgcacttaaaaatggagttaaaaagtcttctgataagcagaaagaccttaatgaaaaatgtctatatgaagtaggaagagatgataattctaaaaaaatcatggaaaattctggtatccaaatggtttcaaaaaatggcaatttacagttacacactgataaaggaagttttctgaaggagaaaaataaaaagctaaagaagaagaataagaaaacattagatactggggctattccaggcaaaaacagagagggaaacactcaaaagaaagaaacaacctttttcttaaaagagaaacaatatcaaaatagaatgagtttaagacaaaggaaaacagagtttttcaaaagcagcactttatttaacaatgaaagtcttgtttatgaagatatagcaaatgatgaccttctaaaggtttcctctctgtgtaacaataataaattgtcaagaaaaaccagcataccagttaaagatattaagcttacacagtctaaagctgaatctgaagccagcttgctaaatgtttccacgcccaagtcaactagaagatctggaagaattagcagcacacctactacagaaaccattagaggtattgattctgacgatgtacaagataatagtcaactaaaggcttccactcaaaaagcagccaacttatcggaaaagcacagcttatatacagcagaattaataacagtaccctttgattcagagagccctattagaatgaaattcaccagaattagtactcccaaaaaatctaagaaaaaatctaacaaaagatctgagaaatctgaagcaactgatggaggttttacttctcagattagaaaggcaagcaatacttcaaaaaacatatcaaaagcaaaacaattgattgaaaaagcaaaagctttacacatcagtaggtcaaaggtgactgaagaaatagcgatacccttaaggcgctcctctagacatcagacacttcctgaaaggaagaaattgtcagaaacagaagattctgttataataatagattcaagtcctactgctttaaagcatccagagaaaaatcagaagaaacttcagtgtttgaatgatgtgctaggaaaaaaacttaacacatccactaaaaatgtacctggaaaaatgaaagtcgctcctttatttcttgtcagaaaagcacaaaaagcagctgatcctgtccctagttttgatgaaagcagtcaagatacatctgaaaaatctcaggattgtgatgttcaatgtaaagcaaagcgtgacttcctaatgagtggtttgccagatttgttgaaacggcaaattgcaaagaaagctgctgcgctggatgtgtacaatgcagtgagtaccagtttccagagagtcgtacatgtgcaacaaaaggatgatgggtgttgtttgtggcatttgaaaccaccctcttgtcctctcttaactaaatttaaagaactgaacactaaagtaatagatctctcaaaatgtggtattgctcttggtgaattttcaacattgaattcaaagttgaaaagcggtaactctgctgctgtgttcatgaggacaaggaaggaatttactgaagaagtaagaaatcttttgcttgaggaaattaggtggtcaaatcctgaattttcattgaaaaaatattttcccttactcctaaaaaaacaaattgagcaccaagtactttcttccgagtgtcatagtaaacaagaactggaggctgatgtcagccataaagaaaccaaaaggaaactcgtagaagcagaaaattctaagtcaaaaagaaagaaaccaaatgagtattcaaaaaatctggagaagaccaataggaagtcagaagaacttagcaaaagaaacaactcttctgggataaagctagattcttccaaagattctggaactgaagacatgctttggacagaaaagtatcaacctcagactgccagtgaacttataggaaatgagttagctataaaaaagttacatagttggttgaaagactggaaaagaagagctgaattggaagaaaggcagaatctgaagggaaaaagagatgagaaacatgaagatttctcgggtggcatagactttaaaggcagttcagatgatgaagaagagagtcgtctttgcaatactgtccttataacagggccaacaggagtgggaaaaactgctgcagtgtatgcttgtgcccaggagcttggatttaagatatttgaagtgaatgcctcttcccagcgcagtggtagacaaattctatctcagttgaaggaagctactcagtcccatcaagtagacaaacaaggtgtaaactcacaaaaaccctgtttttttaatagctactacataggcaagtcaccaaaaaaaataagctcccctaagaaagttgttacatcaccaagaaaagttcctccaccatcaccaaaaa

SEQ ID NO: 109625 - DNA, 494 bp, Homo sapiens
  Payload ID: 1531
  Gene Symbol: ATPIF1
  Gene Name: ATPase inhibitory factor 1
  Uniprot ID: Q9UII2
  ENST ID: ENST00000335514
  CDS Start-End: 52-372
cgagagactgcttgctgcggcagagacgccagaggtgcagctccagcagcaatggcagtgacggcgttggcggcgcggacgtggcttggcgtgtggggcgtgaggaccatgcaagcccgaggcttcggctcggatcagtccgagaatgtcgaccggggcgcgggctccatccgggaagccggtggggccttcggaaagagagagcaggctgaagaggaacgatatttccgagcacagagtagagaacaactggcagctttgaaaaaacaccatgaagaagaaatcgttcatcataagaaggagattgagcgtctgcagaaagaaattgagcgccataagcagaagatcaaaatgctaaaacatgatgattaagtgcacaccgtgtgccatagaatggcacatgtcattgcccacttctgtgtagacatggttctggtttaactaatatttgtctgtgtgctactaacagattataataaattgtcatcagtgaa

SEQ ID NO: 109626 - DNA, 539 bp, Homo sapiens
  Payload ID: 1531
  Gene Symbol: ATPIF1
  Gene Name: ATPase inhibitory factor 1
  ENST ID: ENST00000468425
  CDS Start-End: 43-270
gcttgctgcggcagagacgccagaggtgcagctccagcagcaatggcagtgacggcgttggcggcgcggacgtggcttggcgtgtggggcgtgaggaccatgcaagcccgaggcttcggctcggatcagtccgagaatgtcgaccggggcgcgggctccatccgggaagccggtggggccttcggaaagagagagcaggctgaagaggaacgatatttccgagcacttggagctaccttctgtttctttgctgtagaagccgttgtgtgaacaaatccgtttatttctctcatcagtctcctttgatagacatttgggtcacgtccggttttacgcttttacaatacatcagtgaacagcagtaatacgagctcaagacagaaggcctgaaaaacattgaaaaacacagagacggaaaaaaaaaaaccacagagggggaaatataatttcgggttatttcagtttcacctttacactttgttatattccacattttttgcaataaatataaatttggaagtaaaagcataaaacgaaaa

SEQ ID NO: 109627 - DNA, 599 bp, Homo sapiens
  Payload ID: 1531
  Gene Symbol: ATPIF1
  Gene Name: ATPase inhibitory factor 1
  Uniprot ID: Q9UII2
  ENST ID: ENST00000497986
  CDS Start-End: 76-291
gccgtccctgccattagcgcgtaacgagagactgcttgctgcggcagagacgccagaggtgcagctccagcagcaatggcagtgacggcgttggcggcgcggacgtggcttggcgtgtggggcgtgaggaccatgcaagcccgaggcttcggctcggatcagtccgagaatgtcgaccggggcgcgggctccatccgggaagccggtggggccttcggaaagagagagcaggctgaagaggaacgatatttccgacattacaggttatgctttgagatctctttggggtgaaggattgaaattaaaccctgagccaccgtgtccttgtagagcacagagtagagaacaactggcagctttgaaaaaacaccatgaagaagaaatcgttcatcataagaaggagattgagcgtctgcagaaagaaattgagcgccataagcagaagatcaaaatgctaaaacatgatgattaagtgcacaccgtgtgccatagaatggcacatgtcattgcccacttctgtgtagacatggttctggtttaactaatatttgtctgtgtgctactaacagattataataaattgtcatcagtgaactgtg

SEQ ID NO: 109628 - DNA, 1855 bp, Homo sapiens
  Payload ID: 1531
  Gene Symbol: ATPIF1
  Gene Name: ATPase inhibitory factor 1
  Uniprot ID: Q9UII2
  ENST ID: ENST00000465645
  CDS Start-End: 31-213
agagacgccagaggtgcagctccagcagcaatggcagtgacggcgttggcggcgcggacgtggcttggcgtgtggggcgtgaggaccatgcaagcccgaggcttcggctcggatcagtccgagaatgtcgaccggggcgcgggctccatccgggaagccggtggggccttcggaaagagagagcaggctgaagaggaacgatatttccggtgaggctcaccgggtcccaagtccagccctggatctcccaatggccttccaatccttaaactgccaatcgccccacccgttcctacctggtgccttgggcgccccatcccccaacagaactcccgggccccaatccagtataccctaacccttgatgtcccgaccgttgccacgtatagggcactcccagttacctgcacaacagtttcaggcccccaaaccgtttccaccggcgggtctccaaaacaacccacggctcaactcctcctttatcattaccatctcccgcgtggagttctcctcaggtcgtgcgaaacacccccagattcttcgcacagtgtctagatccgaccgcccaacgtttgcctcccagcctgactccctcggcccttacccacctgtcaccccctctacgctctccttcctcgccagcacgccttagctttgcaagcctgcatgcattcaggcttctcaggtgtttctagacccccgactccgcaagagtgaggatgatgggagctggtcatgggagctacttatggttggacaccatcttctaaaggcttttgccctactcagcccaacctagacctgtagatttccctctcctgcttaggagtatggagtgggctgggcctccctttgccagccttgagttatctttaactgacttctgtccactctggagagcagtgaggaattaatcttgcttttgcttgtcctttggcctttcacttctgccttctgttgagaattatcaccatgacacctgccataccgtatagagagccaaggtacagccgttagagactatctaattgagcccctacattttgtagttaaggaaaactgaggcctaaatgtgaccaaaccaacattgtaatccagtcccttcttggaacctaaattgaactgccaagtactgcgcatgcaagagaccctttattggccttacagtgggccattcatttctataggcaaagaaagctctagacagattggaataggaaatggatatttgccttttagctacacccctttgtctgtcttcctcattttgttcctttttttttccctaaaggggagtcaagttccctgggttgttcccctcataaggtattagggacttgtgtcacatctctctggagttttctattttaaagaggaatctgaaagcaataagctctttggtcttcttaagatggctacacctcaatttaagatggggtattctttcactagttgaggagtagaagaggatgaccagctagactcccatggaattggaactcctattccttgcttagacattacaggttatgctttgagatctctttggggtgaaggattgaaattaaaccctgagccaccgtgtccttgtagagcacagagtagagaacaactggcagctttgaaaaaacaccatgaagaagaaatcgttcatcataagaaggagattgagcgtctgcagaaagaaattgagcgccataagcagaagatcaaaatgctaaaacatgatgattaagtgcacaccgtgtgccatagaatggcacatgtcattgcccacttctgtgtagacatggttctggtttaactaatatttgtctgtgtgctactaacagattataataaattgtcatcagtg

SEQ ID NO: 109629 - DNA, 3483 bp, Homo sapiens
  Payload ID: 1532
  Gene Symbol: ATP13A1
  Gene Name: ATPase type 13A1
  Uniprot ID: Q9HD20
  ENST ID: ENST00000291503
  CDS Start-End: 1-3261
atggagaagtgggaggagctgaacagccatcagccaggagaggagtacgaccccagcaaagcgacctttgtgaaggtggtgccaacccccaacaatggctccacggagctcgtggccctgcaccgcaatgagggcgaagacgggcttgaggtgctgtccttcgaattccagaagatcaagtattcctacgatgccctggagaagaagcagtttctccccgtggcctttcctgtgggaaacgccttctcatactatcagagcaacagaggcttccaggaagactcagagatccgagcagctgagaagaaatttgggagcaacaaggccgagatggtggtgcctgacttctcggagcttttcaaggagagagccacagcccccttctttgtatttcaggtgttctgtgtggggctctggtgcctggatgagtactggtactacagcgtctttacgctatccatgctggtggcgttcgaggcctcgctggtgcagcagcagatgcggaacatgtcggagatccggaagatgggcaacaagccccacatgatccaggtctaccgaagccgcaagtggaggcccattgccagtgatgagatcgtaccaggggacatcgtctccatcggccgctccccacaggagaacctggtgccatgtgacgtgcttctgctgcgaggccgctgcatcgtagacgaggccatgctcacgggggagtccgtgccacagatgaaggagcccatcgaagacctcagcccagaccgggtgctggacctccaggctgattcccggctgcacgtcatcttcgggggcaccaaggtggtgcagcacatccccccacagaaagccaccacgggcctgaagccggttgacagcgggtgcgtggcctacgtcctgcggaccggattcaacacatcccagggcaagctgctgcgcaccatcctcttcggggtcaagagggtgactgcgaacaacctggagaccttcatcttcatcctcttcctcctggtgtttgccatcgctgcagctgcctatgtatggattgaaggtaccaaggaccccagccggaaccgctacaagctgtttctggagtgcaccctgatcctcacctcggtcgtgcctcctgagctgcccatcgagctgtccctggccgtcaacacctccctcatcgccctggccaagctctacatgtactgcacagagcccttccggatcccctttgctggcaaggtcgaggtgtgctgctttgacaagacggggacgttgaccagtgacagcctggtggtgcgcggtgtggccgggctgagagacgggaaggaggtgaccccagtgtccagcatccctgtagaaacacaccgggccctggcctcgtgccactcgctcatgcagctggacgacggcaccctcgtgggtgaccctctagagaaggccatgctgacggccgtggactggacgctgaccaaagatgagaaagtattcccccgaagtattaaaactcaggggctgaaaattcaccagcgctttcattttgccagtgccctgaagcgaatgtccgtgcttgcctcgtatgagaagctgggctccaccgacctctgctacatcgcggccgtgaagggggcccccgaaactctgcactccatgttctcccagtgcccgcccgactaccaccacatccacaccgagatctcccgggaaggagcccgcgtcctggcgctggggtacaaggagctgggacacctcactcaccagcaggcccgggaggtcaagcgggaggccctggagtgcagcctcaagttcgtcggcttcattgtggtctcctgcccgctcaaggctgactccaaggccgtgatccgggagatccagaatgcgtcccaccgggtggtcatgatcacgggagacaacccgctcactgcatgccacgtggcccaggagctgcacttcattgaaaaggcccacacgctgatcctgcagcctccctccgagaaaggccggcagtgcgagtggcgctccattgacggcagcatcgtgctgcccctggcccggggctccccaaaggcactggccctggagtacgcactgtgcctcacaggcgacggcttggcccacctgcaggccaccgacccccagcagctgctccgcctcatcccccatgtgcaggtgttcgcccgtgtggctcccaagcagaaggagtttgtcatcaccagcctgaaggagctgggctacgtgaccctcatgtgtggggatggcaccaacgacgtgggcgccctgaagcatgctgacgtgggtgtggcgctcttggccaatgcccctgagcgggttgtcgagcggcgacggcggccccgggacagcccaaccctgagcaacagtggcatcagagccacctccaggacagccaagcagcggtcggggctccctccctccgaggagcagccaacctcccagagggaccgcctgagccaggtgctgcgagacctcgaggacgagagtacgcccattgtgaaactgggggatgccagcatcgcagcacccttcacctccaagctctcatccatccagtgcatctgccacgtgatcaagcagggccgctgcacgctggtgaccacgctacagatgttcaagatcctggcgctcaatgccctcatcctggcctacagccagagcgtcctctacctggagggagtcaagttcagtgacttccaggccaccctacaggggctgctgctggccggctgcttcctcttcatctcccgttccaagcccctcaagaccctctcccgagaacggcccctgcccaacatcttcaacctgtacaccatcctcaccgtcatgctccagttctttgtgcacttcctgagccttgtctacctgtaccgtgaggcccaggcccggagccccgagaagcaggagcagttcgtggacttgtacaaggagtttgagccaagcctggtcaacagcaccgtctacatcatggccatggccatgcagatggccaccttcgccatcaattacaaaggcccgcccttcatggagagcctgcccgagaacaagcccctggtgtggagtctggcagtttcactcctggccatcattggcctgctcctcggctcctcgcccgacttcaacagccagtttggcctcgtggacatccctgtggagttcaagctggtcattgcccaggtcctgctcctggacttctgcctggcgctcctggccgaccgcgtcctgcagttcttcctggggaccccgaagctgaaagtgccttcctgagatggcagtgctggtacccactgcccaccctggctgccgctgggcgggaaccccaacagggccccgggagggaaccctgcccccaaccccccacagcaaggctgtacagtctcgcccttggaagactgagctgggacccccacagccatccgctggcttggccagcagaaccagccccaagccagcacctttggtaaataaagcagcatctgagattttaaa

SEQ ID NO: 109630 - DNA, 3861 bp, Homo sapiens
  Payload ID: 1532
  Gene Symbol: ATP13A1
  Gene Name: ATPase type 13A1
  Uniprot ID: Q9HD20
  ENST ID: ENST00000357324
  CDS Start-End: 28-3642
ccggaagtgagcgcggcgctaggaaagatggcggcagcggcggcggtgggcaacgcggtgccctgcggggcccggccttgcggggtccggcctgacgggcagcccaagcccgggccgcagccgcgcgcgctccttgccgccgggccggcgctcatagcgaacggtgacgagctggtggctgccgtgtggccgtaccggcggttggcgctgttgcggcgcctcacggtgctgccattcgccgggctgctttacccggcctggttgggtgccgcagccgctggctgctggggctggggcagcagttgggtgcagatccccgaagctgcgctgctcgtgcttgccaccatctgcctcgcgcacgcgctcactgtcctctcggggcattggtctgtgcacgcgcattgcgcgctcacctgcaccccggagtacgaccccagcaaagcgacctttgtgaaggtggtgccaacccccaacaatggctccacggagctcgtggccctgcaccgcaatgagggcgaagacgggcttgaggtgctgtccttcgaattccagaagatcaagtattcctacgatgccctggagaagaagcagtttctccccgtggcctttcctgtgggaaacgccttctcatactatcagagcaacagaggcttccaggaagactcagagatccgagcagctgagaagaaatttgggagcaacaaggccgagatggtggtgcctgacttctcggagcttttcaaggagagagccacagcccccttctttgtatttcaggtgttctgtgtggggctctggtgcctggatgagtactggtactacagcgtctttacgctatccatgctggtggcgttcgaggcctcgctggtgcagcagcagatgcggaacatgtcggagatccggaagatgggcaacaagccccacatgatccaggtctaccgaagccgcaagtggaggcccattgccagtgatgagatcgtaccaggggacatcgtctccatcggccgctccccacaggagaacctggtgccatgtgacgtgcttctgctgcgaggccgctgcatcgtagacgaggccatgctcacgggggagtccgtgccacagatgaaggagcccatcgaagacctcagcccagaccgggtgctggacctccaggctgattcccggctgcacgtcatcttcgggggcaccaaggtggtgcagcacatccccccacagaaagccaccacgggcctgaagccggttgacagcgggtgcgtggcctacgtcctgcggaccggattcaacacatcccagggcaagctgctgcgcaccatcctcttcggggtcaagagggtgactgcgaacaacctggagaccttcatcttcatcctcttcctcctggtgtttgccatcgctgcagctgcctatgtatggattgaaggtaccaaggaccccagccggaaccgctacaagctgtttctggagtgcaccctgatcctcacctcggtcgtgcctcctgagctgcccatcgagctgtccctggccgtcaacacctccctcatcgccctggccaagctctacatgtactgcacagagcccttccggatcccctttgctggcaaggtcgaggtgtgctgctttgacaagacggggacgttgaccagtgacagcctggtggtgcgcggtgtggccgggctgagagacgggaaggaggtgaccccagtgtccagcatccctgtagaaacacaccgggccctggcctcgtgccactcgctcatgcagctggacgacggcaccctcgtgggtgaccctctagagaaggccatgctgacggccgtggactggacgctgaccaaagatgagaaagtattcccccgaagtattaaaactcaggggctgaaaattcaccagcgctttcattttgccagtgccctgaagcgaatgtccgtgcttgcctcgtatgagaagctgggctccaccgacctctgctacatcgcggccgtgaagggggcccccgaaactctgcactccatgttctcccagtgcccgcccgactaccaccacatccacaccgagatctcccgggaaggagcccgcgtcctggcgctggggtacaaggagctgggacacctcactcaccagcaggcccgggaggtcaagcgggaggccctggagtgcagcctcaagttcgtcggcttcattgtggtctcctgcccgctcaaggctgactccaaggccgtgatccgggagatccagaatgcgtcccaccgggtggtcatgatcacgggagacaacccgctcactgcatgccacgtggcccaggagctgcacttcattgaaaaggcccacacgctgatcctgcagcctccctccgagaaaggccggcagtgcgagtggcgctccattgacggcagcatcgtgctgcccctggcccggggctccccaaaggcactggccctggagtacgcactgtgcctcacaggcgacggcttggcccacctgcaggccaccgacccccagcagctgctccgcctcatcccccatgtgcaggtgttcgcccgtgtggctcccaagcagaaggagtttgtcatcaccagcctgaaggagctgggctacgtgaccctcatgtgtggggatggcaccaacgacgtgggcgccctgaagcatgctgacgtgggtgtggcgctcttggccaatgcccctgagcgggttgtcgagcggcgacggcggccccgggacagcccaaccctgagcaacagtggcatcagagccacctccaggacagccaagcagcggtcggggctccctccctccgaggagcagccaacctcccagagggaccgcctgagccaggtgctgcgagacctcgaggacgagagtacgcccattgtgaaactgggggatgccagcatcgcagcacccttcacctccaagctctcatccatccagtgcatctgccacgtgatcaagcagggccgctgcacgctggtgaccacgctacagatgttcaagatcctggcgctcaatgccctcatcctggcctacagccagagcgtcctctacctggagggagtcaagttcagtgacttccaggccaccctacaggggctgctgctggccggctgcttcctcttcatctcccgttccaagcccctcaagaccctctcccgagaacggcccctgcccaacatcttcaacctgtacaccatcctcaccgtcatgctccagttctttgtgcacttcctgagccttgtctacctgtaccgtgaggcccaggcccggagccccgagaagcaggagcagttcgtggacttgtacaaggagtttgagccaagcctggtcaacagcaccgtctacatcatggccatggccatgcagatggccaccttcgccatcaattacaaaggcccgcccttcatggagagcctgcccgagaacaagcccctggtgtggagtctggcagtttcactcctggccatcattggcctgctcctcggctcctcgcccgacttcaacagccagtttggcctcgtggacatccctgtggagttcaagctggtcattgcccaggtcctgctcctggacttctgcctggcgctcctggccgaccgcgtcctgcagttcttcctggggaccccgaagctgaaagtgccttcctgagatggcagtgctggtacccactgcccaccctggctgccgctgggcgggaaccccaacagggccccgggagggaaccctgcccccaaccccccacagcaaggctgtacagtctcgcccttggaagactgagctgggacccccacagccatccgctggcttggccagcagaaccagccccaagccagcacctttggtaaataaagcagcatctgagatttt

SEQ ID NO: 109631 - DNA, 554 bp, Homo sapiens
  Payload ID: 1532
  Gene Symbol: ATP13A1
  Gene Name: ATPase type 13A1
  ENST ID: ENST00000455627
  CDS Start-End: 1-554
gagcctcgccgtgggtcccagctgcggccttcctgtcggtcaccatcgcgacctgggccactcatctgcctggcctggattcccaggggcaccctctacactttggcgcaggcttaatcatgaccccactgctgacttgctgtgcatgcctggagtacgaccccagcaaagcgacctttgtgaaggtggtgccaacccccaacaatggctccacggagctcgtggccctgcaccgcaatgagggcgaagacgggcttgaggtgctgtccttcgaattccagaagatcaagtattcctacgatgccctggagaagaagcagtttctccccgtggcctttcctgtgggaaacgccttctcatactatcagagcaacagaggcttccaggaagactcagagatccgagcagctgagaagaaatttgggagcaacaaggccgagatggtggtgcctgacttctcggagcttttcaaggagagagccacagcccccttctttgtatttcaggtgttctgtgtggggctctggtgcctggatgagtactggtactacagc

SEQ ID NO: 109632 - DNA, 3840 bp, Homo sapiens
  Payload ID: 1533
  Gene Symbol: ATP13A2
  Gene Name: ATPase type 13A2
  Uniprot ID: Q9NQ11
  ENST ID: ENST00000326735
  CDS Start-End: 35-3577
gcgccggggccggcgatgagcgcgaggagccggcatgagcgcagacagcagccctctcgtgggcagcacgcccaccggttatgggaccctgacgatagggacatcaatagatcccctcagctcctcagtttcatccgtgaggctcagcggctactgtggcagtccatggagggtcatcggctatcacgtcgtggtctggatgatggctgggatccctttgctgctcttccgttggaagcccctgtggggggtgcggctgcggctccggccctgcaacctggcccacgccgaaacactcgttatcgaaataagagacaaagaggatagttcctggcagctcttcactgtccaggtgcagactgaggccatcggcgagggcagcctggagccgtccccacagtcccaggcagaggatggccggagccaggcggcagttggggcggtaccagagggtgcctggaaggatacggcccagctccacaagagcgaggaggcggtgagtgtcggacagaagcgggtgctgcggtattacctcttccagggccagcgctatatctggatcgagacccagcaagccttctaccaggtcagcctcctggaccatggccgctcttgtgacgacgtccaccgctcccgccatggcctcagcctccaggaccaaatggtgaggaaggccatttacggccccaacgtgatcagcataccggtcaagtcctacccccagctgctggtggacgaggcactgaacccctactatgggttccaggccttcagcatcgcgctgtggctggctgaccactactactggtacgccctgtgcatcttcctcatttcctccatctccatctgcctgtcgctgtacaagaccagaaagcaaagccagactctaagggacatggtcaagttgtccatgcgggtgtgcgtgtgccggccagggggagaggaagagtgggtggactccagtgagctagtgcccggagactgcctggtgctgccccaggagggtgggctgatgccctgtgatgccgccctggtggccggcgagtgcatggtgaatgagagctctctgacaggagagagcattccagtgctgaagacggcactgccggaggggctggggccctactgtgcagagacacaccggcggcacacactcttctgcgggaccctcatcttgcaggcccgggcctatgtgggaccgcacgtcctggcagtggtgacccgcacagggttctgcacggcaaaagggggcctggtgagctccatcttgcacccccggcccatcaacttcaagttctataaacacagcatgaagtttgtggctgccctctctgtcctggctctcctcggcaccatctacagcatcttcatcctctaccgaaaccgggtgcctctgaatgagattgtaatccgggctctcgacctggtgaccgtggtggtgccacctgccctgcctgctgccatgactgtgtgcacgctctacgcccagagccgactgcggagacagggcattttctgcatccacccactgcgcatcaacctggggggcaagctgcagctggtgtgtttcgacaagacgggcaccctcactgaggacggcttagacgtgatgggggtggtgcccctgaaggggcaggcattcctgcccctggtcccagagcctcgccgcctgcctgtggggcccctgctccgagcactggccacctgccatgccctcagccggctccaggacacccccgtgggcgaccccatggacttgaagatggtggagtctactggctgggtcctggaggaagagccggctgcagactcagcatttgggacccaggtcttggcagtgatgagacccccactttgggagccccagctgcaggcaatggaggagcccccggtgccagtcagcgtcctccaccgcttccccttctcttcggctctgcagcgcatgagtgtggtggtggcgtggccaggggccactcagcccgaggcctacgtcaaaggctccccggagctggtggcagggctctgcaaccccgagacagtgcccaccgacttcgcccagatgctgcagagctatacagctgctggctaccgtgtcgtggccctggccagcaagccactgcccactgtgcccagcctggaggcagcccagcaactgacgagggacactgtggaaggagacctgagcctcctggggctgctggtcatgaggaacctactgaagccgcagacaacgccagttatccaggctctgcgaaggacccgcatccgcgccgtcatggtgacaggggacaacctgcagacagcggtgactgtggcccggggctgtggcatggtggccccccaggagcatctgatcatcgtccacgccacccaccctgagcggggtcagcctgcctctctcgagttcctgccgatggagtcccccacagccgtgaatggcgttaaggatcctgaccaggctgcaagctacaccgtggagccagacccccgatccaggcacctggccctcagcgggcccacctttggtatcattgtgaagcacttccccaagctgctgcccaaggtcctggtccagggcactgtctttgcccgcatggcccctgagcagaagacagagctggtgtgcgagctacagaagcttcagtactgcgtgggcatgtgcggagacggcgccaatgactgtggggccctgaaggcggctgatgtcggcatctcgctgtcccaggcagaagcctcagtggtctcacccttcacctcgagcatggccagtattgagtgcgtgcccatggtcatcagggaggggcgctgttcccttgacacttcgttcagcgtcttcaagtacatggctctgtacagcctgacccagttcatctccgtcctgatcctctacacgatcaacaccaacctgggtgacctgcagttcctggccatcgacctggtcatcaccaccacagtggcagtgctcatgagccgcacggggccagcgctggtcctgggacgggtgcggccaccgggggcgctgctcagcgtgcccgtgctcagcagcctgctgctgcagatggtcctggtgaccggcgtgcagctagggggctacttcctgaccctggcccagccatggttcgtgcctctgaacaggacagtggccgcaccagacaacctgcccaactacgagaacaccgtggtcttctctctgtccagcttccagtacctcatcctggctgcagccgtgtccaagggggcgcccttccgccggccgctctacaccaatgtgcccttcctggtggccctggcgctcctgagctccgtcctggtgggccttgtcctggtccccggcctcctgcaggggccgctggcgctgaggaacatcactgacaccggcttcaagctgctgctgctgggtctggtcaccctcaacttcgtgggggccttcatgctggagagcgtgctagaccagtgcctccccgcctgcctgcgccgcctccggcccaagcgggcctccaagaagcgcttcaagcagctggaacgagagctggccgagcagccctggccgccgctgcccgccggccccctgaggtagtgcaggcccacgggcaccccagacactggaactccctgcctctgagccaccaactggacccctctccagcaacaccaccgccaccacctcccacatccctgaggttggcgactgtctacactcctcccccgagaccacccccaccctggggaagcgttgactactgtcccctaccttggaccatcccgcgtaggggtggcagcccccagctcccctcagtgctgctgtcagtgtagcaaataaagtcatgatattttcctggc

SEQ ID NO: 109633 - DNA, 3681 bp, Homo sapiens
  Payload ID: 1533
  Gene Symbol: ATP13A2
  Gene Name: ATPase type 13A2
  Uniprot ID: Q9NQ11
  ENST ID: ENST00000341676
  CDS Start-End: 178-3654
cgccgagcctggtggcccaggtgccccgcccgcgtcagccctgctccagccccgcgctagcccagcgcccctcgccccgggccgtccggaccgcgcccccgcccagggccttgcgcacgccggggcccaggccgagggccgcagcgccggggccggcgatgagcgcgaggagccggcatgagcgcagacagcagccctctcgtgggcagcacgcccaccggttatgggaccctgacgatagggacatcaatagatcccctcagctcctcagtttcatccgtgaggctcagcggctactgtggcagtccatggagggtcatcggctatcacgtcgtggtctggatgatggctgggatccctttgctgctcttccgttggaagcccctgtggggggtgcggctgcggctccggccctgcaacctggcccacgccgaaacactcgttatcgaaataagagacaaagaggatagttcctggcagctcttcactgtccaggtgcagactgaggccatcggcgagggcagcctggagccgtccccacagtcccaggcagaggatggccggagccaggcggcagttggggcggtaccagagggtgcctggaaggatacggcccagctccacaagagcgaggaggcgaagcgggtgctgcggtattacctcttccagggccagcgctatatctggatcgagacccagcaagccttctaccaggtcagcctcctggaccatggccgctcttgtgacgacgtccaccgctcccgccatggcctcagcctccaggaccaaatggtgaggaaggccatttacggccccaacgtgatcagcataccggtcaagtcctacccccagctgctggtggacgaggcactgaacccctactatgggttccaggccttcagcatcgcgctgtggctggctgaccactactactggtacgccctgtgcatcttcctcatttcctccatctccatctgcctgtcgctgtacaagaccagaaagcaaagccagactctaagggacatggtcaagttgtccatgcgggtgtgcgtgtgccggccagggggagaggaagagtgggtggactccagtgagctagtgcccggagactgcctggtgctgccccaggagggtgggctgatgccctgtgatgccgccctggtggccggcgagtgcatggtgaatgagagctctctgacaggagagagcattccagtgctgaagacggcactgccggaggggctggggccctactgtgcagagacacaccggcggcacacactcttctgcgggaccctcatcttgcaggcccgggcctatgtgggaccgcacgtcctggcagtggtgacccgcacagggttctgcacggcaaaagggggcctggtgagctccatcttgcacccccggcccatcaacttcaagttctataaacacagcatgaagtttgtggctgccctctctgtcctggctctcctcggcaccatctacagcatcttcatcctctaccgaaaccgggtgcctctgaatgagattgtaatccgggctctcgacctggtgaccgtggtggtgccacctgccctgcctgctgccatgactgtgtgcacgctctacgcccagagccgactgcggagacagggcattttctgcatccacccactgcgcatcaacctggggggcaagctgcagctggtgtgtttcgacaagacgggcaccctcactgaggacggcttagacgtgatgggggtggtgcccctgaaggggcaggcattcctgcccctggtcccagagcctcgccgcctgcctgtggggcccctgctccgagcactggccacctgccatgccctcagccggctccaggacacccccgtgggcgaccccatggacttgaagatggtggagtctactggctgggtcctggaggaagagccggctgcagactcagcatttgggacccaggtcttggcagtgatgagacccccactttgggagccccagctgcaggcaatggaggagcccccggtgccagtcagcgtcctccaccgcttccccttctcttcggctctgcagcgcatgagtgtggtggtggcgtggccaggggccactcagcccgaggcctacgtcaaaggctccccggagctggtggcagggctctgcaaccccgagacagtgcccaccgacttcgcccagatgctgcagagctatacagctgctggctaccgtgtcgtggccctggccagcaagccactgcccactgtgcccagcctggaggcagcccagcaactgacgagggacactgtggaaggagacctgagcctcctggggctgctggtcatgaggaacctactgaagccgcagacaacgccagttatccaggctctgcgaaggacccgcatccgcgccgtcatggtgacaggggacaacctgcagacagcggtgactgtggcccggggctgtggcatggtggccccccaggagcatctgatcatcgtccacgccacccaccctgagcggggtcagcctgcctctctcgagttcctgccgatggagtcccccacagccgtgaatggcgttaaggtcctggtccagggcactgtctttgcccgcatggcccctgagcagaagacagagctggtgtgcgagctacagaagcttcagtactgcgtgggcatgtgcggagacggcgccaatgactgtggggccctgaaggcggctgatgtcggcatctcgctgtcccaggcagaagcctcagtggtctcacccttcacctcgagcatggccagtattgagtgcgtgcccatggtcatcagggaggggcgctgttcccttgacacttcgttcagcgtcttcaagtacatggctctgtacagcctgacccagttcatctccgtcctgatcctctacacgatcaacaccaacctgggtgacctgcagttcctggccatcgacctggtcatcaccaccacagtggcagtgctcatgagccgcacggggccagcgctggtcctgggacgggtgcggccaccgggggcgctgctcagcgtgcccgtgctcagcagcctgctgctgcagatggtcctggtgaccggcgtgcagctagggggctacttcctgaccctggcccagccatggttcgtgcctctgaacaggacagtggccgcaccagacaacctgcccaactacgagaacaccgtggtcttctctctgtccagcttccagtacctcatcctggctgcagccgtgtccaagggggcgcccttccgccggccgctctacaccaatgagcgtgctagaccagtgcctccccgcctgcctgcgccgcctccggcccaagcgggcctccaagaagcgcttcaagcagctggaacgagagctggccgagcagccctggccgccgctgcccgccggccccctgaggtagtgcaggcccacgggcaccccagacactggaactccctgcctctgagccaccaactggacccctctccagcaacaccaccgccaccacctcccacatccctgaggttggcgactgtctacactcctcccccgagaccacccccaccctggggaagcgttgactactgtcccctaccttggaccatcccgcgtaggggtggcagcccccagctcccctcagtgctgctgtcagtgtagcaaataaagtcatgatattttcctggc

SEQ ID NO: 109634 - DNA, 3981 bp, Homo sapiens
  Payload ID: 1533
  Gene Symbol: ATP13A2
  Gene Name: ATPase type 13A2
  Uniprot ID: Q9NQ11
  ENST ID: ENST00000452699
  CDS Start-End: 191-3718
agtgtcggagccgcgccgagcctggtggcccaggtgccccgcccgcgtcagccctgctccagccccgcgctagcccagcgcccctcgccccgggccgtccggaccgcgcccccgcccagggccttgcgcacgccggggcccaggccgagggccgcagcgccggggccggcgatgagcgcgaggagccggcatgagcgcagacagcagccctctcgtgggcagcacgcccaccggttatgggaccctgacgatagggacatcaatagatcccctcagctcctcagtttcatccgtgaggctcagcggctactgtggcagtccatggagggtcatcggctatcacgtcgtggtctggatgatggctgggatccctttgctgctcttccgttggaagcccctgtggggggtgcggctgcggctccggccctgcaacctggcccacgccgaaacactcgttatcgaaataagagacaaagaggatagttcctggcagctcttcactgtccaggtgcagactgaggccatcggcgagggcagcctggagccgtccccacagtcccaggcagaggatggccggagccaggcggcagttggggcggtaccagagggtgcctggaaggatacggcccagctccacaagagcgaggaggcgaagcgggtgctgcggtattacctcttccagggccagcgctatatctggatcgagacccagcaagccttctaccaggtcagcctcctggaccatggccgctcttgtgacgacgtccaccgctcccgccatggcctcagcctccaggaccaaatggtgaggaaggccatttacggccccaacgtgatcagcataccggtcaagtcctacccccagctgctggtggacgaggcactgaacccctactatgggttccaggccttcagcatcgcgctgtggctggctgaccactactactggtacgccctgtgcatcttcctcatttcctccatctccatctgcctgtcgctgtacaagaccagaaagcaaagccagactctaagggacatggtcaagttgtccatgcgggtgtgcgtgtgccggccagggggagaggaagagtgggtggactccagtgagctagtgcccggagactgcctggtgctgccccaggagggtgggctgatgccctgtgatgccgccctggtggccggcgagtgcatggtgaatgagagctctctgacaggagagagcattccagtgctgaagacggcactgccggaggggctggggccctactgtgcagagacacaccggcggcacacactcttctgcgggaccctcatcttgcaggcccgggcctatgtgggaccgcacgtcctggcagtggtgacccgcacagggttctgcacggcaaaagggggcctggtgagctccatcttgcacccccggcccatcaacttcaagttctataaacacagcatgaagtttgtggctgccctctctgtcctggctctcctcggcaccatctacagcatcttcatcctctaccgaaaccgggtgcctctgaatgagattgtaatccgggctctcgacctggtgaccgtggtggtgccacctgccctgcctgctgccatgactgtgtgcacgctctacgcccagagccgactgcggagacagggcattttctgcatccacccactgcgcatcaacctggggggcaagctgcagctggtgtgtttcgacaagacgggcaccctcactgaggacggcttagacgtgatgggggtggtgcccctgaaggggcaggcattcctgcccctggtcccagagcctcgccgcctgcctgtggggcccctgctccgagcactggccacctgccatgccctcagccggctccaggacacccccgtgggcgaccccatggacttgaagatggtggagtctactggctgggtcctggaggaagagccggctgcagactcagcatttgggacccaggtcttggcagtgatgagacccccactttgggagccccagctgcaggcaatggaggagcccccggtgccagtcagcgtcctccaccgcttccccttctcttcggctctgcagcgcatgagtgtggtggtggcgtggccaggggccactcagcccgaggcctacgtcaaaggctccccggagctggtggcagggctctgcaaccccgagacagtgcccaccgacttcgcccagatgctgcagagctatacagctgctggctaccgtgtcgtggccctggccagcaagccactgcccactgtgcccagcctggaggcagcccagcaactgacgagggacactgtggaaggagacctgagcctcctggggctgctggtcatgaggaacctactgaagccgcagacaacgccagttatccaggctctgcgaaggacccgcatccgcgccgtcatggtgacaggggacaacctgcagacagcggtgactgtggcccggggctgtggcatggtggccccccaggagcatctgatcatcgtccacgccacccaccctgagcggggtcagcctgcctctctcgagttcctgccgatggagtcccccacagccgtgaatggcgttaaggatcctgaccaggctgcaagctacaccgtggagccagacccccgatccaggcacctggccctcagcgggcccacctttggtatcattgtgaagcacttccccaagctgctgcccaaggtcctggtccagggcactgtctttgcccgcatggcccctgagcagaagacagagctggtgtgcgagctacagaagcttcagtactgcgtgggcatgtgcggagacggcgccaatgactgtggggccctgaaggcggctgatgtcggcatctcgctgtcccaggcagaagcctcagtggtctcacccttcacctcgagcatggccagtattgagtgcgtgcccatggtcatcagggaggggcgctgttcccttgacacttcgttcagcgtcttcaagtacatggctctgtacagcctgacccagttcatctccgtcctgatcctctacacgatcaacaccaacctgggtgacctgcagttcctggccatcgacctggtcatcaccaccacagtggcagtgctcatgagccgcacggggccagcgctggtcctgggacgggtgcggccaccgggggcgctgctcagcgtgcccgtgctcagcagcctgctgctgcagatggtcctggtgaccggcgtgcagctagggggctacttcctgaccctggcccagccatggttcgtgcctctgaacaggacagtggccgcaccagacaacctgcccaactacgagaacaccgtggtcttctctctgtccagcttccagtacctcatcctggctgcagccgtgtccaagggggcgcccttccgccggccgctctacaccaatgtgcccttcctggtggccctggcgctcctgagctccgtcctggtgggccttgtcctggtccccggcctcctgcaggggccgctggcgctgaggaacatcactgacaccggcttcaagctgctgctgctgggtctggtcaccctcaacttcgtgggggccttcatgctggagagcgtgctagaccagtgcctccccgcctgcctgcgccgcctccggcccaagcgggcctccaagaagcgcttcaagcagctggaacgagagctggccgagcagccctggccgccgctgcccgccggccccctgaggtagtgcaggcccacgggcaccccagacactggaactccctgcctctgagccaccaactggacccctctccagcaacaccaccgccaccacctcccacatccctgaggttggcgactgtctacactcctcccccgagaccacccccaccctggggaagcgttgactactgtcccctaccttggaccatcccgcgtaggggtggcagcccccagctcccctcagtgctgctgtcagtgtagcaaataaagtcatgatattttcctggc

SEQ ID NO: 109635 - DNA, 774 bp, Homo sapiens
  Payload ID: 1533
  Gene Symbol: ATP13A2
  Gene Name: ATPase type 13A2
  ENST ID: ENST00000503552
  CDS Start-End: 1-774
tacagcatcttcatcctctaccgaaaccgggtgcctctgaatgagattgtaatccgggctctcgacctggtgaccgtggtggtgccacctgccctgcctgctgccatgactgtgtgcacgctctacgcccagagccgactgcggagacagggcattttctgcatccacccactgcgcatcaacctggggggcaagctgcagctggtgtgtttcgacaaggtcctggaggaagagccggctgcagactcagcatttgggacccaggtcttggcagtgatgagacccccactttgggagccccagctgcaggcaatgcgcatgagtgtggtggtggcgtggccaggggccactcagcccgaggcctacgtcaaaggctccccggagctggtggcagggctctgcaaccccgagacagtgcccaccgacttcgcccagatgctgcagagctatacagctgctggctaccgtgtcgtggccctggccagcaagccactgcccactgtgcccagcctggaggcagcccagcaactgacgagggacactgtggaaggagacctgagcctcctggggctgctggtcatgaggaacctactgaagccgcagacaacgccagttatccaggctctgcgaaggacccgcatccgcgccgtcatggtgacaggggacaacctgcagacagcggtgactgtggcccggggctgtggcatggtggccccccaggagcatctgatcatcgtccacgccacccaccctgagcggggtcagcctgcctct

SEQ ID NO: 109636 - DNA, 562 bp, Homo sapiens
  Payload ID: 1533
  Gene Symbol: ATP13A2
  Gene Name: ATPase type 13A2
  ENST ID: ENST00000508222
  CDS Start-End: 1-562
tatcgaaataagagacaaagaggatagttcctggcagctcttcactgtccaggtgcagactgaggccatcggcgagggcagcctggagccgtccccacagtcccaggcagaggatggccggagccaggcggcagttggggcggtaccagagggtgcctggaaggatacggcccagctccacaagagcgaggaggcgaagcgggtgctgcggtattacctcttccagggccagcgctatatctggatcgagacccagcaagccttctaccaggtcagcctcctggaccatggccgctcttgtgacgacgtccaccgctcccgccatggcctcagcctccaggaccaaatggtgaggaaggccatttacggccccaacgtgatcagcataccggtcaagtcctacccccagctgctggtggacgaggccttcagcatcgcgctgtggctggctgaccactactactggtacgccctgtgcatcttcctcatttcctccatctccatctgcctgtcgctgtacaagaccagaaagcaaagccagactctaagggacatggtcaag

SEQ ID NO: 109637 - DNA, 570 bp, Homo sapiens
  Payload ID: 1533
  Gene Symbol: ATP13A2
  Gene Name: ATPase type 13A2
  ENST ID: ENST00000509619
  CDS Start-End: 1-570
cgtgggcagcacgcccaccggttatgggaccctgacgatagggacatcaatagatcccctcagctcctcagtttcatccgtgaggctcagcggctactgtggcagtccatggagggtcatcggctatcacgtcgtggtctggatgatggctgggatccctttgctgctcttccgttggaagcccctgtggggggtgcggctgcggctccggccctgcaacctggcccacgccgaaacactcgttatcgaaataagagacaaagaggatagttcctggcagctcttcactgtccaggtgcagactgaggccatcggcgagggcagcctggagccgtccccacagtcccaggcagaggatggccggagccaggcggcagttggggcggtaccagagggtgcctggaaggatacggcccagctccacaagagcgaggaggcgcgggtgctgcggtattacctcttccagggccagcgctatatctggatcgagacccagcaagccttctaccaggtcagcctcctggaccatggccgctcttgtgacgacgtccaccgctcccgccatggcct

SEQ ID NO: 109638 - DNA, 1201 bp, Homo sapiens
  Payload ID: 1533
  Gene Symbol: ATP13A2
  Gene Name: ATPase type 13A2
  ENST ID: ENST00000502418
  CDS Start-End: 1-1197
gatcctgaccaggctgcaagctacaccgtggagccagacccccgatccaggcacctggccctcagcgggcccacctttggtatcattgtgaagcacttccccaagctgctgcccaaggtcctggtccagggcactgtctttgcccgcatggcccctgagcagaagacagagctggtgtgcgagctacagaagcttcagtactgcgtgggcatgtgcggagacggcgccaatgactgtggggccctgaaggcggctgatgtcggcatctcgctgtcccaggcagaagcctcagtggtctcacccttcacctcgagcatggccagtattgagtgcgtgcccatggtcatcagggaggggcgctgttcccttgacacttcgttcagcgtcttcaagtacatggctctgtacagcctgacccagttcatctccgtcctgatcctctacacgatcaacaccaacctgggtgacctgcagttcctggccatcgacctggtcatcaccaccacagtggcagtgctcatgagccgcacggggccagcgctggtcctgggacgggtgcggccaccgggggcgctgctcagcgtgcccgtgctcagcagcctgctgctgcagatggtcctggtgaccggcgtgcagctagggggctacttcctgaccctggcccagccatggttcgtgcctctgaacaggacagtggccgcaccagacaacctgcccaactacgagaacaccgtggtcttctctctgtccagcttccagtacctcatcctggctgcagccgtgtccaagggggcgcccttccgccggccgctctacaccaatgagcgtgctagaccagtgcctccccgcctgcctgcgccgcctccggcccaagcgggcctccaagaagcgcttcaagcagctggaacgagagctggccgagcagccctggccgccgctgcccgccggccccctgaggtagtgcaggcccacgggcaccccagacactggaactccctgcctctgagccaccaactggacccctctccagcaacaccaccgccaccacctcccacatccctgaggttggcgactgtctacactcctcccccgagaccacccccaccctggggaagcgttgactactgtcccctaccttggaccatcccgcgtaggggtggcagcccccagctcccctcagtgctgctgtcagtgtagcaaa

SEQ ID NO: 109639 - DNA, 962 bp, Homo sapiens
  Payload ID: 1533
  Gene Symbol: ATP13A2
  Gene Name: ATPase type 13A2
  ENST ID: ENST00000510069
  CDS Start-End: 1-962
agatcccctcagctcctcagtttcatccgtgaggctcagcggctactgtggcagtccatggagggtcatcggctatcacgtcgtggtctggatgatggctgggatccctttgctgctcttccgttggaagcccctgtggggggtgcggctgcggctccggccctgcaacctggcccacgccgaaacactcgttatcgaaataagagacaaagaggatagttcctggcagctcttcactgtccaggtgcagactgaggccatcggcgagggcagcctggagccgtccccacagtcccaggcagaggatggccggagccaggcggcagttggggcggtaccagagggtgcctggaaggatacggcccagctccacaagagcgaggaggcggtgagtgtcggacagcgggtgctgcggtattacctcttccagggccagcgctatatctggatcgagacccagcaagccttctaccaggtcagcctcctggaccatggccgctcttgtgacgacgtccaccgctcccgccatggcctcagcctccaggaccaaatggtgaggaaggccatttacggccccaacgtgatcagcataccggtcaagtcctacccccagctgctggtggacgaggcactgaacccctactatgggttccaggccttcagcatcgcgctgtggctggctgaccactactactggtacgccctgtgcatcttcctcatttcctccatctccatctgcctgtcgctgtacaagaccagaaagcaaagccagactctaagggacatggtcaagttgtccatgcgggtgtgcgtgtgccggccagggggagaggaagagtgggtggactccagtgagctagtgcccggagactgcctggtgctgccccaggagggtgggctgatgccctgtgatgccgccctggtggccggcgagtgcatggtgaatgagagctctctgacag

SEQ ID NO: 109640 - DNA, 573 bp, Homo sapiens
  Payload ID: 1533
  Gene Symbol: ATP13A2
  Gene Name: ATPase type 13A2
  ENST ID: ENST00000506174
  CDS Start-End: 1-573
caaagccagactctaagggacatggtcaagttgtccatgcgggtgtgcgtgtgccggccagggggagaggaagagtgggtggactccagtgagctagtgcccggagactgcctggtgctgccccaggagggtgggctgatgccctgtgatgccgccctggtggccggcgagtgcatggtgaatgagagctctctgacaggagagagcattccagtgctgaagacggcactgccggaggggctggggccctactgtgcagagacacaccggcggcacacactcttctgcgggaccctcatcttgcaggcccgggcctatgtgggaccgcacgtcctggcagtggtgacccgcacagggggcctggtgagctccatcttgcacccccggcccatcaacttcaagttctataaacacagcatgaagtttgtggctgccctctctgtcctggctctcctcggcaccatctacagcatcttcatcctctaccgaaaccgggtgcctctgaatgagattgtaatccgggctctcgacctggtgaccgtggtggtgccacctgccctgcctgctgccatg

SEQ ID NO: 109641 - DNA, 569 bp, Homo sapiens
  Payload ID: 1533
  Gene Symbol: ATP13A2
  Gene Name: ATPase type 13A2
  ENST ID: ENST00000511957
  CDS Start-End: 1-569
gatagttcctggcagctcttcactgtccaggtgcagactgaggccatcggcgagggcagcctggagccgtccccacagtcccaggcagaggatggccggagccaggcggcagttggggcggtaccagagggtgcctggaaggatacggcccagctccacaagagcgaggaggcggtgagtgtcggacagaagcgggtgctgcggtattacctcttccagggccagcgctatatctggatcgagacccagcaagccttctaccaggtcagcctcctggaccatggccgctcttgtgacgacgtccaccgctcccgccatggcctcagcctccaggaccaaatggtgaggaaggccatttacggccccaacgtgatcagcataccggtcaagtcctacccccagctgctggtggacgaggccttcagcatcgcgctgtggctggctgaccactactactggtacgccctgtgcatcttcctcatttcctccatctccatctgcctgtcgctgtacaagaccagaaagcaaagccagactctaagggacatggtcaagttgtccatgcgggt

SEQ ID NO: 109642 - DNA, 1723 bp, Homo sapiens
  Payload ID: 1533
  Gene Symbol: ATP13A2
  Gene Name: ATPase type 13A2
  ENST ID: ENST00000617114
  CDS Start-End: 1037-1723
agtgtcggagccgcgccgagcctggtggcccaggtgccccgcccgcgtcagccctgctccagccccgcgctagcccagcgcccctcgccccgggccgtccggaccgcgcccccgcccagggccttgcgcacgccggggcccaggccgagggccgcagcgccggggccggcgatgagcgcgaggagccggcatgagcgcagacagcagccctctcgtgggcagcacgcccaccggttatgggaccctgacgatagggacatcaatagatcccctcagctcctcagtttcatccgtgaggctcagcggctactgtggcagtccatggagggtcatcggctatcacgtcgtggtctggatgatggctgggatccctttgctgctcttccgttggaagcccctgtggggggtgcggctgcggctccggccctgcaacctggcccacgccgaaacactcgttatcgaaataagagacaaagaggatagttcctggcagctcttcactgtccaggtgcagactgaggccatcggcgagggcagcctggagccgtccccacagtcccaggcagaggatggccggagccaggcggcagttggggcggtaccagagggtgcctggaaggatacggcccagctccacaagagcgaggaggcgaagcgggtgctgcggtattacctcttccagggccagcgctatatctggatcgagacccagcaagccttctaccaggtcagcctcctggaccatggccgctcttgtgacgacgtccaccgctcccgccatggcctcagcctccaggaccaaatggtgaggaaggccatttacggccccaacgtgatcagcataccggtcaagtcctacccccagctgctggtggacgaggcactgaacccctactatgggttccaggccttcagcatcgcgctgtggctggctgaccactactactggtacgccctgtgcatcttcctcatttcctccatctccatctgcctgtcgctgtacaagaccagaaagcaaagccagactctaagggacatggtcaagttgtccatgcgggtgtgcgtgtgccggccagggggagaggaagagtgggtggactccagtgagctagtgcccggagactgcctggtgctgccccaggagggtgggctgatgccctgtgatgccgccctggtggccggcgagtgcatggtgaatgagagctctctgacaggagagagcattccagtgctgaagacggcactgccggaggggctggggccctactgtgcagagacacaccggcggcacacactcttctgcgggaccctcatcttgcaggcccgggcctatgtgggaccgcacgtcctggcagtggtgacccgcacagctctcctcggcaccatctacagcatcttcatcctctaccgaaaccgggtgcctctgaatgagattgtaatccgggctctcgacctggtgaccgtggtggtgccacctgccctgcctgctgccatgactgtgtgcacgctctacgcccagagccgactgcggagacagggcattttctgcatccacccactgcgcatcaacctggggggcaagctgcagctggtgtgtttcgacaaggtggggccgcaggtggggttggtgcaggggagcgggacagccacaggcgccccagtgaggcctccacacccgcgttattctctcagcagcacccacaggatgccaggtcctgtctag

SEQ ID NO: 109643 - DNA, 7322 bp, Homo sapiens
  Payload ID: 1534
  Gene Symbol: ATP13A3
  Gene Name: ATPase type 13A3
  Uniprot ID: Q9H7F0
  ENST ID: ENST00000256031
  CDS Start-End: 403-4083
tttattcaaataataggagctctacgagtgacagatggcagaagggcacatcttctgaaaacttactaaaaattggtgaattacaaaattctaaattttaataccttaatcattttgaaagcagttcagacagaaccgaaacagaaatatttggcataaaattccaaatttttatgcttagttttatttttattattaaaagccagcttttgaaagctgtgcaaatatcaggaattgggaagaatgatgatatagtgctactggtaagaaaaatttcttcaatttgttttctctgatatcgaatttgacttggttaaaaaacgtgtgctccagcagtccagaaaagttatatttcttgatcttccattgtttgaagcactggacctttaatccactgtaggtatggacagggaagaaaggaagaccatcaatcagggtcaagaagatgaaatggagatttatggttacaatttgagtcgctggaagcttgccatagtttctttaggagtgatttgctctggtgggtttctcctcctcctcctctattggatgcctgagtggcgggtgaaagcgacctgtgtcagagctgcaattaaagactgtgaagtagtgctgctgaggactactgatgaattcaaaatgtggttttgtgcaaaaattcgcgttctttctttggaaacttacccagtttcaagtccaaaatctatgtctaataagctttcaaatggccatgcagtttgtttaattgagaatcccactgaagaaaataggcacaggatcagtaaatattcacagactgaatcacaacagattcgttatttcacccaccatagtgtaaaatatttctggaatgataccattcacaattttgatttcttaaagggactggatgaaggtgtttcttgtacgtcaatttatgaaaagcatagtgcaggactgacaaaggggatgcatgcctacagaaaactgctttatggagtaaatgaaattgctgtaaaagtgccttctgtttttaagcttctaattaaagaggttctcaacccattttacattttccagctgttcagtgttatactgtggagcactgatgaatactattactatgctctagctattgtggttatgtccatagtatcaatcgtaagctcactatattccattagaaagcaatatgttatgttgcatgacatggtggcaactcatagtaccgtaagagtttcagtttgtagagtaaatgaagaaatagaagaaatcttttctaccgaccttgtgccaggagatgtcatggtcattccattaaatgggacaataatgccttgtgatgctgtgcttattaatggtacctgcattgtaaacgaaagcatgttaacaggagaaagtgttccagtgacaaagactaatttgccaaatccttcagtggatgtgaaaggaataggagatgaattatataatccagaaacacataaacgacatactttgttttgtgggacaactgttattcagactcgtttctacactggagaactcgtcaaagccatagttgttagaacaggatttagtacttccaaaggacagcttgttcgttccatattgtatcccaaaccaactgattttaaactctacagagatgcctacttgtttctactatgtcttgtggcagttgctggcattgggtttatctacactattattaatagcattttaaatgaggtacaagttggggtcataattatcgagtctcttgatattatcacaattactgtgccccctgcacttcctgctgcaatgactgctggtattgtgtatgctcagagaagactgaaaaaaatcggtattttctgtatcagtcctcaaagaataaatatttgtggacagctcaatcttgtttgctttgacaagactggaactctaactgaagatggtttagatctttgggggattcaacgagtggaaaatgcacgatttctttcaccagaagaaaatgtgtgcaatgagatgttggtaaaatcccagtttgttgcttgtatggctacttgtcattcacttacaaaaattgaaggagtgctctctggtgatccacttgatctgaaaatgtttgaggctattggatggattctggaagaagcaactgaagaagaaacagcacttcataatcgaattatgcccacagtggttcgtcctcccaaacaactgcttcctgaatctacccctgcaggaaaccaagaaatggagctgtttgaacttccagctacttatgagataggaattgttcgccagttcccattttcttctgctttgcaacgtatgagtgtggttgccagggtgctgggggataggaaaatggacgcctacatgaaaggagcgcccgaggccattgccggtctctgtaaacctgaaacagttcctgtcgattttcaaaacgttttggaagacttcactaaacagggcttccgtgtgattgctcttgcacacagaaaattggagtcaaaactgacatggcataaagtacagaatattagcagagatgcaattgagaacaacatggattttatgggattaattataatgcagaacaaattaaagcaagaaacccctgcagtacttgaagatttgcataaagccaacattcgcaccgtcatggtcacaggtgacagtatgttgactgctgtctctgtggccagagattgtggaatgattctacctcaggataaagtgattattgctgaagcattacctccaaaggatgggaaagttgccaaaataaattggcattatgcagactccctcacgcagtgcagtcatccatcagcaattgacccagaggctattccggttaaattggtccatgatagcttagaggatcttcaaatgactcgttatcattttgcaatgaatggaaaatcattctcagtgatactggagcattttcaagaccttgttcctaagttgatgttgcatggcaccgtgtttgcccgtatggcacctgatcagaagacacagttgatagaagcattgcaaaatgttgattattttgttgggatgtgtggtgatggcgcaaatgattgtggtgctttgaagagggcacacggaggcatttccttatcggagctcgaagcttcagtggcatctccctttacctctaagactcctagtatttcctgtgtgccaaaccttatcagggaaggccgtgctgctttaataacttccttctgtgtgtttaaattcatggcattgtacagcattatccagtacttcagtgttactctgctgtattctatcttaagtaacctaggagacttccagtttctcttcattgatctggcaatcattttggtagtggtatttacaatgagtttaaatcctgcctggaaagaacttgtggcacaaagaccaccttcgggtcttatatctggggcccttctcttctccgttttgtctcagattatcatctgcattggatttcaatctttgggttttttttgggtcaaacagcaaccttggtatgaagtgtggcatccaaaatcagatgcttgtaatacaacaggaagcgggttttggaattcttcacacgtagacaatgaaaccgaacttgatgaacataatatacaaaattatgaaaataccacagtgttttttatttccagttttcagtacctcatagtggcaattgccttttcaaaaggaaaacccttcaggcaaccttgctacaaaaattatttttttgttttttctgtgatttttttatatatttttatattattcatcatgttgtatccagttgcctctgttgaccaggttcttcagatagtgtgtgtaccatatcagtggcgtgtaactatgctcatcattgttcttgtcaatgcctttgtgtctatcacagtggaggagtcagtggatcggtggggaaaatgctgcttaccctgggccctgggctgtagaaagaagacaccaaaggcaaagtacatgtatctggcgcaggagctcttggttgatccagaatggccaccaaaacctcagacaaccacagaagctaaagctttagttaaggagaatggatcatgtcaaatcatcaccataacatagcagtgaatcagtctcagtggtattgctgatagcagtattcaggaatatgtgattttaggagtttctgatcctgtgtgtcagaatggcactagttcagtttatgtcccttctgatatagtagcttatttgacagctttgctcttccttaaaataaaaacagaaaaatatatcgtcctaacagttaaattaacaatcaatccataaagtcctatatcttcattcagcaacccaaatattacatacatttccagaattttcttgattgttactttcagtgatattctttatattgggtacaggagaagtttggtgtttggtaggtttttcaacattagtttttgagactagtttacctcttcacatttatgctcacaaccctcttgttagaaaagtctgtgtttatatacaggctgtaagtttgtgattgataaaaagaagatgagtgttaattagcctccagtgaaaatatactgaaagcctgttttcatttgattccaatgtttcttccaaagaattctgtataaacatatgccaattccctatgatggtctagagttaggaatgagtgtttatggtgttgcttatagaacaactcaggtaatctccatttctggttttatattttctgtacaaactgcctgggttttatttttctaatcagcaaggtgcttcactgccttcttgagacgcctctcaaagctcttaaatggctcctgtgctatgtgtggtgttggcagtctaatttgcttctgttaaatgttgtagaacctttttcactaggaaataagattcatttctttcggcagtagatgtagattcatcttttaacgtttcttcaaatttgtttctgtcaggctttgtgttattttaaatggttttttaaaattttcttctatgttttcaattacctaaagacataggataatagttttttttaagttagaattttacctcataaaattttttgaggtttgatgtatgtctctgtcttatcaataatgaggcttaaaaaatactggatttgaatggctgccgttttttcaaagcaatatgaatttgatgagtttgttttatgccattaggtggcgccagaggtcagaacatgtctattttgaattggatcgttacaaatgagcatatttgatgcggaaatttctgggagaaaaaaaattgaggaaataaagttaaaaaattgacattcattgagccaaaagagatgtggagaaacatttttcacctttctgtttggcctgattaacatttaaattcttgccaaaattaaggtaacttttaaaaaacaccttttataggtggatccagcagtctggcaacgcccacagttaccacaacacagaaaactgatcgtgctataaaatggacgctaaactatgaaaacagtgtgacattgttctctgttcttccagagccagtaacatgcttgctcgtgctttctacttctagctgatcattcttttcccaacatatatttacaaatttaccaaattttacctagaattttaggaccaaatggttctcactctttatgctgcaaagacctggatgatgtttggtaactatagaaaaatagaaattacactcaggatcactgttactgctattgccactgatgattcctgcaaaaatataatcgaagttttccatcaaatgtataatatgctattaatacacattagatgataacagttgttccatgaatgattctatgaagctatgcatcttagacctcttgagctgtgaattagcactattttctatagttacttattctctggatcattttataatttccatattaatttcaaatatgctcgtgttattcttcagtgatttccacaattgtgcattttattctttggtttaagtactgaagcatataatgaaagtaattgctaagtagcagcttaaaaattcaattatccgattgtatttaacatctttaagagcatgatcataaagagctatttttgacaccccccccccacttttttaacatttagagttagtaagggttttatatctcttctgtccatattgttttcaaaggaatgaggtgtttaggtggctggaaaagcatttgtaggaagttagatttgaatatagacaaggtgggttattcacgttgagaatgttatttgaagaatgcctgtgaagccaggtgtgggttctactcagtgccatagatagactgagtcttctctcgtaggttaccattacatagtaattttgattctgaatttcacattaaattatttgagtttatacagacctaaattttaaaatctgtacatatattattttgatgtattaagatgaatattgctgatttaaattttatttatgcacatacttaaaggacagaaatgtctgggaaagtaattgttaaataatgatatgtaactttttaactttttaaataaataacaagatttttaatgtgtgtctccctcagggttgtttaaagttttttttctccctcaagtataaatagtggtaactatatgttttgtatcttctagcaccaactgctgtaaagcaatgctgcaaataatgcttgaatacaagtggctaagccaacaacagaataaatacttttatagtagttttataatcctgaaattcgaaagctttcccaattgcacttgcatctaaacaaaactgttgcagtttttactctatttattttgttccccatgtttatgaaagtcctgcacagtttcaaaggcatggtaaataatatatcaatgtttatgtagtctgttacagaaacagctatagataacattatccagtgaagagcaaaattcaagctttagaaaatattcatgcatgcaattttgacatatctaaaaataggtttttgtatatttatggtgggaggtggttgggaacttttaacaaaatggggtgttaatttttgtacagtctgtgggcatttacacatttttaatgtattaaaatttggtaattatgtgtacattaaattaataaaagttacttctagttatgatttgtgaattccctaagaccttggatttttttaagtaactttatatcagaaatgatactgcatctttatatttttaaaattgtattgctgctcaagaatggtaccctcttgtcaaaaaggcatacattcataattgtacattcagcattgtaaataatcttatgaaaccttttttgattgaagctattcaaaataaaaattttaatgaatg

SEQ ID NO: 109644 - DNA, 3729 bp, Homo sapiens
  Payload ID: 1534
  Gene Symbol: ATP13A3
  Gene Name: ATPase type 13A3
  ENST ID: ENST00000429136
  CDS Start-End: 1-487
acccttcaggcaaccttgctacaaaaattatttttttgttttttctgtgatttttttatatatttttatattattcatcatgttgtatccagttgcctctgttgaccaggttcttcagatagtgtgtgtaccatatcagtggcgtgtaactatgctcatcattgttcttgtcaatgcctttgtgtctatcacagtggagaacttcttccttgacatggtcctttggaaagttgtgttcaaccgagacaaacaaggagagtatcggttcagcaccacacagccaccgcaggagtcagtggatcggtggggaaaatgctgcttaccctgggccctgggctgtagaaagaagacaccaaaggcaaagtacatgtatctggcgcaggagctcttggttgatccagaatggccaccaaaacctcagacaaccacagaagctaaagctttagttaaggagaatggatcatgtcaaatcatcaccataacatagcagtgaatcagtctcagtggtattgctgatagcagtattcaggaatatgtgattttaggagtttctgatcctgtgtgtcagaatggcactagttcagtttatgtcccttctgatatagtagcttatttgacagctttgctcttccttaaaataaaaacagaaaaatatatcgtcctaacagttaaattaacaatcaatccataaagtcctatatcttcattcagcaacccaaatattacatacatttccagaattttcttgattgttactttcagtgatattctttatattgggtacaggagaagtttggtgtttggtaggtttttcaacattagtttttgagactagtttacctcttcacatttatgctcacaaccctcttgttagaaaagtctgtgtttatatacaggctgtaagtttgtgattgataaaaagaagatgagtgttaattagcctccagtgaaaatatactgaaagcctgttttcatttgattccaatgtttcttccaaagaattctgtataaacatatgccaattccctatgatggtctagagttaggaatgagtgtttatggtgttgcttatagaacaactcaggtaatctccatttctggttttatattttctgtacaaactgcctgggttttatttttctaatcagcaaggtgcttcactgccttcttgagacgcctctcaaagctcttaaatggctcctgtgctatgtgtggtgttggcagtctaatttgcttctgttaaatgttgtagaacctttttcactaggaaataagattcatttctttcggcagtagatgtagattcatcttttaacgtttcttcaaatttgtttctgtcaggctttgtgttattttaaatggttttttaaaattttcttctatgttttcaattacctaaagacataggataatagttttttttaagttagaattttacctcataaaattttttgaggtttgatgtatgtctctgtcttatcaataatgaggcttaaaaaatactggatttgaatggctgccgttttttcaaagcaatatgaatttgatgagtttgttttatgccattaggtggcgccagaggtcagaacatgtctattttgaattggatcgttacaaatgagcatatttgatgcggaaatttctgggagaaaaaaaattgaggaaataaagttaaaaaattgacattcattgagccaaaagagatgtggagaaacatttttcacctttctgtttggcctgattaacatttaaattcttgccaaaattaaggtaacttttaaaaaacaccttttataggtggatccagcagtctggcaacgcccacagttaccacaacacagaaaactgatcgtgctataaaatggacgctaaactatgaaaacagtgtgacattgttctctgttcttccagagccagtaacatgcttgctcgtgctttctacttctagctgatcattcttttcccaacatatatttacaaatttaccaaattttacctagaattttaggaccaaatggttctcactctttatgctgcaaagacctggatgatgtttggtaactatagaaaaatagaaattacactcaggatcactgttactgctattgccactgatgattcctgcaaaaatataatcgaagttttccatcaaatgtataatatgctattaatacacattagatgataacagttgttccatgaatgattctatgaagctatgcatcttagacctcttgagctgtgaattagcactattttctatagttacttattctctggatcattttataatttccatattaatttcaaatatgctcgtgttattcttcagtgatttccacaattgtgcattttattctttggtttaagtactgaagcatataatgaaagtaattgctaagtagcagcttaaaaattcaattatccgattgtatttaacatctttaagagcatgatcataaagagctatttttgacaccccccccccacttttttaacatttagagttagtaagggttttatatctcttctgtccatattgttttcaaaggaatgaggtgtttaggtggctggaaaagcatttgtaggaagttagatttgaatatagacaaggtgggttattcacgttgagaatgttatttgaagaatgcctgtgaagccaggtgtgggttctactcagtgccatagatagactgagtcttctctcgtaggttaccattacatagtaattttgattctgaatttcacattaaattatttgagtttatacagacctaaattttaaaatctgtacatatattattttgatgtattaagatgaatattgctgatttaaattttatttatgcacatacttaaaggacagaaatgtctgggaaagtaattgttaaataatgatatgtaactttttaactttttaaataaataacaagatttttaatgtgtgtctccctcagggttgtttaaagttttttttctccctcaagtataaatagtggtaactatatgttttgtatcttctagcaccaactgctgtaaagcaatgctgcaaataatgcttgaatacaagtggctaagccaacaacagaataaatacttttatagtagttttataatcctgaaattcgaaagctttcccaattgcacttgcatctaaacaaaactgttgcagtttttactctatttattttgttccccatgtttatgaaagtcctgcacagtttcaaaggcatggtaaataatatatcaatgtttatgtagtctgttacagaaacagctatagataacattatccagtgaagagcaaaattcaagctttagaaaatattcatgcatgcaattttgacatatctaaaaataggtttttgtatatttatggtgggaggtggttgggaacttttaacaaaatggggtgttaatttttgtacagtctgtgggcatttacacatttttaatgtattaaaatttggtaattatgtgtacattaaattaataaaagttacttctagttatgatttgtgaattccctaagaccttggatttttttaagtaactttatatcagaaatgatactgcatctttatatttttaaaattgtattgctgctcaagaatggtaccctcttgtcaaaaaggcatacattcataattgtacattcagcattgtaaataatcttatgaaaccttttttgattgaagctattcaaaataaaaattttaatgaatgaaa

SEQ ID NO: 109645 - DNA, 490 bp, Homo sapiens
  Payload ID: 1534
  Gene Symbol: ATP13A3
  Gene Name: ATPase type 13A3
  ENST ID: ENST00000457986
  CDS Start-End: 183-490
gcggcggccgggtcccccgcggtccctggggctggtccggccgcgagggaggccgcggaggaggcggcgcggcggcggccagtgagcggccccgatctgacagacatccctgaatcttggtgtttggacataggagtgatcttccattgtttgaagcactggacctttaatccactgtaggtatggacagggaagaaaggaagaccatcaatcagggtcaagaagatgaaatggagatttatggttacaatttgagtcgctggaagcttgccatagtttctttaggagtgatttgctctggtgggtttctcctcctcctcctctattggatgcctgagtggcgggtgaaagcgacctgtgtcagagctgcaattaaagactgtgaagtagtgctgctgaggactactgatgaattcaaaatgtggttttgtgcaaaaattcgcgttctttctttggaaacttacccagtttcaagtccaaaatctatgtc

SEQ ID NO: 109646 - DNA, 542 bp, Homo sapiens
  Payload ID: 1534
  Gene Symbol: ATP13A3
  Gene Name: ATPase type 13A3
  ENST ID: ENST00000446356
  CDS Start-End: 403-542
tttattcaaataataggagctctacgagtgacagatggcagaagggcacatcttctgaaaacttactaaaaattggtgaattacaaaattctaaattttaataccttaatcattttgaaagcagttcagacagaaccgaaacagaaatatttggcataaaattccaaatttttatgcttagttttatttttattattaaaagccagcttttgaaagctgtgcaaatatcaggaattgggaagaatgatgatatagtgctactggtaagaaaaatttcttcaatttgttttctctgatatcgaatttgacttggttaaaaaacgtgtgctccagcagtccagaaaagttatatttcttgatcttccattgtttgaagcactggacctttaatccactgtaggtatggacagggaagaaaggaagaccatcaatcagggtcaagaagatgaaatggagatttatggttacaatttgagtcgctggaagcttgccatagtttctttaggagtgatttgctctggtgggtttctcctcctcctcct

SEQ ID NO: 109647 - DNA, 7720 bp, Homo sapiens
  Payload ID: 1534
  Gene Symbol: ATP13A3
  Gene Name: ATPase type 13A3
  Uniprot ID: Q9H7F0
  ENST ID: ENST00000439040
  CDS Start-End: 793-4473
cttctgcctcagcctgagtagctgggatgggactacagatgcacgccaccacacatggctaatttttttattttttagagacgaggtcccatgtgagccacggtgccccaccttttaaagcaattaccgtaaggaagcaactgtctttagcaaatagaagatcataaacatccttctggagatcttgagatgttgactgtggtttatagggcaatgaaaatctacatacctgagtggggcagtgagacatgagtgccacctatgatccttccagtgagcaattctttctggtgccaggagcccaaaggaaactcagtcaaccagctgtagatgggcttgttccgagtttgttctagaagtcagaactgccagctctgaaagtaggtcacaagtgactggccatccctgggctgctcacaggaagtagctgcaaaggtcagggaaagtttttaatgactatacaggccagtgaatgacaggctttgaggagcttctcttcttggcatctgaaacagcatactttctgactaccgctgtgtgctgtgaggggctgaggatccagatgtggctgaggaaggtcctggctcatgaggaggtggaagtctgggtgcttaaacagataatccagagttttgatgcgagatgaactcattctggtgaatcactctggcttcatttggttatagtggtcaagagtttggccctggagcaaagtgtctgggtttgaatcctggctgtgctttcggtgatcttccattgtttgaagcactggacctttaatccactgtaggtatggacagggaagaaaggaagaccatcaatcagggtcaagaagatgaaatggagatttatggttacaatttgagtcgctggaagcttgccatagtttctttaggagtgatttgctctggtgggtttctcctcctcctcctctattggatgcctgagtggcgggtgaaagcgacctgtgtcagagctgcaattaaagactgtgaagtagtgctgctgaggactactgatgaattcaaaatgtggttttgtgcaaaaattcgcgttctttctttggaaacttacccagtttcaagtccaaaatctatgtctaataagctttcaaatggccatgcagtttgtttaattgagaatcccactgaagaaaataggcacaggatcagtaaatattcacagactgaatcacaacagattcgttatttcacccaccatagtgtaaaatatttctggaatgataccattcacaattttgatttcttaaagggactggatgaaggtgtttcttgtacgtcaatttatgaaaagcatagtgcaggactgacaaaggggatgcatgcctacagaaaactgctttatggagtaaatgaaattgctgtaaaagtgccttctgtttttaagcttctaattaaagaggttctcaacccattttacattttccagctgttcagtgttatactgtggagcactgatgaatactattactatgctctagctattgtggttatgtccatagtatcaatcgtaagctcactatattccattagaaagcaatatgttatgttgcatgacatggtggcaactcatagtaccgtaagagtttcagtttgtagagtaaatgaagaaatagaagaaatcttttctaccgaccttgtgccaggagatgtcatggtcattccattaaatgggacaataatgccttgtgatgctgtgcttattaatggtacctgcattgtaaacgaaagcatgttaacaggagaaagtgttccagtgacaaagactaatttgccaaatccttcagtggatgtgaaaggaataggagatgaattatataatccagaaacacataaacgacatactttgttttgtgggacaactgttattcagactcgtttctacactggagaactcgtcaaagccatagttgttagaacaggatttagtacttccaaaggacagcttgttcgttccatattgtatcccaaaccaactgattttaaactctacagagatgcctacttgtttctactatgtcttgtggcagttgctggcattgggtttatctacactattattaatagcattttaaatgaggtacaagttggggtcataattatcgagtctcttgatattatcacaattactgtgccccctgcacttcctgctgcaatgactgctggtattgtgtatgctcagagaagactgaaaaaaatcggtattttctgtatcagtcctcaaagaataaatatttgtggacagctcaatcttgtttgctttgacaagactggaactctaactgaagatggtttagatctttgggggattcaacgagtggaaaatgcacgatttctttcaccagaagaaaatgtgtgcaatgagatgttggtaaaatcccagtttgttgcttgtatggctacttgtcattcacttacaaaaattgaaggagtgctctctggtgatccacttgatctgaaaatgtttgaggctattggatggattctggaagaagcaactgaagaagaaacagcacttcataatcgaattatgcccacagtggttcgtcctcccaaacaactgcttcctgaatctacccctgcaggaaaccaagaaatggagctgtttgaacttccagctacttatgagataggaattgttcgccagttcccattttcttctgctttgcaacgtatgagtgtggttgccagggtgctgggggataggaaaatggacgcctacatgaaaggagcgcccgaggccattgccggtctctgtaaacctgaaacagttcctgtcgattttcaaaacgttttggaagacttcactaaacagggcttccgtgtgattgctcttgcacacagaaaattggagtcaaaactgacatggcataaagtacagaatattagcagagatgcaattgagaacaacatggattttatgggattaattataatgcagaacaaattaaagcaagaaacccctgcagtacttgaagatttgcataaagccaacattcgcaccgtcatggtcacaggtgacagtatgttgactgctgtctctgtggccagagattgtggaatgattctacctcaggataaagtgattattgctgaagcattacctccaaaggatgggaaagttgccaaaataaattggcattatgcagactccctcacgcagtgcagtcatccatcagcaattgacccagaggctattccggttaaattggtccatgatagcttagaggatcttcaaatgactcgttatcattttgcaatgaatggaaaatcattctcagtgatactggagcattttcaagaccttgttcctaagttgatgttgcatggcaccgtgtttgcccgtatggcacctgatcagaagacacagttgatagaagcattgcaaaatgttgattattttgttgggatgtgtggtgatggcgcaaatgattgtggtgctttgaagagggcacacggaggcatttccttatcggagctcgaagcttcagtggcatctccctttacctctaagactcctagtatttcctgtgtgccaaaccttatcagggaaggccgtgctgctttaataacttccttctgtgtgtttaaattcatggcattgtacagcattatccagtacttcagtgttactctgctgtattctatcttaagtaacctaggagacttccagtttctcttcattgatctggcaatcattttggtagtggtatttacaatgagtttaaatcctgcctggaaagaacttgtggcacaaagaccaccttcgggtcttatatctggggcccttctcttctccgttttgtctcagattatcatctgcattggatttcaatctttgggttttttttgggtcaaacagcaaccttggtatgaagtgtggcatccaaaatcagatgcttgtaatacaacaggaagcgggttttggaattcttcacacgtagacaatgaaaccgaacttgatgaacataatatacaaaattatgaaaataccacagtgttttttatttccagttttcagtacctcatagtggcaattgccttttcaaaaggaaaacccttcaggcaaccttgctacaaaaattatttttttgttttttctgtgatttttttatatatttttatattattcatcatgttgtatccagttgcctctgttgaccaggttcttcagatagtgtgtgtaccatatcagtggcgtgtaactatgctcatcattgttcttgtcaatgcctttgtgtctatcacagtggaggagtcagtggatcggtggggaaaatgctgcttaccctgggccctgggctgtagaaagaagacaccaaaggcaaagtacatgtatctggcgcaggagctcttggttgatccagaatggccaccaaaacctcagacaaccacagaagctaaagctttagttaaggagaatggatcatgtcaaatcatcaccataacatagcagtgaatcagtctcagtggtattgctgatagcagtattcaggaatatgtgattttaggagtttctgatcctgtgtgtcagaatggcactagttcagtttatgtcccttctgatatagtagcttatttgacagctttgctcttccttaaaataaaaacagaaaaatatatcgtcctaacagttaaattaacaatcaatccataaagtcctatatcttcattcagcaacccaaatattacatacatttccagaattttcttgattgttactttcagtgatattctttatattgggtacaggagaagtttggtgtttggtaggtttttcaacattagtttttgagactagtttacctcttcacatttatgctcacaaccctcttgttagaaaagtctgtgtttatatacaggctgtaagtttgtgattgataaaaagaagatgagtgttaattagcctccagtgaaaatatactgaaagcctgttttcatttgattccaatgtttcttccaaagaattctgtataaacatatgccaattccctatgatggtctagagttaggaatgagtgtttatggtgttgcttatagaacaactcaggtaatctccatttctggttttatattttctgtacaaactgcctgggttttatttttctaatcagcaaggtgcttcactgccttcttgagacgcctctcaaagctcttaaatggctcctgtgctatgtgtggtgttggcagtctaatttgcttctgttaaatgttgtagaacctttttcactaggaaataagattcatttctttcggcagtagatgtagattcatcttttaacgtttcttcaaatttgtttctgtcaggctttgtgttattttaaatggttttttaaaattttcttctatgttttcaattacctaaagacataggataatagttttttttaagttagaattttacctcataaaattttttgaggtttgatgtatgtctctgtcttatcaataatgaggcttaaaaaatactggatttgaatggctgccgttttttcaaagcaatatgaatttgatgagtttgttttatgccattaggtggcgccagaggtcagaacatgtctattttgaattggatcgttacaaatgagcatatttgatgcggaaatttctgggagaaaaaaaattgaggaaataaagttaaaaaattgacattcattgagccaaaagagatgtggagaaacatttttcacctttctgtttggcctgattaacatttaaattcttgccaaaattaaggtaacttttaaaaaacaccttttataggtggatccagcagtctggcaacgcccacagttaccacaacacagaaaactgatcgtgctataaaatggacgctaaactatgaaaacagtgtgacattgttctctgttcttccagagccagtaacatgcttgctcgtgctttctacttctagctgatcattcttttcccaacatatatttacaaatttaccaaattttacctagaattttaggaccaaatggttctcactctttatgctgcaaagacctggatgatgtttggtaactatagaaaaatagaaattacactcaggatcactgttactgctattgccactgatgattcctgcaaaaatataatcgaagttttccatcaaatgtataatatgctattaatacacattagatgataacagttgttccatgaatgattctatgaagctatgcatcttagacctcttgagctgtgaattagcactattttctatagttacttattctctggatcattttataatttccatattaatttcaaatatgctcgtgttattcttcagtgatttccacaattgtgcattttattctttggtttaagtactgaagcatataatgaaagtaattgctaagtagcagcttaaaaattcaattatccgattgtatttaacatctttaagagcatgatcataaagagctatttttgacaccccccccccacttttttaacatttagagttagtaagggttttatatctcttctgtccatattgttttcaaaggaatgaggtgtttaggtggctggaaaagcatttgtaggaagttagatttgaatatagacaaggtgggttattcacgttgagaatgttatttgaagaatgcctgtgaagccaggtgtgggttctactcagtgccatagatagactgagtcttctctcgtaggttaccattacatagtaattttgattctgaatttcacattaaattatttgagtttatacagacctaaattttaaaatctgtacatatattattttgatgtattaagatgaatattgctgatttaaattttatttatgcacatacttaaaggacagaaatgtctgggaaagtaattgttaaataatgatatgtaactttttaactttttaaataaataacaagatttttaatgtgtgtctccctcagggttgtttaaagttttttttctccctcaagtataaatagtggtaactatatgttttgtatcttctagcaccaactgctgtaaagcaatgctgcaaataatgcttgaatacaagtggctaagccaacaacagaataaatacttttatagtagttttataatcctgaaattcgaaagctttcccaattgcacttgcatctaaacaaaactgttgcagtttttactctatttattttgttccccatgtttatgaaagtcctgcacagtttcaaaggcatggtaaataatatatcaatgtttatgtagtctgttacagaaacagctatagataacattatccagtgaagagcaaaattcaagctttagaaaatattcatgcatgcaattttgacatatctaaaaataggtttttgtatatttatggtgggaggtggttgggaacttttaacaaaatggggtgttaatttttgtacagtctgtgggcatttacacatttttaatgtattaaaatttggtaattatgtgtacattaaattaataaaagttacttctagttatgatttgtgaattccctaagaccttggatttttttaagtaactttatatcagaaatgatactgcatctttatatttttaaaattgtattgctgctcaagaatggtaccctcttgtcaaaaaggcatacattcataattgtacattcagcattgtaaataatcttatgaaaccttttttgattgaagctattcaaaataaaaattttaatgaatgaaataaca

SEQ ID NO: 109648 - DNA, 5227 bp, Homo sapiens
  Payload ID: 1534
  Gene Symbol: ATP13A3
  Gene Name: ATPase type 13A3
  ENST ID: ENST00000619199
  CDS Start-End: 1759-3864
aaaatacttgccctttggaaaaaaatcattctggcgtccacattcagactggtttagaggagagtaatactgaagacatgcccccccgaatcaaggtagcaattgcggagatgaaaagaaatgagttcaaaagatacttaaatgtgaccattgaacaggatttgactcattggatatgaggccatggagcagtgtctggctaggtggatggatgttggtgctgtttagttaaataggaaactggaagagaagcaggcttgcaagaatggtaatattttggacgtgtaacttgtctggcaagatgttgaagaggtaaaggaggcagcacagcatcatgggccttggaggcagaagccgctttgatttactcagaacaccaaatcagtctccattttcttgactcagactacacccaagagattgcttccttccctgtgcttcctggccacttgctactctagctaggaagatctgcctcccttagctgaagtctaagatgtgtagcttattgatgcctctcctcttcttgttctgctgttgctgaatataatggggatgccagggcagacataccattcaacttgaatcttccttacccactttgtatagtcttacatgtcattgataccttgttttctggtacgcctaaaaggagtagaacttcaagtggtatttaaaagctttaagaaaagtcaaatttttacttttttcttcccatctgaggaatggatttattttctttttaaagaaatccaaatttttaaaagaagggatcttatttttaaaacgaagatcgataatatctactatgtactaaatgtcattctttaaaagttgttccctcataatttagtaaattacttccttttttaaaaaaaggaaagaaagagtgtttgtcttacaggctaacatcacaaacaataagtttcttctcatccatctccatttataaactagtgtgactgtcttctgagcacagtattaaacctggacagggagagggagggtgttagagaatgagaggaaaagagagagaatacctacatataaggtgaccctaaagaaaagcctttcacccttcggaagatcttttcattttcatttttctttttttcaaacaccaacttgtaccagagggaagatctttttttaaaagtgtttcactaaaatttgtaaggaaataatgagctagataaaatattacagtgtttatttaatgaatttactcatatttaaaataatatctaaaaagagtaatttaggaatattgaggcaatgagacttgaaggttataaatagtggcagtgagaaaaggaatattatagataagctgttgaaaagaaaagatgctaagttttctagtgcttccttctgtttccaagggattatagaaatcggagtttgtttgacctgtttcacaggcatctcctttgtggactcattgtgtctcttccttaggctaatagtcaccatttatcatggacggttgtcatgagtgttgaagcacacttaacctgcttcgtcagagggtacttggcatcaccggtgcacagctggtgtcctagcaggagactaactagctgacacaccgtgctttgttagcctaataatcttatttgttaaaacttgccatttgttggatttttctattttaccccattataaacttcttattgagatcagatgacttctgaatagcatttgctgtatttttccaaggtaaagaatatctttttcagatttttctttctttctttaatttcagaaatagaagaaatcttttctaccgaccttgtgccaggagatgtcatggtcattccattaaatgggacaataatgccttgtgatgctgtgcttattaatggtacctgcattgtaaacgaaagcatgttaacaggagaaagtgttccagtgacaaagactaatttgccaaatccttcagtggatgtgaaaggaataggagatgaattatataatccagaaacacataaacgacatactttgttttgtgggacaactgttattcagactcgtttctacactggagaactcgtcaaagccatagttgttagaacaggatttagtacttccaaaggacagcttgttcgttccatattgtatcccaaaccaactgattttaaactctacagagatgcctacttgtttctactatgtcttgtggcagttgctggcattgggtttatctacactattattaatagcattttaaatgaggtacaagttggggtcataattatcgagtctcttgatattatcacaattactgtgccccctgcacttcctgctgcaatgactgctggtattgtgtatgctcagagaagactgaaaaaaatcggtattttctgtatcagtcctcaaagaataaatatttgtggacagctcaatcttgtttgctttgacaagactggaactctaactgaagatggtttagatctttgggggattcaacgagtggaaaatgcacgatttctttcaccagaagaaaatgtgtgcaatgagatgttggtaaaatcccagtttgttgcttgtatggctacttgtcattcacttacaaaaattgaaggagtgctctctggtgatccacttgatctgaaaatgtttgaggctattggatggattctggaagaagcaactgaagaagaaacagcacttcataatcgaattatgcccacagtggttcgtcctcccaaacaactgcttcctgaatctacccctgcaggaaaccaagaaatggagctgtttgaacttccagctacttatgagataggaattgttcgccagttcccattttcttctgctttgcaacgtatgagtgtggttgccagggtgctgggggataggaaaatggacgcctacatgaaaggagcgcccgaggccattgccggtctctgtaaacctgaaacagttcctgtcgattttcaaaacgttttggaagacttcactaaacagggcttccgtgtgattgctcttgcacacagaaaattggagtcaaaactgacatggcataaagtacagaatattagcagagatgcaattgagaacaacatggattttatgggattaattataatgcagaacaaattaaagcaagaaacccctgcagtacttgaagatttgcataaagccaacattcgcaccgtcatggtcacaggtgacagtatgttgactgctgtctctgtggccagagattgtggaatgattctacctcaggataaagtgattattgctgaagcattacctccaaaggatgggaaagttgccaaaataaattggcattatgcagactccctcacgcagtgcagtcatccatcagcaattgacccagaggctattccggttaaattggtccatgatagcttagaggatcttcaaatgactcgttatcattttgcaatgaatggaaaatcattctcagtgatactggagcattttcaagaccttgttcctaagttgatgttgcatggcaccgtgtttgcccgtatggcacctgatcagaagacacagttgatagaagcattgcaaaatgttgattattttgttgggatgtgtggtgatggcgcaaatgattgtggtgctttgaagagggcacacggaggcatttccttatcggagctcgaagcttcagtggcatctccctttacctctaagactcctagtatttcctgtgtgccaaaccttatcagggaaggccgtgctgctttaataacttccttctgtgaattagcactattttctatagttacttattctctggatcattttataatttccatattaatttcaaatatgctcgtgttattcttcagtgatttccacaattgtgcattttattctttggtttaagtactgaagcatataatgaaagtaattgctaagtagcagcttaaaaattcaattatccgattgtatttaacatctttaagagcatgatcataaagagctatttttgacaccccccccccacttttttaacatttagagttagtaagggttttatatctcttctgtccatattgttttcaaaggaatgaggtgtttaggtggctggaaaagcatttgtaggaagttagatttgaatatagacaaggtgggttattcacgttgagaatgttatttgaagaatgcctgtgaagccaggtgtgggttctactcagtgccatagatagactgagtcttctctcgtaggttaccattacatagtaattttgattctgaatttcacattaaattatttgagtttatacagacctaaattttaaaatctgtacatatattattttgatgtattaagatgaatattgctgatttaaattttatttatgcacatacttaaaggacagaaatgtctgggaaagtaattgttaaataatgatatgtaactttttaactttttaaataaataacaagatttttaatgtgtgtctccctcagggttgtttaaagttttttttctccctcaagtataaatagtggtaactatatgttttgtatcttctagcaccaactgctgtaaagcaatgctgcaaataatgcttgaatacaagtggctaagccaacaacagaataaatacttttatagtagttttataatcctgaaattcgaaagctttcccaattgcacttgcatctaaacaaaactgttgcagtttttactctatttattttgttccccatgtttatgaaagtcctgcacagtttcaaaggcatggtaaataatatatcaatgtttatgtagtctgttacagaaacagctatagataacattatccagtgaagagcaaaattcaagctttagaaaatattcatgcatgcaattttgacatatctaaaaataggtttttgtatatttatggtgggaggtggttgggaacttttaacaaaatggggtgttaatttttgtacagtctgtgggcatttacacatttttaatgtattaaaatttggtaattatgtgtacattaaattaataaaagttacttctagttatgatttgtgaattccctaagaccttggatttttttaagtaactttatatcagaaatgatactgcatctttatatttttaaaattgtattgctgctcaagaatggtaccctcttgtcaaaaaggcatacattcataattgtacattcagcattgtaaataatcttatgaaaccttttttgattgaagctattcaaaataaaaattttaatgaatgaaataa

SEQ ID NO: 109649 - DNA, 2157 bp, Homo sapiens
  Payload ID: 1535
  Gene Symbol: ATP13A4
  Gene Name: ATPase type 13A4
  Uniprot ID: Q4VNC1
  ENST ID: ENST00000295548
  CDS Start-End: 1-1731
atgggacactttgagaagggccagcacgctctgctcaatgaaggagaagagaatgagatggagatatttggctatcggactcaaggctgccggaaaagtctctgccttgccggatccatcttctcatttggaatcctccccttggtgttttactggagaccagcatggcacgtatgggcacattgtgtcccatgttccttgcaagaagcagacactgtgttgctgaggacaacggatgaattccaaatttactcttggaaaaaggtaatatggatctacctgtcagcattaaacagcgcatttggtctcactcctgaccaccctctcatgacagatgaggagtatatcataaatagagccataagaaagccagacctaaaggtgagatgcatcaaagtgcagaaaataagatatgtttggaactacttagaaggacagttccagaaaattggttctttggaagactggcttagttctgccaagatacatcaaaaatttggatcaggcttgacaagagaagaacaggagattaggaggttaatatgtgggcctaatactatcgatgttgaagttacaccaatttggaaactgctcatcaaggaggttctaaatccattttatatatttcaactcttcagtgtctgtttgtggtttagtgaagactataaggaatatgcttttgccatcataatcatgtccataatttccatatctttgacagtatatgatctcagagagcaatctgtaaaactccaccatctcgtcgagtcacataatagcattacggtctctgtatgtgggagaaaagctggagttcaagagctggaatcacgcgtcctggtgcctggagatttattaattttgacagggaacaaagtgctaatgccatgtgatgccgttctgattgaaggcagctgtgtggtggatgaaggcatgctgacaggagaaagtattccagtcaccaaaactccgttacccaagatggatagctctgtgccctggaaaacacagagtgaagcggattacaagcggcatgtcctcttctgtggaacagaggttatccaggccaaggcagcttgctctgggaccgtgagagccgtggtactgcagactggattcaacactgcaaagggagaccttgtgagatccattctctaccctaagccagtgaattttcagttgtacagggatgccatcaggttcctcctgtgccttgtaggaacagccaccattgggatgatctatactctgtgtgtctatgtgcttagtggggaacctccagaggaggtggtgaggaaagcccttgacgtcatcacaattgcggttcctccggctctacctgctgctctgaccacaggcattatctatgcccagaggaggctgaagaagagaggcatcttctgcattagcccccagaggatcaacgtatgtggacagttaaaccttgtctgctttgacaagacaggcaccttaacaagggacggcttggacctctggggagtcgtgtcctgtgataggaatggctttcaggaagttcacagctttgcctcaggccaggctttgccatggggcccactgtgtgcagcgatggccagctgccactctctgatccttcttgatgggaccatccagggagaccctctggacctcaaaatgtttgaagccaccacctgggtaagcctctgctcttcagagaatctgagaagcttcttcaatgccagagcaacataggcaatatcagagctatctaattcttataaaaggtgaggtttccaatgtggagtacatttggtagtgaagggcaaaccaatctaaggctggtttcctcatctgtgcaatgaagctaataatagcatctacataatgagattgtgaggattaaatgagatgatgcagtaagaaaatccttggcactatgcctggcaaatattaaaggttcgatcatattaatataattgtacttattatgcagttatttcttgtctctctgtactgttctccgagcattgtctggtttcgaagattttccagaatatggggatcagaaaacattgctttctccagtgctcaggataactcatagattcacggggactataagtcttatttctattaatttcatattgattttatttccaagactagaaagaacaaaaa

SEQ ID NO: 109650 - DNA, 4208 bp, Homo sapiens
  Payload ID: 1535
  Gene Symbol: ATP13A4
  Gene Name: ATPase type 13A4
  Uniprot ID: Q4VNC1
  ENST ID: ENST00000342695
  CDS Start-End: 324-3914
aggcaatgagttctttccctgtaagttgggcacaaaaagatcggcatgggagcagcctcctttgagacagctgctctgagagaatgcaataagcagggagcagccagcaattcctcctagcagagggcgactcgtgggaggagttcagtttgccaagtattgtcatttgttgagagaaggtgtgtgctcaaggaggagttttaacctggaggatcattaactcttttagtcagctgaggagctgcggtggctcggcgagttggagttcatcctggaagcgtctgcacgacaaggtcagggaggaggtgtggaataactttttcatgggacactttgagaagggccagcacgctctgctcaatgaaggagaagagaatgagatggagatatttggctatcggactcaaggctgccggaaaagtctctgccttgccggatccatcttctcatttggaatcctccccttggtgttttactggagaccagcatggcacgtatgggcacattgtgtcccatgttccttgcaagaagcagacactgtgttgctgaggacaacggatgaattccaaatttactcttggaaaaaggtaatatggatctacctgtcagcattaaacagcgcatttggtctcactcctgaccaccctctcatgacagatgaggagtatatcataaatagagccataagaaagccagacctaaaggtgagatgcatcaaagtgcagaaaataagatatgtttggaactacttagaaggacagttccagaaaattggttctttggaagactggcttagttctgccaagatacatcaaaaatttggatcaggcttgacaagagaagaacaggagattaggaggttaatatgtgggcctaatactatcgatgttgaagttacaccaatttggaaactgctcatcaaggaggttctaaatccattttatatatttcaactcttcagtgtctgtttgtggtttagtgaagactataaggaatatgcttttgccatcataatcatgtccataatttccatatctttgacagtatatgatctcagagagcaatctgtaaaactccaccatctcgtcgagtcacataatagcattacggtctctgtatgtgggagaaaagctggagttcaagagctggaatcacgcgtcctggtgcctggagatttattaattttgacagggaacaaagtgctaatgccatgtgatgccgttctgattgaaggcagctgtgtggtggatgaaggcatgctgacaggagaaagtattccagtcaccaaaactccgttacccaagatggatagctctgtgccctggaaaacacagagtgaagcggattacaagcggcatgtcctcttctgtggaacagaggttatccaggccaaggcagcttgctctgggaccgtgagagccgtggtactgcagactggattcaacactgcaaagggagaccttgtgagatccattctctaccctaagccagtgaattttcagttgtacagggatgccatcaggttcctcctgtgccttgtaggaacagccaccattgggatgatctatactctgtgtgtctatgtgcttagtggggaacctccagaggaggtggtgaggaaagcccttgacgtcatcacaattgcggttcctccggctctacctgctgctctgaccacaggcattatctatgcccagaggaggctgaagaagagaggcatcttctgcattagcccccagaggatcaacgtatgtggacagttaaaccttgtctgctttgacaagacaggcaccttaacaagggacggcttggacctctggggagtcgtgtcctgtgataggaatggctttcaggaagttcacagctttgcctcaggccaggctttgccatggggcccactgtgtgcagcgatggccagctgccactctctgatccttcttgatgggaccatccagggagaccctctggacctcaaaatgtttgaagccaccacctgggaaatggctttttctggggacgatttccacatcaagggagtgccggcacatgccatggtagttaagccctgcagaacagccagccaggtcccagtggaaggaattgcaatcctgcatcagttcccattctcatcggcactgcaaagaatgacagtcattgtccaagagatgggaggtgaccgactggcattcatgaaaggtgcaccagagagggtggccagcttttgccaacctgagacagtacccactagttttgttagcgaacttcagatttacacgacacagggcttccgagtcatagcactggcctacaagaagctggaaaatgaccatcacgctactaccttgacgagggagacggtagaatcagacctgatatttctggggctgctgatcttggagaatcgattgaaggaagagacaaaacctgtcttggaagagctcatctcagcccggataaggactgtaatgatcacaggtgacaatcttcagactgcaataacagtggccagaaaatctggaatggtttctgaaagccagaaagtcattctcattgaggcaaatgaaaccaccgggtcctcatcagcatctatatcttggacgttagtagaagagaagaaacacattatgtatgggaatcaggacaattacattaacatcagggatgaagtctctgataaaggcagagaaggaagttaccattttgccctaactggaaaatcctttcatgttataagtcaacatttcagcagcctactgccaaagatattgatcaatgggaccatctttgcaagaatgtctcctgggcagaagtccagtctggtggaagaatttcagaaactggattactttgtaggtatgtgtggtgatggagccaatgactgtggggctctgaaaatggctcatgtgggcatctcattatcagagcaggaggcatctgtggcctcacctttcacttccaaaactccaaacattgagtgcgtacctcaccttatcaaggaaggacgtgcagctctcgttacctccttttgcatgtttaagtacatggctctgtacagcatgattcagtatgttggtgttctgctgctctactgggagacaaacagcctttcaaattaccagtttctgttccaggatctggccattacaactcttattggtgtaacaatgaatctgaatggtgcctaccctaagctggtgcctttcagacctgcaggacggctgatctctccacctctgctactctctgtgattttcaacattcttctcagcctggccatgcatattgcaggcttcatcctggttcagaggcagccttggtattccgtggagatacacagtgcctgcacagtacaaaatgaaagcatctcagagttaaccatgtctccaactgctccagaaaaaatggaaagtaatagcaccttcacaagttttgagaacactacagtctggttcttgggaacaatcaactgtatcactgtggctcttgtgttctctaaaggaaaaccatttagacagccaacttatacaaactatatatttgtccttgtgctgataatacagcttggtgtatgtctattcattctatttgctgatataccagaattatatagacgtttggatctgctctgcactcccgtcctgtggagggcctccattgtcatcatgctcagcttgaatttcattgtgtcccttgtggccgaggaggctgttattgaaaatcgagccctgtggatgatgattaaaagatgtttcggctatcagtcaaaaagccagtatcggatatggcagagggacttggcaaatgaccctagttggcccccgctaaaccaaacctcccactctgacatgccggagtgtggcagaggagtgtcttacagcaatccagtatttgagagcaatgaagaacaactctgaaggacatgtgatatccaagttgatattacagagaaacaatgacaaaagggaccagtttcattgattttaagaaatgagactcttgtaacatcagctggagttttggggctacctatcaaatcatggtgacaaactaaagtctgtttgataaaatactgtctacagagaagaacattgacccagaagagtgctttcctcttggcttctgaaggtattagaggcattcagtgaaggcaagaatgggccaagaatttctatgggccaagagacaagcaggctaaaggggaaaaatat

SEQ ID NO: 109651 - DNA, 4016 bp, Homo sapiens
  Payload ID: 1535
  Gene Symbol: ATP13A4
  Gene Name: ATPase type 13A4
  ENST ID: ENST00000392443
  CDS Start-End: 189-3722
gggaggagttcagtttgccaagtattgtcatttgttgagagaaggtgtgtgctcaaggaggagttttaacctggaggatcattaactcttttagtcagctgaggagctgcggtggctcggcgagttggagttcatcctggaagcgtctgcacgacaaggtcagggaggaggtgtggaataactttttcatgggacactttgagaagggccagcacgctctgctcaatgaaggagaagagaatgagatggagatatttggctatcggactcaaggctgccggaaaagtctctgccttgccggatccatcttctcatttggaatcctccccttggtgttttactggagaccagcatggcacgtatgggcacattgtgtcccatgttccttgcaagaagcagacactgtgttgctgaggacaacggatgaattccaaatttactcttggaaaaaggtaatatggatctacctgtcagcattaaacagcgcatttggtctcactcctgaccaccctctcatgacagatgaggagtatatcataaatagagccataagaaagccagacctaaaggtgagatgcatcaaagtgcagaaaataagatatgtttggaactacttagaaggacagttccagaaaattggttctttggaagactggcttagttctgccaagatacatcaaaaatttggatcaggcttgacaagagaagaacaggagattaggaggttaatatgtgggcctaatactatcgatgttgaagttacaccaatttggaaactgctcatcaaggaggttctaaatccattttatatatttcaactcttcagtgtctgtttgtggtttagtgaagactataaggaatatgcttttgccatcataatcatgtccataatttccatatctttgacagtatatgatctcagagagcaatctgtaaaactccaccatctcgtcgagtcacataatagcattacggtctctgtatgtgggagaaaagctggagttcaagagctggaatcacgcgtcctggtgcctggagatttattaattttgacagggaacaaagtgctaatgccatgtgatgccgttctgattgaaggcagctgtgtggtggatgaaggcatgctgacaggagaaagtattccagtcaccaaaactccgttacccaagatggatagctctgtgccctggaaaacacagagtgaagcggattacaagcggcatgtcctcttctgtggaacagaggttatccaggccaaggcagcttgctctgggaccgtgagagccgtggtactgcagactggattcaacactgcaaagggagaccttgtgagatccattctctaccctaagccagtgaattttcagttgtacagggatgccatcaggttcctcctgtgccttgaacctccagaggaggtggtgaggaaagcccttgacgtcatcacaattgcggttcctccggctctacctgctgctctgaccacaggcattatctatgcccagaggaggctgaagaagagaggcatcttctgcattagcccccagaggatcaacgtatgtggacagttaaaccttgtctgctttgacaagacaggcaccttaacaagggacggcttggacctctggggagtcgtgtcctgtgataggaatggctttcaggaagttcacagctttgcctcaggccaggctttgccatggggcccactgtgtgcagcgatggccagctgccactctctgatccttcttgatgggaccatccagggagaccctctggacctcaaaatgtttgaagccaccacctgggaaatggctttttctggggacgatttccacatcaagggagtgccggcacatgccatggtagttaagccctgcagaacagccagccaggtcccagtggaaggaattgcaatcctgcatcagttcccattctcatcggcactgcaaagaatgacagtcattgtccaagagatgggaggtgaccgactggcattcatgaaaggtgcaccagagagggtggccagcttttgccaacctgagacagtacccactagttttgttagcgaacttcagatttacacgacacagggcttccgagtcatagcactggcctacaagaagctggaaaatgaccatcacgctactaccttgacgagggagacggtagaatcagacctgatatttctggggctgctgatcttggagaatcgattgaaggaagagacaaaacctgtcttggaagagctcatctcagcccggataaggactgtaatgatcacaggtgacaatcttcagactgcaataacagtggccagaaaatctggaatggtttctgaaagccagaaagtcattctcattgaggcaaatgaaaccaccgggtcctcatcagcatctatatcttggacgttagtagaagagaagaaacacattatgtatgggaatcaggacaattacattaacatcagggatgaagtctctgataaaggcagagaaggaagttaccattttgccctaactggaaaatcctttcatgttataagtcaacatttcagcagcctactgccaaagatattgatcaatgggaccatctttgcaagaatgtctcctgggcagaagtccagtctggtggaagaatttcagaaactggattactttgtaggtatgtgtggtgatggagccaatgactgtggggctctgaaaatggctcatgtgggcatctcattatcagagcaggaggcatctgtggcctcacctttcacttccaaaactccaaacattgagtgcgtacctcaccttatcaaggaaggacgtgcagctctcgttacctccttttgcatgtttaagtacatggctctgtacagcatgattcagtatgttggtgttctgctgctctactgggagacaaacagcctttcaaattaccagtttctgttccaggatctggccattacaactcttattggtgtaacaatgaatctgaatggtgcctaccctaagctggtgcctttcagacctgcaggacggctgatctctccacctctgctactctctgtgattttcaacattcttctcagcctggccatgcatattgcaggcttcatcctggttcagaggcagccttggtattccgtggagatacacagtgcctgcacagtacaaaatgaaagcatctcagagttaaccatgtctccaactgctccagaaaaaatggaaagtaatagcaccttcacaagttttgagaacactacagtctggttcttgggaacaatcaactgtatcactgtggctcttgtgttctctaaaggaaaaccatttagacagccaacttatacaaactatatatttgtccttgtgctgataatacagcttggtgtatgtctattcattctatttgctgatataccagaattatatagacgtttggatctgctctgcactcccgtcctgtggagggcctccattgtcatcatgctcagcttgaatttcattgtgtcccttgtggccgaggaggctgttattgaaaatcgagccctgtggatgatgattaaaagatgtttcggctatcagtcaaaaagccagtatcggatatggcagagggacttggcaaatgaccctagttggcccccgctaaaccaaacctcccactctgacatgccggagtgtggcagaggagtgtcttacagcaatccagtatttgagagcaatgaagaacaactctgaaggacatgtgatatccaagttgatattacagagaaacaatgacaaaagggaccagtttcattgattttaagaaatgagactcttgtaacatcagctggagttttggggctacctatcaaatcatggtgacaaactaaagtctgtttgataaaatactgtctacagagaagaacattgacccagaagagtgctttcctcttggcttctgaaggtattagaggcattcagtgaaggcaagaatgggccaagaatttctatgggccaagagacaagcaggctaaaggggaaaaatat

SEQ ID NO: 109652 - DNA, 1458 bp, Homo sapiens
  Payload ID: 1535
  Gene Symbol: ATP13A4
  Gene Name: ATPase type 13A4
  Uniprot ID: Q4VNC1
  ENST ID: ENST00000400270
  CDS Start-End: 245-883
ggaataagaggggtaaatggaatagctgcatagcaacttggctctcaagcatcttaaatgttatcccttgacttctggcttccatggtttctgatgagaaattggctgctaatcttactgaagatcccttatagtgaatctgaatggtgcctaccctaagctggtgcctttcagacctgcaggacggctgatctctccacctctgctactctctgtgattttcaacattcttctcagcctggccatgcatattgcaggcttcatcctggttcagaggcagccttggtattccgtggagatacacagtgcctgcacagtacaaaatgaaagcatctcagagttaaccatgtctccaactgctccagaaaaaatggaaagtaatagcaccttcacaagttttgagaacactacagtctggttcttgggaacaatcaactgtatcactgtggctcttgtgttctctaaaggaaaaccatttagacagccaacttatacaaactatatatttgtccttgtgctgataatacagcttggtgtatgtctattcattctatttgctgatataccagaattatatagacgtttggatctgctctgcactcccgtcctgtggagggcctccattgtcatcatgctcagcttgaatttcattgtgtcccttgtggccgaggaggctgttattgaaaatcgagccctgtggatgatgattaaaagatgtttcggctatcagtcaaaaagccagtatcggatatggcagagggacttggcaaatgaccctagttggcccccgctaaaccaaacctcccactctgacatgccggagtgtggcagaggagtgtcttacagcaatccagtatttgagagcaatgaagaacaactctgaaggacatgtgatatccaagttgatattacagagaaacaatgacaaaagggaccagtttcattgattttaagaaatgagactcttgtaacatcagctggagttttggggctacctatcaaatcatggtgacaaactaaagtctgtttgataaaatactgtctacagagaagaacattgacccagaagagtgctttcctcttggcttctgaaggtattagaggcattcagtgaaggcaagaatgggccaagaatttctatgggccaagagacaagcaggctaaaggggaaaaatatgtgatctttcctcttaggacaggacaatactttcctttttataaaaatgagttgaggggaagtagtactgtgtatactcacggagttgtaatttttgaatttttacttcatcgatggaaaaactaatgcgtgggaaacattacaccaatctttactgtctgggttccttttctctgtagtacttttcagatttgaggctttttcttctgtttctggccttacccaacatattgttaaggataagcttagcctatgctgcaataaaaaacaactctcagata

SEQ ID NO: 109653 - DNA, 3056 bp, Homo sapiens
  Payload ID: 1535
  Gene Symbol: ATP13A4
  Gene Name: ATPase type 13A4
  ENST ID: ENST00000428352
  CDS Start-End: 1-1730
ctgggaccgtgagagccgtggtactgcagactggattcaacactgcaaagggagaccttgtgagatccattctctaccctaagccagtgaattttcagttgtacagggatgccatcaggttcctcctgtgccttgtaggaacagccaccattgggatgatctatactctgtgtgtctatgtgcttagtggggaacctccagaggaggtggtgaggaaagcccttgacgtcatcacaattgcggttcctccggctctacctgctgctctgaccacaggcattatctatgcccagaggaggctgaagaagagaggcatcttctgcattagcccccagaggatcaacgtatgtggacagttaaaccttgtctgctttgacaagacaggcaccttaacaagggacggcttggacctctggggagtcgtgtcctgtgataggaatggctttcaggaagttcacagctttgcctcaggccaggctttgccatggggcccactgtgtgcagcgatggccagctgccactctctgatccttcttgatgggaccatccagggagaccctctggacctcaaaatgtttgaagccaccacctgggaaatggctttttctggggacgatttccacatcaagggagtgccggcacatgccatggtagttaagccctgcagaacagccagccaggtcccagtggaaggaattgcaatcctgcatcagttcccattctcatcggcactgcaaagaatgacagtcattgtccaagagatgggaggtgaccgactggcattcatgaaaggtgcaccagagagggtggccagcttttgccaacctgagacagtacccactagttttgttagcgaacttcagatttacacgacacagggcttccgagtcatagcactggcctacaagaagctggaaaatgaccatcacgctactaccttgacgagggagacggtagaatcagacctgatatttctggggctgctgatcttggagaatcgattgaaggaagagacaaaacctgtcttggaagagctcatctcagcccggataaggactgtaatgatcacaggtgacaatcttcagactgcaataacagtggccagaaaatctggaatggtttctgaaagccagaaagtcattctcattgaggcaaatgaaaccaccgggtcctcatcagcatctatatcttggacgttagtagaagagaagaaacacattatgtatgggaatcaggacaattacattaacatcagggatgaagtctctgataaaggcagagaaggaagttaccattttgccctaactggaaaatcctttcatgttataagtcaacatttcagcagcctactgccaaagatattgatcaatgggaccatctttgcaagaatgtctcctgggcagaagtccagtctggtggaagaatttcagaaactggattactttgtaggtatgtgtggtgatggagccaatgactgtggggctctgaaaatggctcatgtgggcatctcattatcagagcaggaggcatctgtggcctcacctttcacttccaaaactccaaacattgagtgcgtacctcaccttatcaaggaaggacgtgcagctctcgttacctccttttgcatgtttaagtacatggctctgtacagcatgattcagagacaaacagcctttcaaattaccagtttctgttccaggatctggccattacaactcttattggtgtaacaatgaatctgaatggtgcctaccctaagctggtgcctttcagacctgcaggacggctgatctctccacctctgctactctctgtgattttcaacattcttctcagcctggccatgcatattgcaggcttcatcctggttcagaggcagccttggtattccgtggagatacacagtgcctgcacagtacaaaatgaaagcatctcagagttaaccatgtctccaactgctccagaaaaaatggaaagtaatagcaccttcacaagttttgagaacactacagtctggttcttgggaacaatcaactgtatcactgtggctcttgtgttctctaaaggaaaaccatttagacagccaacttatacaaactatatatttgtccttgtgctgataatacagcttggtgtatgtctattcattctatttgctgatataccagaattatatagacgtttggatctgctctgcactcccgtcctgtggagggcctccattgtcatcatgctcagcttgaatttcattgtgtcccttgtggccgaggaggctgttattgaaaatcgagccctgtggatgatgattaaaagatgtttcggctatcagtcaaaaagccagtatcggatatggcagagggacttggcaaatgaccctagttggcccccgctaaaccaaacctcccactctgacatgccggagtgtggcagaggagtgtcttacagcaatccagtatttgagagcaatgaagaacaactctgaaggacatgtgatatccaagttgatattacagagaaacaatgacaaaagggaccagtttcattgattttaagaaatgagactcttgtaacatcagctggagttttggggctacctatcaaatcatggtgacaaactaaagtctgtttgataaaatactgtctacagagaagaacattgacccagaagagtgctttcctcttggcttctgaaggtattagaggcattcagtgaaggcaagaatgggccaagaatttctatgggccaagagacaagcaggctaaaggggaaaaatatgtgatctttcctcttaggacaggacaatactttcctttttataaaaatgagttgaggggaagtagtactgtgtatactcacggagttgtaatttttgaatttttacttcatcgatggaaaaactaatgcgtgggaaacattacaccaatctttactgtctgggttccttttctctgtagtacttttcagatttgaggctttttcttctgtttctggccttacccaacatattgttaaggataagcttagcctatgctgcaataaaaaacaactctcagat

SEQ ID NO: 109654 - DNA, 565 bp, Homo sapiens
  Payload ID: 1535
  Gene Symbol: ATP13A4
  Gene Name: ATPase type 13A4
  ENST ID: ENST00000437904
  CDS Start-End: 1-367
caatcttcagactgcaataacagtggccagaaaatctggaatggtttctgaaagccagaaagtcattctcattgaggcaaatgaaaccaccgggtcctcatcagcatctatatcttggacgttagtagaagagaagaaacacattatgtatgggaatcaggacaattacattaacatcagggatgaagtctctgataaaggcagagaaggaagttaccattttgccctaactggaaaatcctttcatgttataagtcaacatttcagcagcctactgccaaagatattgatcaatgggaccatctttgcaagaatgtctcctgggcagaagtccagtctggtggaagaatttcagaaactggagtaggttctttgccagtgcaggtggcatgaactgcatggaggcataacagtcagggggagtggaagagttactttgtaggtatgtgtggtgatggagccaatgactgtggggctctgaaaatggctcatgtgggcatctcattatcagagcaggaggcatctgtggcctcacctttcacttccaaaactccaaacattgagt

SEQ ID NO: 109655 - DNA, 3658 bp, Homo sapiens
  Payload ID: 1535
  Gene Symbol: ATP13A4
  Gene Name: ATPase type 13A4
  ENST ID: ENST00000450950
  CDS Start-End: 71-322
ggcgagttggagttcatcctggaagcgtctgcacgacaaggtcagggaggaggtgtggaataactttttcatgggacactttgagaagggccagcacgctctgctcaatgaaggagaagagaatgagatggagatatttggctatcggactcaaggctgccggaaaagtctctgccttgccggatccatcttctcatttggaatcctccccttggtgttttactggagaccagcatggcacgtatgggcacattgtgtcccatgttccttgcaagaagcagacactgtgttgctgaggacaacgatgaggagtatatcataaatagagccataagaaagccagacctaaaggtgagatgcatcaaagtgcagaaaataagatatgtttggaactacttagaaggacagttccagaaaattggttctttggaagactggcttagttctgccaagatacatcaaaaatttggatcaggcttgacaagagaagaacaggagattagcaatctgtaaaactccaccatctcgtcgagtcacataatagcattacggtctctgtatgtgggagaaaagctggagttcaagagctggaatcacgcgtcctggtgcctggagatttattaattttgacagggaacaaagtgctaatgccatgtgatgccgttctgattgaaggcagctgtgtggtggatgaaggcatgctgacaggagaaagtattccagtcaccaaaactccgttacccaagatggatagctctgtgccctggaaaacacagagtgaagcggattacaagcggcatgtcctcttctgtggaacagaggttatccaggccaaggcagcttgctctgggaccgtgagagccgtggtactgcagactggattcaacactgcaaagggagaccttgtgagatccattctctaccctaagccagtgaattttcagttgtacagggatgccatcaggttcctcctgtgccttgtaggaacagccaccattgggatgatctatactctgtgtgtctatgtgcttagtggggaacctccagaggaggtggtgaggaaagcccttgacgtcatcacaattgcggttcctccggctctacctgctgctctgaccacaggcattatctatgcccagaggaggctgaagaagagaggcatcttctgcattagcccccagaggatcaacgtatgtggacagttaaaccttgtctgctttgacaagacaggcaccttaacaagggacggcttggacctctggggagtcgtgtcctgtgataggaatggctttcaggaagttcacagctttgcctcaggccaggctttgccatggggcccactgtgtgcagcgatggccagctgccactctctgatccttcttgatgggaccatccagggagaccctctggacctcaaaatgtttgaagccaccacctgggaaatggctttttctggggacgatttccacatcaagggagtgccggcacatgccatggtagttaagccctgcagaacagccagccaggtcccagtggaaggaattgcaatcctgcatcagttcccattctcatcggcactgcaaagaatgacagtcattgtccaagagatgggaggtgaccgactggcattcatgaaaggtgcaccagagagggtggccagcttttgccaacctgagacagtacccactagttttgttagcgaacttcagatttacacgacacagggcttccgagtcatagcactggcctacaagaagctggaaaatgaccatcacgctactaccttgacgagggagacggtagaatcagacctgatatttctggggctgctgatcttggagaatcgattgaaggaagagacaaaacctgtcttggaagagctcatctcagcccggataaggactgtaatgatcacaggtgacaatcttcagactgcaataacagtggccagaaaatctggaatggtttctgaaagccagaaagtcattctcattgaggcaaatgaaaccaccgggtcctcatcagcatctatatcttggacgttagtagaagagaagaaacacattatgtatgggaatcaggacaattacattaacatcagggatgaagtctctgataaaggcagagaaggaagttaccattttgccctaactggaaaatcctttcatgttataagtcaacatttcagcagcctactgccaaagatattgatcaatgggaccatctttgcaagaatgtctcctgggcagaagtccagtctggtggaagaatttcagaaactggattactttgtaggtatgtgtggtgatggagccaatgactgtggggctctgaaaatggctcatgtgggcatctcattatcagagcaggaggcatctgtggcctcacctttcacttccaaaactccaaacattgagtgcgtacctcaccttatcaaggaaggacgtgcagctctcgttacctccttttgcatgtttaagtacatggctctgtacagcatgattcagtatgttggtgttctgctgctctactgggagacaaacagcctttcaaattaccagtttctgttccaggatctggccattacaactcttattggtgtaacaatgaatctgaatggtgcctaccctaagctggtgcctttcagacctgcaggacggctgatctctccacctctgctactctctgtgattttcaacattcttctcagcctggccatgcatattgcaggcttcatcctggttcagaggcagccttggtattccgtggagatacacagtgcctgcacagtacaaaatgaaagcatctcagagttaaccatgtctccaactgctccagaaaaaatggaaagtaatagcaccttcacaagttttgagaacactacagtctggttcttgggaacaatcaactgtatcactgtggctcttgtgttctctaaaggaaaaccatttagacagccaacttatacaaactatatatttgtccttgtgctgataatacagcttggtgtatgtctattcattctatttgctgatataccagaattatatagacgtttggatctgctctgcactcccgtcctgtggagggcctccattgtcatcatgctcagcttgaatttcattgtgtcccttgtggccgaggaggctgttattgaaaatcgagccctgtggatgatgattaaaagatgtttcggctatcagtcaaaaagccagtatcggatatggcagagggacttggcaaatgaccctagttggcccccgctaaaccaaacctcccactctgacatgccggagtgtggcagaggagtgtcttacagcaatccagtatttgagagcaatgaagaacaactctgaaggacatgtgatatccaagttgatattacagagaaacaatgacaaaagggaccagtttcattgattttaagaaatgagactcttgtaacatcagctggagttttggggctacctatcaaatcatggtgacaaactaaagtctgtttgataaaatactgtctacagagaagaacattgacccagaagagtgctttcctcttggcttctgaaggtattagaggcattcagtgaaggcaagaatgggccaagaatttctatgggccaagagacaagcaggctaaaggggaaaaatatgtgatctt

SEQ ID NO: 109656 - DNA, 4027 bp, Homo sapiens
  Payload ID: 1536
  Gene Symbol: ATP13A5
  Gene Name: ATPase type 13A5
  Uniprot ID: Q4VNC0
  ENST ID: ENST00000342358
  CDS Start-End: 119-3775
aaaagcgcctgggaagagcaatcacaagttgtgacgattccaagttcacagaagcccaagggattttgacatttctccaaggagttagccagaagagatcctcgccggttgagttcagatggaagagaacagtaagaaggaccatcgggctttgctcaaccagggagaggaggatgaactggaggtgtttggttaccgggaccacaatgtacggaaagccttctgccttgtcgcatccgtgctgacctgtgggggccttctgctggtgttctactggagaccccagtggagagtgtgggccaactgcatcccatgccccttgcaagaagcagacactgttttgctgaggacaacagacgaatttcaaagatatatgaggaagaaggtattctgcctctacttatccacactgaagtttcctgtaagcaagaagtgggaagaatccctggtggctgaccgccactctgtcataaaccaagccttaataaagccagaattaaaactgcggtgcatggaagtgcagaaaatcaggtatgtttggaacgacctggagaagcggtttcagaaagttgggttgctagaagacagcaattcctgctctgacatccatcagacatttggattgggtctgaccagtgaagagcaagaggtcagaagattagtgtgtgggcccaacgccattgaggttgaaatccaacccatatggaagctgcttgttaaacaggttttaaatccattctatgtgttccaagccttcaccctaactttgtggctgtctcaaggttacatagaatactctgtggccatcatcattttgactgttatctccattgtcttaagtgtgtatgatttgcgacagcaatcagttaagctgcataacctcgtggaggaccacaacaaagtccaggttacaatcattgtaaaagacaaaggtttggaggagctggaatcccgtctcttggttcccggagacattcttattcttccaggaaaattttcattgccatgtgatgctgttttgattgatggaagctgcgtggtgaatgaaggcatgcttacaggagaaagtatacctgttacaaagacaccattgccccagatggagaacactatgccttggaaatgtcacagtttggaggattataggaaacacgtccttttctgtggaacagaagttatccaggtcaagccctctgggcaggggcctgtacgagcagtcgttttgcaaacaggttacaatacagccaaaggggacttagtgagatccatcctgtacccccggcctctgaacttcaaactatacagcgatgccttcaagttcatcgtgttcctggcctgccttggtgtcatgggttttttctatgccctaggggtatatatgtaccatggagttcctccaaaagatactgtgaccatggccctgatcctcctcaccgtgactgtccctccagtgctgccagctgccctgaccataggcaacgtgtatgctcagaagagactgaagaaaaagaaaatcttctgtatctccccacagagaatcaacatgtgtgggcaaataaacctcgtgtgctttgacaaaactggcactctcactgaagatgggctggacctctgggggactgtccctactgctgacaactgcttccaggaagcccacagctttgcctcaggccaggctgtgccatggagcccactgtgtgcggccatggccagctgccactctctgatccttctcaatgggaccatccagggagaccctctggacctcaaaatgtttgagggcactgcctggaaaatggaagattgcattgtagactcctgcaaatttgggacgtcagtttcaaacatcataaaaccaggaccaaaagccagtaagagtccagtggaagccatcatcaccttgtgccagtttccattttcctcgagcctgcagaggatgtccgtgatcgctcagctagctggggagaatcatttccatgtctacatgaaaggtgccccagaaatggtggccaggttctgcagatctgaaacagtgcccaagaatttcccacaggaactgaggagttacacggtgcaaggcttccgtgtcattgctcttgcccacaaaaccttaaagatggggaatctttcagaagtcgagcacttagccagagaaaaagtggagtcagagttaacatttctgggacttctcatcatggagaatcgcttgaaaaaagaaaccaaactggtcttgaaggaactgagtgaggcccgtatcaggactgtgatgattacaggtgataaccttcaaacggccattactgttgcaaagaattctgaaatgatccctccaggcagccaagtgatcattgttgaggccgatgaaccagaagaatttgttcctgcctctgtgacctggcagctggtggagaaccaagagactggacctgggaagaaagaaatctacatgcatactggaaacagttcaacccctcgtggggaaggaggaagctgttaccattttgcaatgagtgggaaatcataccaagtgatatttcagcatttcaacagcttgcttccaaaaattctggtgaatggaacagtttttgcaagaatgtctcctgggcagaaatcaagccttattgaagaatttcagaaattaaattattatgtgggcatgtgtggagatggagctaacgactgtggggctttgaaagcggctcatgcaggcatttcattatcagagcaggaagcatctgtggcatccccttttacctctaaaacaaccaacatccagtgtgtgcctcatctcatcagagaaggccgagctgctctggtttcatcctttggagtatttaaatacttgaccatgtacggcataatccagtttatcagtgcattactgctctattggcaactacaactctttggaaattaccagtatctcatgcaagatgtagccattactttgatggtctgtttaacaatgagttcaactcatgcctacccaaagctggctccatatagaccagcaggacagctcctttctccccctttactgctttcaatatttttgaattcctgtttctcctgcattgtgcagatcagtgcatttctctatgtgaagcagcagccttggtattgtgaggtctaccaatacagtgagtgttttctggccaaccaaagtaatttttcaacaaatgtgagtttggaaagaaactggactggaaatgcaactctgattcctggttcaattttaagttttgagaccaccacactgtggcccatcaccaccatcaactatatcacagtagcattcatcttttctaagggaaagccatttcgaaaacccatctatacaaactatatattttcatttctgctgctagctgccttgggcctcacaattttcattctgttttctgactttcaagttatataccgtggaatggagttgatcccaaccataacatcgtggagggttttaattttggtggtagccctcacccaattctgtgtggctttctttgtagaggattccatccttcaaaatcatgaactctggctgttgatcaaaagagaatttggattctactctaaaagtcaatataggacttggcaaaagaagctagcagaagactcaacctggcctcccataaacaggacagattattcaggtgatggcaaaaatggattctacatcaacggaggctatgaaagccatgaacagattccaaaaagaaaactcaaattgggaggccaacccacagaacagcatttctgggccaggctgtaatcagaattgtcgtcgtacatgctcaacagcattgcttttttccccaaaattaacacattgtggagaagtgatgatactctccccttacctttcctctctccattcaagcattcaaagtatattttcaatgaattaaaccttgcagcaagggaccttagataggcttattctgactgtatgctttaccaatgagagaaaaaaatgcatttcctgtatcatccttttcaataaactgtattcattttgcatagc

SEQ ID NO: 109657 - DNA, 569 bp, Homo sapiens
  Payload ID: 1536
  Gene Symbol: ATP13A5
  Gene Name: ATPase type 13A5
  ENST ID: ENST00000446087
  CDS Start-End: 96-569
acaagttgtgacgattccaagttcacagaagcccaagggattttgacatttctccaaggagttagccagaagagatcctcgccggttgagttcagatggaagagaacagtaagaaggaccatcgggctttgctcaaccagggagaggaggatgaactggtggagtcttgcccaggctggagtgaaatggcacgatctcggctcactgcaacgtctgcctcccaggaggtgtttggttaccgggaccacaatgtacggaaagccttctgccttgtcgcatccgtgctgacctgtgggggccttctgctggtgttctactggagaccccagtggagagtgtgggccaactgcatcccatgccccttgcaagaagcagacactgttttgctgaggacaacagacgaatttcaaagatatatgaggaagaaggtattctgcctctacttatccacactgaagtttcctgtaagcaagaagtgggaagaatccctggtggctgaccgccactctgtcataaaccaagccttaataaagccagaattaaaactgcggtgcatggaagtgcagaaa

SEQ ID NO: 109658 - DNA, 709 bp, Homo sapiens
  Payload ID: 1536
  Gene Symbol: ATP13A5
  Gene Name: ATPase type 13A5
  ENST ID: ENST00000620313
  CDS Start-End: 119-463
gggaaagccatttcgaaaacccatctatacaaactatatattttcatttctgctgctagctgccttgggcctcacaattttcattctgttttctgactttcaagttatataccgtggaatggagttgatcccaaccataacatcgtggagggttttaattttggtggtagccctcacccaattctgtggctttctttgtagaggattccatcttcaaaatcatgaactctggctgttgatcaaaagagaatttggattctactctaaaagtcaatataggacttggcaaaagaagctagcagaagactcaacctggcctcccataaacaggacagattattcaggtgatggcaaaaatggattctacatcaacggaggctatgaaagccatgaacagattccaaaaagaaaactcaaattgggaggccaacccacagaacagcatttctgggccaggctgtaatcagaattgtcgtcgtacatgctcaacagcattgcttttttccccaaaattaacacattgtggagaagtgatgatactctccccttacctttcctctctccattcaagcattcaaagtatattttcaatgaattaaaccttgcagcaagggaccttagataggcttattctgactgtatgctttaccaatgagagaaaaaaatgcatttcctgtatcatccttttcaataaactgtattcattttg

SEQ ID NO: 109659 - DNA, 8209 bp, Homo sapiens
  Payload ID: 1537
  Gene Symbol: ATP8A1
  Gene Name: ATPase, aminophospholipid transporter (APLT), class I, type 8A, member 1
  Uniprot ID: Q9Y2Q0
  ENST ID: ENST00000264449
  CDS Start-End: 221-3670
agctctgcgggcgccgccaccttcgccgccaccgctgcctttctcctcctcctgtcggcgtgcgggggccgcgcccggcggcagctctgccctaggtgggcggcggcgcggcccaggctgcagctgagcgctctgcgcggcgcagccgggtctcccgcgtgtaccacgccgtgacaggtgcagagtccgggctgaggacccacctgcagccgccgccgcgatgcccaccatgcggaggaccgtgtcggagatccgctcgcgcgccgaaggttatgagaagacagatgatgtttcagagaagacctcactggctgaccaggaggaagtaaggactattttcatcaaccagccccagctgacaaaattctgcaataaccatgtcagcactgcaaaatacaacataatcacattccttccaagatttctctactctcagttcagaagagctgctaattcattttttctctttattgcactgctgcagcaaatacctgatgtgtcaccaacaggtcgttatacaacactggttcctctcttatttattttagctgtggcagctatcaaagagataatagaagatattaaacgacataaagctgataatgcagtgaacaagaaacaaacgcaagttttgagaaatggtgcttgggaaattgtccactgggaaaaggtaaatgttggagatatagttataataaaaggcaaagagtatatacctgctgacactgtacttctctcatcaagtgagccccaagccatgtgctacattgaaacatccaacttagatggtgaaacaaacttgaaaattagacagggcttaccagcaacatcagatatcaaagacgttgacagtttgatgaggatttctggcagaattgagtgtgaaagtccaaacagacatctctacgattttgttggaaacataaggcttgatggacatggcaccgttccactgggagcagatcagattcttcttcgaggagctcagttgagaaatacacagtgggttcatggaatagttgtctacactggacatgacaccaagctgatgcagaattcaacaagtccaccacttaagctctcaaatgtggaacggattacaaatgtacaaattttgattttattttgtatcttaattgccatgtctcttgtctgttctgtgggctcagccatttggaatcgaaggcattctggaaaagactggtatctcaatctaaactatggtggcgctagtaattttggactgaatttcttgaccttcatcatccttttcaacaatctcattcctatcagcttattggttacattagaagttgtgaaatttacccaggcatacttcataaattgggatcttgacatgcactatgaacccacagacactgctgctatggctcgaacatctaatctgaatgaggaacttggccaggttaaatacatattttctgacaaaactggtactctgacatgcaatgtaatgcagtttaagaagtgcaccatagcgggagttgcttatgggcagaactcacagtttggagatgaaaaaacatttagtgattcatcattgctggaaaatctccaaaataatcatccaactgcacctataatatgtgaatttcttacaatgatggcagtctgtcacacagcagtgccagagcgagaaggtgacaagattatttatcaagcagcatctccagatgagggagcattggtcagagcagccaagcaattgaattttgttttcactggaagaacacccgactcggtgattatagattcactggggcaggaagaaagatatgaattgctcaatgtcttggagtttaccagtgctaggaaaagaatgtcagtgattgttcgcactccatctggaaagttacgactctactgcaaaggagctgacactgtaatttatgatcgactggcagagacgtcaaaatacaaagaaattaccctaaaacatttagagcagtttgctacagaagggttaagaactttatgttttgctgtggctgagatttcagagagcgactttcaggagtggcgagcagtctatcagcgagcatctacatctgtgcagaacaggctactcaaactcgaagagagttatgagttgattgaaaagaatcttcagctacttggagcaacagccattgaggataaattacaagatcaagtgcctgaaaccatagaaacgctaatgaaagcagacatcaaaatctggatccttacaggggacaagcaagaaactgccattaacatcggacactcctgcaaactgttgaagaagaacatgggaatgattgttataaatgaaggctctcttgatggaacaagggaaactctcagtcgtcactgtactacccttggtgatgctctccggaaagagaatgattttgctcttataattgatgggaaaaccctcaaatatgccttaacctttggagtacgacagtatttcctggacttagctttgtcatgcaaagctgtcatttgctgtcgggtttctcctcttcaaaaatctgaagttgttgagatggttaagaaacaagtcaaagtcgtaacgcttgcaatcggtgatggagcaaatgatgtcagcatgatacagacagcgcacgttggtgttggtatcagtggcaatgaaggcctgcaggcagctaattcctctgactactccatagctcagttcaaatatttgaagaatttactgatgattcatggtgcctggaactataacagagtctccaagtgcatcttatactgcttctacaagaatatagtgctctatattatcgagatctggtttgcctttgttaatggcttttctggacagatcctctttgaaagatggtgtataggtctctataacgtgatgtttacagcaatgcctcctttaactcttggaatatttgagagatcatgcagaaaagagaacatgttgaagtaccctgaattatacaaaacatctcagaatgccctggacttcaacaccaaggttttctgggttcattgtttaaatggcctcttccactcagttattctgttttggtttccactaaaagcccttcagtatggtactgcatttggaaatgggaaaacctcggattatctgctactgggaaactttgtgtacacttttgtggtgataactgtgtgtttgaaagctggattggagacatcatattggacatggttcagccacatagcgatatgggggagcatcgcactctgggtggtgttttttggaatctactcatctctgtggcctgccattccgatggcccctgatatgtcaggagaggcagccatgttgttcagttctggagtcttttggatgggcttgttattcatccctgtggcatctctgctccttgatgtggtgtacaaggttatcaagaggactgcttttaaaacattggtcgatgaagttcaggagctggaggcaaaatctcaagacccaggagcagttgtacttggaaaaagcctgaccgagagggcgcaactgctcaagaacgtctttaagaagaaccacgtgaacttgtaccgctctgaatccttgcaacaaaatctgctccatgggtatgcgttctctcaagatgaaaatggaatcgtttcacagtctgaagtgataagagcatatgataccacgaaacagaggcccgacgaatggtgatggggagagcctgaaaggcaggctctgttacctctctaaggagagctaccaggttgtcaccgcagtctgctaaccaattccagtctggtccatgaagaggaaaggtagatctgagctcatctcgctgatggacattcagattcatgtatattatagacataagcactgtgcaactgtactgtaacaccatctcttttggatttttttaaggtatttgctaagtctttgtaaacggaaattgaaaatgacctggtatcttgccagagggctttcttaaacggagaataagtcagtattcttatgccattactgtggggctgtaactgactgtcagtttattggctgtaccacaaggtaaccaaccattaaaaaactctaaatgatatttagttaaagggactcttggtatccagacttagatttcaggatatgctgaaacaaaccagcattcttaaggaactgactcaccttcctgagcaaaatttctaaacaagcatttgtgtccaaaattgtcttgataaatgtttgccaaagaggttcagtaagtgtttttctagttcagtagtcatatgcccagaaatgtaagagaaagtttacttccagttccgctgtaagatctgcatgcctgactttccaaatgtaagagtgatttacaaaaatgaatatttcaaggcatttgctactaaaatcggtgatgttgcacctttggccttacaaatgcttctttgttgtttgtcgtgtttatttgttagaggacacacgtgttaatgtgactctgttgttatgacactgatttttcaaactatgtatgtttcaggtatttctgatgaagtttcatcatcatttagatttttctaaaaatctggctaatgcagtagattgagtgatgtcattttgtcttaaagtttttcctcttaagaaacatatgctacgtatttacgtgggatttccaaagcttctgttgcaatatttggaataacatgtcagataaatgcatgggcttttgtcctgtgttccagttcccactagagatgcctgtgtcttgtgtagcacacccagtgttatggtgactgccccctatactgaagactgaaaattatttcacagttcactcatcaaatagttcccaaaattcgtcacatgctgcttattgggacaaataggtagtacattttccccatttaaaaaatgcggattttactcaggccggtaactttacagtcagaggacacgttcatcatgagtagcttttgttagtatgttttaaaatgtatcttcagttcaattattttcagcatttacaagacatctgaaaatggctattttgctaccaacagtaaatgaaggggctgtttaaaaaccacaaccagttttctacactattttttaaataatactttcatttgaaaaaaaggaattagttttcagatacacttcagagattgaagcaaactatttgccttttactcaaaagcctgcttgcctttacatggacttaccagcaaaataggtagaactttctcttttaaaaaaagtcaactagaattgagaagaggtgattttttttcagatcgcttctcgagtttaatattttcacattcttttcaccctttttctcaatctagatttaaaattaggatatatgtcatttccttgtctgtatttgtagctccttagttaccagtatgcctctccattttctacaaataagaggttataacacatatacataattctaaccttaagggaacacacgtttacatactttacttcccaagcccttcctgtttggggtacagattgagagagtcatgaatcaacacatctagcaagaccacaggtgtaagagtctaagatcgtcttcaaaattctgaagtcccagtctttacctgtccagtgaatgaatattcagagcagcttttcctgggcttcccagtggtgatagctgaggtcaaaccacaaaaaataagaaagcaagagtgaaatgcacccctccagagaaacactttgtagtgtttaattctgttaatagagaagagctgcttctgtttgcgctcacttcatcagtggcacccttctgcagaattttaatataaaaacattatggatataatagaactggattttctgacttaaaaatgtaagttttattttaatcttgaaacgtggattgtttctgtggagctcttaaacatgagaagaatacttacggttgataatgtgtaacatgatctgaaatgtgactaatttgagcctctttgtcccatcgtcctgtttttgaattattgacattgtcagtctctttgcttcctgggtgagacttggggtttgagggacagggaatgaccttcttggtgaaacttaaaatataacattgcaattgcagtgactttacagtgttaaattagagaaaatagtctgattttttaaaccttccttaactggaaaaaagtcacatggttttaccaggattgaaataaacagtcaatgtgacttttaacatgtgtttttttgaaataaagggcacgtactcttcaattaaaaagttccttatagggactctggcaaatgctaacacagttgctttacaatgtttacaattcagacaatacgacttataatagaaaatcctcattcatttagcattgaaaagctggaagttgcttctttaatgttgaatagtatacagtggtattgagcatggactttctaaatgttttatatatacatataaaaatatattggtgtctcacacccagaaagatgttatattgtagatattattaggaaaacagtgtttctcaggaacgttgtaaattttaaatgatatatgtacttcccgtcctcccacctccactctgtgctctaatgtgagactgcttcagcagtgttgctaagttaatggaaaactttttctaatcaagtcaggtgaatgtgtattctgctaaataatgttagccatttacatgaattgtatggtcattaaatggaatcagtgattcctctttaatttccagaggggaaatgaattatggaaatcagtcagcattctgatcattaaattttatactttaattttgccgttcagcattctaaatatccaatgtgaaagtcacatgataatttgttttgcattgcgtgcactgtacaacacttacaacttgtcatttaaaatgttttctcgggaaatgaatgctagtcagaaagtaatagattgtattattcatagttttaaaattatgacaatgtcataattactacaaagctaaataatcgtgtttatttttgtgcagttgccctttgatagttcctggttttaaaacctattaagtgtataatcttacaaatagtcatctacaaaatttatggagaaagtgcccagcccattcacatcacatggaccaggaattcttttgtaaatgacttaaggtaacatcatgcagttcagtgcctaataaatgctttttaatgatgaacatttctataatgactcgtaagataccatagtctgatttttctcacattaaaataactgaagtcacttgtgtaacgtagttatactttgctgcattttaattaaccttcaacagctattaaagtggaatgtaagttaaattttgaaggaaaggaaataaatgttttccatatttcgtcttgatttactttctgtatgagaacagctgtgtttttgataggtttatggtttgcatgagttcatatttaaagtgatccaggccaatgcatggctattgctgtaaatcttgatgtttatttctgccttgtaaagttctatcacggcctacctggaatttaaaattcagtagacaaattaattggtcctctgcacaacttttttaataagtagattattttacaaagaaatttgaacaaatttaattgaatcttttgtttagcttgcctctaagaacttttcttaataaagctcccaaaacttctcagcaaataaatctcccttaagtaggaaagctagatttcatatttgcttactttgaattaacagcaactttccacaggtaaatctgttcttgcaaagatgtgagcagaatagttaaaaataatatttttatgtttcatggttctaaatggaagccataaatgcagtaaatactatctgttgtttaactactttaatcgtcattttttacattttcaagtttattaggttaagaaaaacagggcagccttggaaggcagctactacagaaaactgcagttttgcgttaaagataaagtagtattttcagctccctgaaaaaccattcctgctgaaactgctgtagaaattgtgaagctgcatgagtggagagtattgaatctgtggttatagtagttttctcaggtttgtttatcttgatgtttgatgcactgtgttttatagttattaaaattgagtaatattatttctatgcagtgttatgtgtcattggccttttgtgaatgtgcatgttttaaactgcaaattttaaacattttgtcctctaattgttattaaaaatgaaataaactttaccattactt

SEQ ID NO: 109660 - DNA, 8270 bp, Homo sapiens
  Payload ID: 1537
  Gene Symbol: ATP8A1
  Gene Name: ATPase, aminophospholipid transporter (APLT), class I, type 8A, member 1
  Uniprot ID: Q9Y2Q0
  ENST ID: ENST00000381668
  CDS Start-End: 233-3727
aagagctcgcccagctctgcgggcgccgccaccttcgccgccaccgctgcctttctcctcctcctgtcggcgtgcgggggccgcgcccggcggcagctctgccctaggtgggcggcggcgcggcccaggctgcagctgagcgctctgcgcggcgcagccgggtctcccgcgtgtaccacgccgtgacaggtgcagagtccgggctgaggacccacctgcagccgccgccgcgatgcccaccatgcggaggaccgtgtcggagatccgctcgcgcgccgaaggttatgagaagacagatgatgtttcagagaagacctcactggctgaccaggaggaagtaaggactattttcatcaaccagccccagctgacaaaattctgcaataaccatgtcagcactgcaaaatacaacataatcacattccttccaagatttctctactctcagttcagaagagctgctaattcattttttctctttattgcactgctgcagcaaatacctgatgtgtcaccaacaggtcgttatacaacactggttcctctcttatttattttagctgtggcagctatcaaagagataatagaagatattaaacgacataaagctgataatgcagtgaacaagaaacaaacgcaagttttgagaaatggtgcttgggaaattgtccactgggaaaaggtggcagtaggggagatagtgaaagtgaccaatggggaacatctcccagcagatctcatcagtctgtcctcaagtgagccccaagccatgtgctacattgaaacatccaacttagatggtgaaacaaacttgaaaattagacagggcttaccagcaacatcagatatcaaagacgttgacagtttgatgaggatttctggcagaattgagtgtgaaagtccaaacagacatctctacgattttgttggaaacataaggcttgatggacatggcaccgttccactgggagcagatcagattcttcttcgaggagctcagttgagaaatacacagtgggttcatggaatagttgtctacactggacatgacaccaagctgatgcagaattcaacaagtccaccacttaagctctcaaatgtggaacggattacaaatgtacaaattttgattttattttgtatcttaattgccatgtctcttgtctgttctgtgggctcagccatttggaatcgaaggcattctggaaaagactggtatctcaatctaaactatggtggcgctagtaattttggactgaatttcttgaccttcatcatccttttcaacaatctcattcctatcagcttattggttacattagaagttgtgaaatttacccaggcatacttcataaattgggatcttgacatgcactatgaacccacagacactgctgctatggctcgaacatctaatctgaatgaggaacttggccaggttaaatacatattttctgacaaaactggtactctgacatgcaatgtaatgcagtttaagaagtgcaccatagcgggagttgcttatggccatgtccctgaacctgaggattatggctgctctcctgatgaatggcagaactcacagtttggagatgaaaaaacatttagtgattcatcattgctggaaaatctccaaaataatcatccaactgcacctataatatgtgaatttcttacaatgatggcagtctgtcacacagcagtgccagagcgagaaggtgacaagattatttatcaagcagcatctccagatgagggagcattggtcagagcagccaagcaattgaattttgttttcactggaagaacacccgactcggtgattatagattcactggggcaggaagaaagatatgaattgctcaatgtcttggagtttaccagtgctaggaaaagaatgtcagtgattgttcgcactccatctggaaagttacgactctactgcaaaggagctgacactgtaatttatgatcgactggcagagacgtcaaaatacaaagaaattaccctaaaacatttagagcagtttgctacagaagggttaagaactttatgttttgctgtggctgagatttcagagagcgactttcaggagtggcgagcagtctatcagcgagcatctacatctgtgcagaacaggctactcaaactcgaagagagttatgagttgattgaaaagaatcttcagctacttggagcaacagccattgaggataaattacaagatcaagtgcctgaaaccatagaaacgctaatgaaagcagacatcaaaatctggatccttacaggggacaagcaagaaactgccattaacatcggacactcctgcaaactgttgaagaagaacatgggaatgattgttataaatgaaggctctcttgatggaacaagggaaactctcagtcgtcactgtactacccttggtgatgctctccggaaagagaatgattttgctcttataattgatgggaaaaccctcaaatatgccttaacctttggagtacgacagtatttcctggacttagctttgtcatgcaaagctgtcatttgctgtcgggtttctcctcttcaaaaatctgaagttgttgagatggttaagaaacaagtcaaagtcgtaacgcttgcaatcggtgatggagcaaatgatgtcagcatgatacagacagcgcacgttggtgttggtatcagtggcaatgaaggcctgcaggcagctaattcctctgactactccatagctcagttcaaatatttgaagaatttactgatgattcatggtgcctggaactataacagagtctccaagtgcatcttatactgcttctacaagaatatagtgctctatattatcgagatctggtttgcctttgttaatggcttttctggacagatcctctttgaaagatggtgtataggtctctataacgtgatgtttacagcaatgcctcctttaactcttggaatatttgagagatcatgcagaaaagagaacatgttgaagtaccctgaattatacaaaacatctcagaatgccctggacttcaacaccaaggttttctgggttcattgtttaaatggcctcttccactcagttattctgttttggtttccactaaaagcccttcagtatggtactgcatttggaaatgggaaaacctcggattatctgctactgggaaactttgtgtacacttttgtggtgataactgtgtgtttgaaagctggattggagacatcatattggacatggttcagccacatagcgatatgggggagcatcgcactctgggtggtgttttttggaatctactcatctctgtggcctgccattccgatggcccctgatatgtcaggagaggcagccatgttgttcagttctggagtcttttggatgggcttgttattcatccctgtggcatctctgctccttgatgtggtgtacaaggttatcaagaggactgcttttaaaacattggtcgatgaagttcaggagctggaggcaaaatctcaagacccaggagcagttgtacttggaaaaagcctgaccgagagggcgcaactgctcaagaacgtctttaagaagaaccacgtgaacttgtaccgctctgaatccttgcaacaaaatctgctccatgggtatgcgttctctcaagatgaaaatggaatcgtttcacagtctgaagtgataagagcatatgataccacgaaacagaggcccgacgaatggtgatggggagagcctgaaaggcaggctctgttacctctctaaggagagctaccaggttgtcaccgcagtctgctaaccaattccagtctggtccatgaagaggaaaggtagatctgagctcatctcgctgatggacattcagattcatgtatattatagacataagcactgtgcaactgtactgtaacaccatctcttttggatttttttaaggtatttgctaagtctttgtaaacggaaattgaaaatgacctggtatcttgccagagggctttcttaaacggagaataagtcagtattcttatgccattactgtggggctgtaactgactgtcagtttattggctgtaccacaaggtaaccaaccattaaaaaactctaaatgatatttagttaaagggactcttggtatccagacttagatttcaggatatgctgaaacaaaccagcattcttaaggaactgactcaccttcctgagcaaaatttctaaacaagcatttgtgtccaaaattgtcttgataaatgtttgccaaagaggttcagtaagtgtttttctagttcagtagtcatatgcccagaaatgtaagagaaagtttacttccagttccgctgtaagatctgcatgcctgactttccaaatgtaagagtgatttacaaaaatgaatatttcaaggcatttgctactaaaatcggtgatgttgcacctttggccttacaaatgcttctttgttgtttgtcgtgtttatttgttagaggacacacgtgttaatgtgactctgttgttatgacactgatttttcaaactatgtatgtttcaggtatttctgatgaagtttcatcatcatttagatttttctaaaaatctggctaatgcagtagattgagtgatgtcattttgtcttaaagtttttcctcttaagaaacatatgctacgtatttacgtgggatttccaaagcttctgttgcaatatttggaataacatgtcagataaatgcatgggcttttgtcctgtgttccagttcccactagagatgcctgtgtcttgtgtagcacacccagtgttatggtgactgccccctatactgaagactgaaaattatttcacagttcactcatcaaatagttcccaaaattcgtcacatgctgcttattgggacaaataggtagtacattttccccatttaaaaaatgcggattttactcaggccggtaactttacagtcagaggacacgttcatcatgagtagcttttgttagtatgttttaaaatgtatcttcagttcaattattttcagcatttacaagacatctgaaaatggctattttgctaccaacagtaaatgaaggggctgtttaaaaaccacaaccagttttctacactattttttaaataatactttcatttgaaaaaaaggaattagttttcagatacacttcagagattgaagcaaactatttgccttttactcaaaagcctgcttgcctttacatggacttaccagcaaaataggtagaactttctcttttaaaaaaagtcaactagaattgagaagaggtgattttttttcagatcgcttctcgagtttaatattttcacattcttttcaccctttttctcaatctagatttaaaattaggatatatgtcatttccttgtctgtatttgtagctccttagttaccagtatgcctctccattttctacaaataagaggttataacacatatacataattctaaccttaagggaacacacgtttacatactttacttcccaagcccttcctgtttggggtacagattgagagagtcatgaatcaacacatctagcaagaccacaggtgtaagagtctaagatcgtcttcaaaattctgaagtcccagtctttacctgtccagtgaatgaatattcagagcagcttttcctgggcttcccagtggtgatagctgaggtcaaaccacaaaaaataagaaagcaagagtgaaatgcacccctccagagaaacactttgtagtgtttaattctgttaatagagaagagctgcttctgtttgcgctcacttcatcagtggcacccttctgcagaattttaatataaaaacattatggatataatagaactggattttctgacttaaaaatgtaagttttattttaatcttgaaacgtggattgtttctgtggagctcttaaacatgagaagaatacttacggttgataatgtgtaacatgatctgaaatgtgactaatttgagcctctttgtcccatcgtcctgtttttgaattattgacattgtcagtctctttgcttcctgggtgagacttggggtttgagggacagggaatgaccttcttggtgaaacttaaaatataacattgcaattgcagtgactttacagtgttaaattagagaaaatagtctgattttttaaaccttccttaactggaaaaaagtcacatggttttaccaggattgaaataaacagtcaatgtgacttttaacatgtgtttttttgaaataaagggcacgtactcttcaattaaaaagttccttatagggactctggcaaatgctaacacagttgctttacaatgtttacaattcagacaatacgacttataatagaaaatcctcattcatttagcattgaaaagctggaagttgcttctttaatgttgaatagtatacagtggtattgagcatggactttctaaatgttttatatatacatataaaaatatattggtgtctcacacccagaaagatgttatattgtagatattattaggaaaacagtgtttctcaggaacgttgtaaattttaaatgatatatgtacttcccgtcctcccacctccactctgtgctctaatgtgagactgcttcagcagtgttgctaagttaatggaaaactttttctaatcaagtcaggtgaatgtgtattctgctaaataatgttagccatttacatgaattgtatggtcattaaatggaatcagtgattcctctttaatttccagaggggaaatgaattatggaaatcagtcagcattctgatcattaaattttatactttaattttgccgttcagcattctaaatatccaatgtgaaagtcacatgataatttgttttgcattgcgtgcactgtacaacacttacaacttgtcatttaaaatgttttctcgggaaatgaatgctagtcagaaagtaatagattgtattattcatagttttaaaattatgacaatgtcataattactacaaagctaaataatcgtgtttatttttgtgcagttgccctttgatagttcctggttttaaaacctattaagtgtataatcttacaaatagtcatctacaaaatttatggagaaagtgcccagcccattcacatcacatggaccaggaattcttttgtaaatgacttaaggtaacatcatgcagttcagtgcctaataaatgctttttaatgatgaacatttctataatgactcgtaagataccatagtctgatttttctcacattaaaataactgaagtcacttgtgtaacgtagttatactttgctgcattttaattaaccttcaacagctattaaagtggaatgtaagttaaattttgaaggaaaggaaataaatgttttccatatttcgtcttgatttactttctgtatgagaacagctgtgtttttgataggtttatggtttgcatgagttcatatttaaagtgatccaggccaatgcatggctattgctgtaaatcttgatgtttatttctgccttgtaaagttctatcacggcctacctggaatttaaaattcagtagacaaattaattggtcctctgcacaacttttttaataagtagattattttacaaagaaatttgaacaaatttaattgaatcttttgtttagcttgcctctaagaacttttcttaataaagctcccaaaacttctcagcaaataaatctcccttaagtaggaaagctagatttcatatttgcttactttgaattaacagcaactttccacaggtaaatctgttcttgcaaagatgtgagcagaatagttaaaaataatatttttatgtttcatggttctaaatggaagccataaatgcagtaaatactatctgttgtttaactactttaatcgtcattttttacattttcaagtttattaggttaagaaaaacagggcagccttggaaggcagctactacagaaaactgcagttttgcgttaaagataaagtagtattttcagctccctgaaaaaccattcctgctgaaactgctgtagaaattgtgaagctgcatgagtggagagtattgaatctgtggttatagtagttttctcaggtttgtttatcttgatgtttgatgcactgtgttttatagttattaaaattgagtaatattatttctatgcagtgttatgtgtcattggccttttgtgaatgtgcatgttttaaactgcaaattttaaacattttgtcctctaattgttattaaaaatgaaataaactttaccattacttaaaa

SEQ ID NO: 109661 - DNA, 920 bp, Homo sapiens
  Payload ID: 1537
  Gene Symbol: ATP8A1
  Gene Name: ATPase, aminophospholipid transporter (APLT), class I, type 8A, member 1
  ENST ID: ENST00000506602
  CDS Start-End: 1-427
agctgtcatttgctgtcgggtttctcctcttcaaaaatctgaagttgttgagatggttaagaaacaagtcaaagtcgtaacgcttgcaatcggtgatggagcaaatgatgtcagcatgatacagacagcgcacgttggtgttggtatcagtggcaatgaaggcctgcaggcagctaattcctctgactactccatagctcagttcaaatatttgaagaatttactgatgattcatggtgcctggaactataacagagtctccaagtgcatcttatactgcttctacaagaatatagtgctctatattatcgagatctggtttgcctttgttaatggcttttctggacagatcctctttgaaagatggtgtataggtctctataacgtgtttgtgcgctttagatgtttacagcaatgcctcctttaactcttggaatatttgagagatcatgcagaaaagagaacatgttgaagtaccctgaattatacaaaacatctcagaatgccctggacttcaacaccaaggttttctgggttcattgtttaaatggcctcttccactcagttattctgttttggtttccactaaaagcccttcagtatggtactgcatttggaaatgggaaaacctcggattatctgctactgggaaactttgtgtacacttttgtggtgataactgtgtgtttgaaagctggattggagacatcatattggacatggttcagccacatagcgatatgggggagcatcgcactctgggtggtgttttttggaatctactcatctctgtggcctgccattccgatggcccctgatatgtcaggagaggcagccatgttgttcagttctggagtcttttggatgggcttgttattcatccctgtggcatctctgctccttgatgtggtgtacaaggt

SEQ ID NO: 109662 - DNA, 5918 bp, Homo sapiens
  Payload ID: 1537
  Gene Symbol: ATP8A1
  Gene Name: ATPase, aminophospholipid transporter (APLT), class I, type 8A, member 1
  ENST ID: ENST00000514372
  CDS Start-End: 1-228
aatcttcagctacttggagcaacagccattgaggataaattacaagatcaagtgcctgaaaccatagaaacgctaatgaaagcagacatcaaaatctggatccttacaggggacaagcaagaaactgccattaacatcggacactcctgcaaactgttgaagaagaacatgggaatgattgttataaatgaaggctctcttgatggtttctcctcttcaaaaatctgaagttgttgagatggttaagaaacaagtcaaagtcgtaacgcttgcaatcggtgatggagcaaatgatgtcagcatgatacagacagcgcacgttggtgttggtatcagtggcaatgaaggcctgcaggcagctaattcctctgactactccatagctcagttcaaatatttgaagaatttactgatgattcatggtgcctggaactataacagagtctccaagtgcatcttatactgcttctacaagaatatagtgctctatattatcgagatctggtttgcctttgttaatggcttttctggacagatcctctttgaaagatggtgtataggtctctataacgtgatgtttacagcaatgcctcctttaactcttggaatatttgagagatcatgcagaaaagagaacatgttgaagtaccctgaattatacaaaacatctcagaatgccctggacttcaacaccaaggttttctgggttcattgtttaaatggcctcttccactcagttattctgttttggtttccactaaaagcccttcagtatggtactgcatttggaaatgggaaaacctcggattatctgctactgggaaactttgtgtacacttttgtggtgataactgtgtgtttgaaagctggattggagacatcatattggacatggttcagccacatagcgatatgggggagcatcgcactctgggtggtgttttttggaatctactcatctctgtggcctgccattccgatggcccctgatatgtcaggagaggcagccatgttgttcagttctggagtcttttggatgggcttgttattcatccctgtggcatctctgctccttgatgtggtgtacaaggttatcaagaggactgcttttaaaacattggtcgatgaagttcaggagctggaggcaaaatctcaagacccaggagcagttgtacttggaaaaagcctgaccgagagggcgcaactgctcaagaacgtctttaagaagaaccacgtgaacttgtaccgctctgaatccttgcaacaaaatctgctccatgggtatgcgttctctcaagatgaaaatggaatcgtttcacagtctgaagtgataagagcatatgataccacgaaacagaggcccgacgaatggtgatggggagagcctgaaaggcaggctctgttacctctctaaggagagctaccaggttgtcaccgcagtctgctaaccaattccagtctggtccatgaagaggaaaggtagatctgagctcatctcgctgatggacattcagattcatgtatattatagacataagcactgtgcaactgtactgtaacaccatctcttttggatttttttaaggtatttgctaagtctttgtaaacggaaattgaaaatgacctggtatcttgccagagggctttcttaaacggagaataagtcagtattcttatgccattactgtggggctgtaactgactgtcagtttattggctgtaccacaaggtaaccaaccattaaaaaactctaaatgatatttagttaaagggactcttggtatccagacttagatttcaggatatgctgaaacaaaccagcattcttaaggaactgactcaccttcctgagcaaaatttctaaacaagcatttgtgtccaaaattgtcttgataaatgtttgccaaagaggttcagtaagtgtttttctagttcagtagtcatatgcccagaaatgtaagagaaagtttacttccagttccgctgtaagatctgcatgcctgactttccaaatgtaagagtgatttacaaaaatgaatatttcaaggcatttgctactaaaatcggtgatgttgcacctttggccttacaaatgcttctttgttgtttgtcgtgtttatttgttagaggacacacgtgttaatgtgactctgttgttatgacactgatttttcaaactatgtatgtttcaggtatttctgatgaagtttcatcatcatttagatttttctaaaaatctggctaatgcagtagattgagtgatgtcattttgtcttaaagtttttcctcttaagaaacatatgctacgtatttacgtgggatttccaaagcttctgttgcaatatttggaataacatgtcagataaatgcatgggcttttgtcctgtgttccagttcccactagagatgcctgtgtcttgtgtagcacacccagtgttatggtgactgccccctatactgaagactgaaaattatttcacagttcactcatcaaatagttcccaaaattcgtcacatgctgcttattgggacaaataggtagtacattttccccatttaaaaaatgcggattttactcaggccggtaactttacagtcagaggacacgttcatcatgagtagcttttgttagtatgttttaaaatgtatcttcagttcaattattttcagcatttacaagacatctgaaaatggctattttgctaccaacagtaaatgaaggggctgtttaaaaaccacaaccagttttctacactattttttaaataatactttcatttgaaaaaaaggaattagttttcagatacacttcagagattgaagcaaactatttgccttttactcaaaagcctgcttgcctttacatggacttaccagcaaaataggtagaactttctcttttaaaaaaagtcaactagaattgagaagaggtgattttttttcagatcgcttctcgagtttaatattttcacattcttttcaccctttttctcaatctagatttaaaattaggatatatgtcatttccttgtctgtatttgtagctccttagttaccagtatgcctctccattttctacaaataagaggttataacacatatacataattctaaccttaagggaacacacgtttacatactttacttcccaagcccttcctgtttggggtacagattgagagagtcatgaatcaacacatctagcaagaccacaggtgtaagagtctaagatcgtcttcaaaattctgaagtcccagtctttacctgtccagtgaatgaatattcagagcagcttttcctgggcttcccagtggtgatagctgaggtcaaaccacaaaaaataagaaagcaagagtgaaatgcacccctccagagaaacactttgtagtgtttaattctgttaatagagaagagctgcttctgtttgcgctcacttcatcagtggcacccttctgcagaattttaatataaaaacattatggatataatagaactggattttctgacttaaaaatgtaagttttattttaatcttgaaacgtggattgtttctgtggagctcttaaacatgagaagaatacttacggttgataatgtgtaacatgatctgaaatgtgactaatttgagcctctttgtcccatcgtcctgtttttgaattattgacattgtcagtctctttgcttcctgggtgagacttggggtttgagggacagggaatgaccttcttggtgaaacttaaaatataacattgcaattgcagtgactttacagtgttaaattagagaaaatagtctgattttttaaaccttccttaactggaaaaaagtcacatggttttaccaggattgaaataaacagtcaatgtgacttttaacatgtgtttttttgaaataaagggcacgtactcttcaattaaaaagttccttatagggactctggcaaatgctaacacagttgctttacaatgtttacaattcagacaatacgacttataatagaaaatcctcattcatttagcattgaaaagctggaagttgcttctttaatgttgaatagtatacagtggtattgagcatggactttctaaatgttttatatatacatataaaaatatattggtgtctcacacccagaaagatgttatattgtagatattattaggaaaacagtgtttctcaggaacgttgtaaattttaaatgatatatgtacttcccgtcctcccacctccactctgtgctctaatgtgagactgcttcagcagtgttgctaagttaatggaaaactttttctaatcaagtcaggtgaatgtgtattctgctaaataatgttagccatttacatgaattgtatggtcattaaatggaatcagtgattcctctttaatttccagaggggaaatgaattatggaaatcagtcagcattctgatcattaaattttatactttaattttgccgttcagcattctaaatatccaatgtgaaagtcacatgataatttgttttgcattgcgtgcactgtacaacacttacaacttgtcatttaaaatgttttctcgggaaatgaatgctagtcagaaagtaatagattgtattattcatagttttaaaattatgacaatgtcataattactacaaagctaaataatcgtgtttatttttgtgcagttgccctttgatagttcctggttttaaaacctattaagtgtataatcttacaaatagtcatctacaaaatttatggagaaagtgcccagcccattcacatcacatggaccaggaattcttttgtaaatgacttaaggtaacatcatgcagttcagtgcctaataaatgctttttaatgatgaacatttctataatgactcgtaagataccatagtctgatttttctcacattaaaataactgaagtcacttgtgtaacgtagttatactttgctgcattttaattaaccttcaacagctattaaagtggaatgtaagttaaattttgaaggaaaggaaataaatgttttccatatttcgtcttgatttactttctgtatgagaacagctgtgtttttgataggtttatggtttgcatgagttcatatttaaagtgatccaggccaatgcatggctattgctgtaaatcttgatgtttatttctgccttgtaaagttctatcacggcctacctggaatttaaaattcagtagacaaattaattggtcctctgcacaacttttttaataagtagattattttacaaagaaatttgaacaaatttaattgaatcttttgtttagcttgcctctaagaacttttcttaataaagctcccaaaacttctcagcaaataaatctcccttaagtaggaaagctagatttcatatttgcttactttgaattaacagcaactttccacaggtaaatctgttcttgcaaagatgtgagcagaatagttaaaaataatatttttatgtttcatggttctaaatggaagccataaatgcagtaaatactatctgttgtttaactactttaatcgtcattttttacattttcaagtttattaggttaagaaaaacagggcagccttggaaggcagctactacagaaaactgcagttttgcgttaaagataaagtagtattttcagctccctgaaaaaccattcctgctgaaactgctgtagaaattgtgaagctgcatgagtggagagtattgaatctgtggttatagtagttttctcaggtttgtttatcttgatgtttgatgcactgtgttttatagttattaaaattgagtaatattatttctatgcagtgttatgtgtcattggccttttgtgaatgtgcatgttttaaactgcaaattttaaacattttgtcctctaattgttattaaaaatgaaataaactttaccattacttaaaa

SEQ ID NO: 109663 - DNA, 2238 bp, Homo sapiens
  Payload ID: 1537
  Gene Symbol: ATP8A1
  Gene Name: ATPase, aminophospholipid transporter (APLT), class I, type 8A, member 1
  ENST ID: ENST00000510289
  CDS Start-End: 221-388
agctctgcgggcgccgccaccttcgccgccaccgctgcctttctcctcctcctgtcggcgtgcgggggccgcgcccggcggcagctctgccctaggtgggcggcggcgcggcccaggctgcagctgagcgctctgcgcggcgcagccgggtctcccgcgtgtaccacgccgtgacaggtgcagagtccgggctgaggacccacctgcagccgccgccgcgatgcccaccatgcggaggaccgtgtcggagatccgctcgcgcgccgaaggttatgagaagacagatgatgtttcagagaagacctcactggctgaccaggaggaagtaaggactattttcatcaaccagccccagctgacaaaattctgcaataaccatgtcaggtaagaactaccaaagaatgccatgagaccagccagcagagcagagctggttaggtcaaaatgaaaatgcttgcaaagagctttcagtgcagtcagttaatatttgagagctccctgttggcagtgtgaataggctgtttccccatcttctctcccatagagaaatattcataagaatctggaaatagcgaggagcagaaagaataagcacccatcctctgccgatgctgcatagatattgaataatgaaagctgcttatgtgtaaatgcctctgtcctaaacctgttaatagagcgatgcgttactggttttggttagcaagttttaacattttagaagaggtctttgcaattctgcaccaagaattccttctggttatatagtctttaagtattggtttttgatagttgtgaagtttagtatggtgtggaggaatggagggctgtgcgaattacttcactgcactgttgtgttttcattccaacaataatgtaaaaagtatctgtgtaagcactggccacttatgcggcttctgggaccacataaacaccttcaataccaataaagtgtttctccagtggcagagttaactagatttgagaagtgcccacttaatatgtacaatttcaaattctagaggaacatttctcaatttgggtaatgtggcatgtgtctgctttaatctcctttctatttgataaacaagaggaagatctgggtgtttctaagacctaagtagtgatatcttactgatgtgggcatatctggtgtgtttagtgtggatttctagccatgttcctggagtggcagtgaagaaaattcaaacagaaccccagagatctccctgaaattatccaggaaaggcatctctgtttacagtgtctggtcaaattgctcaaattgctgatttcggggttcttttggcaagattttattttctagtcacacgttgtactctgtcttatggagggctggagccctttaactccaaagttgctcttctttgtaagctacttctagtaatgttaagcagaataattggccaaataggacaaaagattatgcaaaaaaaaaaaaatctgtggtattcatgctttaccatttatttaaccttttcactctttttcatttaggttaatgaccctttgcaatattctcccaatttgaaacagccggcaaatgttccttatctaactttttatatgttagtaacagaactttgtaagtgtgggtgctaattatggagaagttttatgctacttttcatttttgttttctagcactgcaaaatacaacataatcacattccttccaagatttctctactctcagttcagaagagctgctaattcattttttctctttattgcactgctgcaggtaaagtcacgtcataaaaccttgtcaaatgttcaggtactaataaatgttaagcccgtgaccaatcccctgaggtttatgtaaatgccgagagataagctggttttggtggacatttctggctcctgctgcaagcagtgttggaatccactaccttttccagccttttgattcatttttatcagcttattttgggtgttctataaatttgatgtggcaaggactgttcattttgggtggtaaaggggatgggacgttttcttaaaatgctaattttcatagtaaaagtatcaactctgaaccttagaatgcaagaagttaaatcttgtgcttctctttgtatttaaattagttgtagtcagaaaaagttttagtttattaaaaagtagcatattgaacatatgcttaaatttgaaaaaatattttcattgaacttgaaaataaaaaatttttaaaacaccacaaaacacaag

SEQ ID NO: 109664 - DNA, 469 bp, Homo sapiens
  Payload ID: 1537
  Gene Symbol: ATP8A1
  Gene Name: ATPase, aminophospholipid transporter (APLT), class I, type 8A, member 1
  ENST ID: ENST00000515872
  CDS Start-End: 1-342
gtttctcctcttcaaaaatctgaagttgttgagatggttaagaaacaagtcaaagtcgtaacgcttgcaatcggtgatggagcaaatgatgtcagcatgatacagacagcgcacgttggtgttggtatcagtggcaatgaaggcctgcaggcagctaattcctctgactactccatagctcagttcaaatatttgaagaatttactgatgattcatggtgcctggaactataacagagtctccaagtgcatcttatactgcttctacaagaatatagtgctctatattatcgagaacactgacattcaagcaaataacaatttatacagtttatttacatagatttatcaagataccaggaatttaaagccactgccagcaataaatctgcttataaaaagttaattttataaaataagaatgtccaacttgtcgctttttaaatctaaattgacagcaataaagtaga

SEQ ID NO: 109665 - DNA, 326 bp, Homo sapiens
  Payload ID: 1537
  Gene Symbol: ATP8A1
  Gene Name: ATPase, aminophospholipid transporter (APLT), class I, type 8A, member 1
  ENST ID: ENST00000504024
  CDS Start-End: 1-90
aaacgacataaagctgataatgcagtgaacaagaaacaaacgcaagttttgagaaatggtgcttgggaaattgtccactgggaaaagtgagccccaagccatgtgctacattgaaacatccaacttagatggtgaaacaaacttgaaaattagacagggcttaccagcaacatcagatatcaaagacgttgacagtttgatgaggatttctggcagaattgagtgtgaaagtccaaacagacatctctacgattttgttggaaacataaggcttgatggacatggcaccgttccactgggagcagatcagattcttcttcgaggag

SEQ ID NO: 109666 - DNA, 3287 bp, Homo sapiens
  Payload ID: 1538
  Gene Symbol: ATP8A2
  Gene Name: ATPase, aminophospholipid transporter, class I, type 8A, member 2
  ENST ID: ENST00000255283
  CDS Start-End: 1-2985
atgtcccgggccacgtctgttggagaccagctggaggcacccgcccgcaccatttacctcaaccaaccgcatctcaacaaattccgcgacaaccagatcagtacggccaagtacagcgtgttgacatttctacctcgattcttgtatgagcagattagaagagctgctaatgccttctttctcttcattgccttattacagcaaattccagatgtatctccaacaggaagatataccaccctggtgccattgatcattattttaacaattgcaggcatcaaagagattgtagaagattttaagcgacacaaggcagacaatgcagttaacaaaaagaaaacaatagtgttaagaaatggtatgtggcataccattatgtggaaagaggtggcagtgggagacattgtgaaggtcgtcaatgggcagtatcttccagcagatgtggtcctgctgtcatccagtgaacctcaggcaatgtgttatgttgaaacagctaatctggatggggagacgaaccttaaaatacgtcagggtttgagtcacactgctgacatgcaaacacgtgaagttctgatgaagttatctggaactatagagtgtgaagggcccaaccgccacctctatgacttcactggaaacttgaacttagatgggaaaagccttgttgcccttgggcctgaccagatcttattaagaggtacacagcttagaaatactcagtgggtctttggcatagttgtttatactggacacgacaccaaactcatgcagaattcaaccaaagcgcctctcaagagatcaaatgttgagaaggtgactaacgtgcagatcctggtgttgtttggcatcctcttggtcatggccttggtgagctcggcgggggccctgtactggaacaggtctcatggtgaaaagaactggtacatcaagaagatggacaccacctcagataattttggatacaacctactgacgttcatcatcttatacaacaatcttattcccatcagtctgttggtgactcttgaggttgtgaagtatactcaagcccttttcataaactgggacacagatatgtattatataggaaatgacactcctgccatggccaggacatcaaaccttaatgaagagcttgggcaggtgaaatatctcttttctgacaagactggaacgcttacatgcaatatcatgaactttaagaagtgcagcattgccggagtaacctatggtcacttcccagaattggcaagagagccgtcttcagatgacttctgtcggatgcctcctccctgtagtgattcctgtgactttgatgaccccaggctgttgaagaacattgaggatcgccatcccacagccccttgcattcaggagttcctcacccttctggccgtgtgccacacggttgttcctgagaaggatggagataacatcatctaccaggcctcttccccagatgaagctgctttggtgaaaggagctaaaaagctgggctttgtcttcacagccagaacaccattctcagtcatcatagaagcggtgagtaacatgcgtgtgcatttcagatcacctgcttttgtgaagattgtgtgtgtgaaatggcatgtctattgtaaatatgttcaggccacaagggcagccattactcagcactgcactgaccttgggaatttgctgggcaaggaaaatgacgtggccctgatcatcgatggccacaccctgaagtacgcgctctccttcgaagtccggaggagtttcctggatttggcactctcgtgcaaagcggtcatatgctgcagagtgtctcctctgcagaagtctgagatagtggatgtggtgaagaagcgggtgaaggccatcaccctcgccatcggagacggcgccaacgatgtcgggatgatccagacagcccacgtgggtgtgggaatcagtgggaatgaaggcatgcaggccaccaacaactcggattacgccatcgcacagttttcctacttagagaagcttctgttggttcatggagcctggagctacaaccgggtgaccaagtgcatcttgtactgcttctataagaacgtggtcctgtatattattgagctttggttcgcctttgttaatggattttctgggcagattttatttgaacgttggtgcatcggcctgtacaatgtgattttcaccgctttgccgcccttcactctgggaatctttgagaggtcttgcactcaggagagcatgctcaggtttccccagctctacaaaatcacccagaatggcgaaggcttcaacacaaaggttttctggggtcactgcatcaacgccttggtccactccctcatcctcttctggtttcccatgaaagctctggagcatgatactgtgttgacaagtggtcatgctaccgactatttatttgttggaaatattgtttacacatatgttgttgttactgtttgtctgaaagctggtttggagaccacagcttggactaaattcagtcatctggctgtctggggaagcatgctgacctggctggtgttttttggcatctactcgaccatctggcccaccattcccattgctccagatatgagaggacaggcaactatggtcctgagctccgcacacttctggttgggattatttctggttcctactgcctgtttgattgaagatgtggcatggagagcagccaagcacacctgcaaaaagacattgctggaggaggtgcaggagctggaaaccaagtctcgagtcctgggaaaagcggtgctgcgggatagcaatggaaagaggctgaacgagcgcgaccgcctgatcaagaggctgggccggaagacgcccccgacgctgttccggggcagctccctgcagcagggcgtcccgcatgggtatgctttttctcaagaagaacacggagctgttagtcaggaagaagtcatccgtgcttatgacaccaccaaaaagaaatccaggaagaaataagacatgaattttcctgactgatcttaggaaagagattcagtttgttgcacccagtgttaacacatctttgtcagagaagactggcgtcagcagccaaaacaccaggaaacacatttctgtggccttagccaagcagtttgttagttacatattccctcgcaaacctggagtgcagaccacaggggaagctatctttgccctcccaactcgtctgcagtgcttagcctaacttttgtttatgtcgttatgaagcattcaactgtgctctgtgaggtgtgaaattaaaaacattatgtttcacc

SEQ ID NO: 109667 - DNA, 3891 bp, Homo sapiens
  Payload ID: 1538
  Gene Symbol: ATP8A2
  Gene Name: ATPase, aminophospholipid transporter, class I, type 8A, member 2
  ENST ID: ENST00000281620
  CDS Start-End: 393-2324
cctgttcgttcttctttgggctataagaaggcagaggatgagatgtcccgggccacgtctgttggagaccagctggaggcacccgcccgcaccatttacctcaaccaaccgcatctcaacaaattccgcgacaaccagatcagtacggccaagtacagcgtgttgacatttctacctcgattcttgtatgagcagattagaagagctgctaatgccttctttctcttcattgccttattacagatgtatctccaacaggaagatataccaccctggtgccattgatcattattttaacaattgcaggcatcaaagagattgtagaagattttaagcgacacaaggcagacaatgcagttaacaaaaagaaaacaatagtgttaagaaatggtatgtggcataccattatgtggaaagaggtggcagtgggagacattgtgaaggtcgtcaatgggcagtatcttccagcagatgtggtcctgctgtcatccagtgaacctcaggcaatgtgttatgttgaaacagctaatctggatggggagacgaaccttaaaatacgtcagggtttgagtcacactgctgacatgcaaacacgtgaagttctgatgaagttatctggaactatagagtgtgaagggcccaaccgccacctctatgacttcactggaaacttgaacttagatgggaaaagccttgttgcccttgggcctgaccagatcttattaagaggtacacagcttagaaatactcagtgggtctttggcatagttgtttatactggacacgacaccaaactcatgcagaattcaaccaaagcgcctctcaagagatcaaatgttgagaaggtgactaacgtgcagatcctggtgttgtttggcatcctcttggtcatggccttggtgagctcggcgggggccctgtactggaacaggtctcatggtgaaaagaactggtacatcaagaagatggacaccacctcagataattttggatacaacctactgacgttcatcatcttatacaacaatcttattcccatcagtctgttggtgactcttgaggttgtgaagtatactcaagcccttttcataaactgggacacagatatgtattatataggaaatgacactcctgccatggccaggacatcaaaccttaatgaagagcttgggcaggtgaaatatctcttttctgacaagactggaacgcttacatgcaatatcatgaactttaagaagtgcagcattgccggagtaacctatggtcacttcccagaattggcaagagagccgtcttcagatgacttctgtcggatgcctcctccctgtagtgattcctgtgactttgatgaccccaggctgttgaagaacattgaggatcgccatcccacagccccttgcattcaggagttcctcacccttctggccgtgtgccacacggttgttcctgagaaggatggagataacatcatctaccaggcctcttccccagatgaagctgctttggtgaaaggagctaaaaagctgggctttgtcttcacagccagaacaccattctcagtcatcatagaagcgatgggacaggaacaaacattcggaatccttaatgtcctggaattttctagtgacagaaaaagaatgtctgtaattgttcgaactccttcaggacgacttcggctttactgtaaaggggctgataatgtgatttttgagagactttcaaaagactcaaaatatatggaggaaacattatgccatctggaatactttgccacggaaggcttgcggactctctgtgtggcttatgctgatctctctgagaatgagtatgaggagtggctgaaagtctatcaggaagccagcaccatattgaaggacagagctcaacggttggaagagtgttacgagatcattgagaagaatttgctgctacttggagccacagccatagaagatcgccttcaagcaggagttccagaaaccatcgcaacactgttgaaggcagaaattaaaatatgggtgttgacaggagacaaacaagaaactgcgattaatatagggtattcctgccgattggtatcgcagaatatggcccttatcctattgaaggaggactctttggatgccacaagggcagccattactcagcactgcactgaccttgggaatttgctgggcaaggaaaatgacgtggccctgatcatcgatggccacaccctgaagtacgcgctctccttcgaagtccggaggagtttcctggatttggcactctcgtgcaaagcggtcatatgctgcaggtctttatttttgtccaaatggagataaattctctagcacagactaccaggggagaggactttgacctcttgagaacactcagaaatctttaaagtgactgtctcgtcaggaaaagagtcatgaaagaatcatcagtgaccccctgtgaggacgttagtgatggccccatcagagtccccagcaaatacagagtgtctcctctgcagaagtctgagatagtggatgtggtgaagaagcgggtgaaggccatcaccctcgccatcggagacggcgccaacgatgtcgggatgatccagacagcccacgtgggtgtgggaatcagtgggaatgaaggcatgcaggccaccaacaactcggattacgccatcgcacagttttcctacttagagaagcttctgttggttcatggagcctggagctacaaccgggtgaccaagtgcatcttgtactgcttctataagaacgtggtcctgtatattattgagctttggttcgcctttgttaatggattttctgggcagattttatttgaacgttggtgcatcggcctgtacaatgtgattttcaccgctttgccgcccttcactctgggaatctttgagaggtcttgcactcaggagagcatgctcaggtttccccagctctacaaaatcacccagaatggcgaaggcttcaacacaaaggttttctggggtcactgcatcaacgccttggtccactccctcatcctcttctggtttcccatgaaagctctggagcatgatactgtgttgacaagtggtcatgctaccgactatttatttgttggaaatattgtttacacatatgttgttgttactgtttgtctgaaagctggtttggagaccacagcttggactaaattcagtcatctggctgtctggggaagcatgctgacctggctggtgttttttggcatctactcgaccatctggcccaccattcccattgctccagatatgagaggacaggcaactatggtcctgagctccgcacacttctggttgggattatttctggttcctactgcctgtttgattgaagatgtggcatggagagcagccaagcacacctgcaaaaagacattgctggaggaggtgcaggagctggaaaccaagtctcgagtcctgggaaaagcggtgctgcgggatagcaatggaaagaggctgaacgagcgcgaccgcctgatcaagaggctgggccggaagacgcccccgacgctgttccggggcagctccctgcagcagggcgtcccgcatgggtatgctttttctcaagaagaacacggagctgttagtcaggaagaagtcatccgtgcttatgacaccaccaaaaagaaatccaggaagaaataagacatgaattttcctgactgatcttaggaaagagattcagtttgttgcacccagtgttaacacatctttgtcagagaagactggcgtcagcagccaaaacaccaggaaacacatttctgtggccttagccaagcagtttgttagttacatattccctcgcaaacctggagtgcagaccacaggggaagctatctttgccctcccaactcgtctgcagtgct

SEQ ID NO: 109668 - DNA, 9575 bp, Homo sapiens
  Payload ID: 1538
  Gene Symbol: ATP8A2
  Gene Name: ATPase, aminophospholipid transporter, class I, type 8A, member 2
  Uniprot ID: Q9NTI2
  ENST ID: ENST00000381655
  CDS Start-End: 143-3709
acaggcgccggcggtccccgccagctagcagcccggcgaggcgctggcccacccatggtcctcgggcggcggcccctgcgcccagccctgcgcgtagcctccgtctctcgcccggggccgccgagcccccgacacgggcgagatgctgaacggcgcaggcctggacaaagctcttaagatgtccctgccgcggaggtcgaggatccgctcgtccgtgggacctgttcgttcttctttgggctataagaaggcagaggatgagatgtcccgggccacgtctgttggagaccagctggaggcacccgcccgcaccatttacctcaaccaaccgcatctcaacaaattccgcgacaaccagatcagtacggccaagtacagcgtgttgacatttctacctcgattcttgtatgagcagattagaagagctgctaatgccttctttctcttcattgccttattacagcaaattccagatgtatctccaacaggaagatataccaccctggtgccattgatcattattttaacaattgcaggcatcaaagagattgtagaagattttaagcgacacaaggcagacaatgcagttaacaaaaagaaaacaatagtgttaagaaatggtatgtggcataccattatgtggaaagaggtggcagtgggagacattgtgaaggtcgtcaatgggcagtatcttccagcagatgtggtcctgctgtcatccagtgaacctcaggcaatgtgttatgttgaaacagctaatctggatggggagacgaaccttaaaatacgtcagggtttgagtcacactgctgacatgcaaacacgtgaagttctgatgaagttatctggaactatagagtgtgaagggcccaaccgccacctctatgacttcactggaaacttgaacttagatgggaaaagccttgttgcccttgggcctgaccagatcttattaagaggtacacagcttagaaatactcagtgggtctttggcatagttgtttatactggacacgacaccaaactcatgcagaattcaaccaaagcgcctctcaagagatcaaatgttgagaaggtgactaacgtgcagatcctggtgttgtttggcatcctcttggtcatggccttggtgagctcggcgggggccctgtactggaacaggtctcatggtgaaaagaactggtacatcaagaagatggacaccacctcagataattttggatacaacctactgacgttcatcatcttatacaacaatcttattcccatcagtctgttggtgactcttgaggttgtgaagtatactcaagcccttttcataaactgggacacagatatgtattatataggaaatgacactcctgccatggccaggacatcaaaccttaatgaagagcttgggcaggtgaaatatctcttttctgacaagactggaacgcttacatgcaatatcatgaactttaagaagtgcagcattgccggagtaacctatggtcacttcccagaattggcaagagagccgtcttcagatgacttctgtcggatgcctcctccctgtagtgattcctgtgactttgatgaccccaggctgttgaagaacattgaggatcgccatcccacagccccttgcattcaggagttcctcacccttctggccgtgtgccacacggttgttcctgagaaggatggagataacatcatctaccaggcctcttccccagatgaagctgctttggtgaaaggagctaaaaagctgggctttgtcttcacagccagaacaccattctcagtcatcatagaagcgatgggacaggaacaaacattcggaatccttaatgtcctggaattttctagtgacagaaaaagaatgtctgtaattgttcgaactccttcaggacgacttcggctttactgtaaaggggctgataatgtgatttttgagagactttcaaaagactcaaaatatatggaggaaacattatgccatctggaatactttgccacggaaggcttgcggactctctgtgtggcttatgctgatctctctgagaatgagtatgaggagtggctgaaagtctatcaggaagccagcaccatattgaaggacagagctcaacggttggaagagtgttacgagatcattgagaagaatttgctgctacttggagccacagccatagaagatcgccttcaagcaggagttccagaaaccatcgcaacactgttgaaggcagaaattaaaatatgggtgttgacaggagacaaacaagaaactgcgattaatatagggtattcctgccgattggtatcgcagaatatggcccttatcctattgaaggaggactctttggatgccacaagggcagccattactcagcactgcactgaccttgggaatttgctgggcaaggaaaatgacgtggccctgatcatcgatggccacaccctgaagtacgcgctctccttcgaagtccggaggagtttcctggatttggcactctcgtgcaaagcggtcatatgctgcagagtgtctcctctgcagaagtctgagatagtggatgtggtgaagaagcgggtgaaggccatcaccctcgccatcggagacggcgccaacgatgtcgggatgatccagacagcccacgtgggtgtgggaatcagtgggaatgaaggcatgcaggccaccaacaactcggattacgccatcgcacagttttcctacttagagaagcttctgttggttcatggagcctggagctacaaccgggtgaccaagtgcatcttgtactgcttctataagaacgtggtcctgtatattattgagctttggttcgcctttgttaatggattttctgggcagattttatttgaacgttggtgcatcggcctgtacaatgtgattttcaccgctttgccgcccttcactctgggaatctttgagaggtcttgcactcaggagagcatgctcaggtttccccagctctacaaaatcacccagaatggcgaaggcttcaacacaaaggttttctggggtcactgcatcaacgccttggtccactccctcatcctcttctggtttcccatgaaagctctggagcatgatactgtgttgacaagtggtcatgctaccgactatttatttgttggaaatattgtttacacatatgttgttgttactgtttgtctgaaagctggtttggagaccacagcttggactaaattcagtcatctggctgtctggggaagcatgctgacctggctggtgttttttggcatctactcgaccatctggcccaccattcccattgctccagatatgagaggacaggcaactatggtcctgagctccgcacacttctggttgggattatttctggttcctactgcctgtttgattgaagatgtggcatggagagcagccaagcacacctgcaaaaagacattgctggaggaggtgcaggagctggaaaccaagtctcgagtcctgggaaaagcggtgctgcgggatagcaatggaaagaggctgaacgagcgcgaccgcctgatcaagaggctgggccggaagacgcccccgacgctgttccggggcagctccctgcagcagggcgtcccgcatgggtatgctttttctcaagaagaacacggagctgttagtcaggaagaagtcatccgtgcttatgacaccaccaaaaagaaatccaggaagaaataagacatgaattttcctgactgatcttaggaaagagattcagtttgttgcacccagtgttaacacatctttgtcagagaagactggcgtcagcagccaaaacaccaggaaacacatttctgtggccttagccaagcagtttgttagttacatattccctcgcaaacctggagtgcagaccacaggggaagctatctttgccctcccaactcgtctgcagtgcttagcctaacttttgtttatgtcgttatgaagcattcaactgtgctctgtgaggtgtgaaattaaaaacattatgtttcaccaatatttaaacatcagtactagttgtcctgggagaaagggaaaggagttttatgttgcgtgagaggcccatcctgtgtaattggagcagggcacacttgcttcctgttgagttaactcagaggttaagtccaacgggccacatgcagacttcactgtaggcaggttgctctcctgctttgattcctgttttgtgtgtaaaattggcataaacttcttgattgcagtgaaatcacaaaattctctatcggggtggtcaacctgagaacatttatttgaacctcttagccacatttccagcagggcaaaccaactgatgccctggaagagtcttccgcaccctctccaggtgcactcggcccagtcctgccgccgtgtccaggcgcccctcacccccacacctgctgcatggctggccacaccactcagtgcatggcggccgatgggcagccaacccaaacccgcgcctttccttgttccactgcagactcagatacagatgcgaaaaattccttcttccaccgcccttctcgttctgtaaagaaagaaaagaaacatagcctttctgcatatattctaaacgtctctctgcctctgtctgacatggggccaccccacaggtcagagtggtggtagaaccccttcaggactcccagccgtggtcaggctctgaatactcccttcccaacatccagactgctgggcctttggcatccacttacattagaacccacgtttgtttcagagcacattttggactttcactgttgggaaatgaatgaatttataacatgcctgcacagcgaaggaacacacctgtcgctcttagctctagagtcagaggatgagtaaacccagatgcaagagtataggacattgagtggggagaacaagacgaccacagaagtcctcagaaggagaaggaaggacacggagacactgagaggaggacacagaggaatcgccaccagatctttgcagtagaaactctgaaataggccttgagacccagacaattgtcatgatcagcccagtgtgtatgagagcttaaacaagaccttcacacacagttctaattgaaaagaattccaaacatttcagggaaacacctttttaaaaaatatactgacatggtttcctttctgtatcccatcagtgttagacacaggtacctatcagaatacggcatatcctgaattatctaagacaaggaagtgaagagcggaatcactgactttcccaactgcagagtcccacacttaaatctcaacagaacctagatgtcttcaggcatgaatgtgagcacctggagcccttactaaacaacctgcctggagccctgttctctgctctggttgccaaaccagatttttggatggcctaaatacttgtgggcaactgttactggtgaaaaatgggagtggagagcatgttttggattttcactgtggggaaatgaatgaatttatcacatgactgtgcagcgaaggagcacacctgtcactcttagctctagagtcggaggatgagtcaaccctgtaggaatgattgtgctaaattaggaaataacactttagtgcactttgcttcctaacccttttttgtcagaaatctacaacctactgggcatggaaatgatttaaaatatgatctgcattgactaagaaaactcatcctcacttatgaggtgaccaggatgcagagagggcctgaggggcagcagaacaatgcaattcacaggtgaggctccaaaaagggccatttctttctccccaaggtgcatagaacatttttaaatatcagagtacccagcaagacggaaggactgtcatgcaggaactctaacacaaaatgtgcctatgactaacacgacaaaccaaggtgtatggtttctttgcacacccagaaaggtgatggccaagatacagaggagaaacgaaaactggaattgaatgtgcattaggcatcttaactattcatattttgtctcatttgggaactaagcctatttggaaagagtggattagaaattgaattctttgtcaaacagttagctctgtcttgaacttgaagccttccaaatcagaattatgtatttaagtgtgtgtttgtgtttgtttggggtttttgtttcttacattagagttcatattttctgggatttaaggatacaggtgtattttcctattctcttgagaagtagactaaacaatatttgcagtgatgacagacgcacacagaagaaaacattagaagagatgcctttctatcctctcatgtggttgagcattcttacagccaaatgactaaattggctgtaaattggtttctaggaggagcagctgtcactacgtgtgatgtataatatttagccagggccaactcaggggctgtgtcatttgtcctatctttaaattgaggtcagagtgtcacacacaacccctcccctggggcagggtggactggactaggttgcatacgctggctgtcagctcagcaaaaatgccacatggggcttgtcactccgccagacactcactgactcacgggctggcaggtcacgctcggttagcgctccagggcctgactctggattgagctaaactggcagaatccactcaggccaacccttggtctactgctgtgtacagacagcccagtcctgtgttgagtctctcttctcctggatgaccctgcaaaaggaagagaccagttgtactgtgggcttagttctgggtttccactgcacactgacacgtgccagcaagggtagctgtggaaaacacgtatcaggagagcagagtagtctggatgaatactctgtgctgatcagaacgggctcggtcataatttaggagtggagctgatgtgtctgtcctgcctcagtgcagaatattccaggcttcttgaccagggttatgttcacccatctcccaacacacacatgcacacatgaaaacaaaaacatggtaactcttttggttcggcacaccatacaaaacgtgctttggggcgaggagtgctgtttcttttaacacttgtagaggaatatcctgagaagtgaacctgggctttgggagagctcagctgagaattctgttgacattttctttcccttgacaaggcttcaggttcgtctcactatagggagctggctgtgaaaatcagtaataacttgtcaagaagcagtgaaaaatgcgggggggtggaaagagcctaggtaactaatgtcttataatgcatatgtatgtaaatattacaggatttaaggttgaattttttaaaaagaaagttatagtctgtaatttccatttgttataataatgacctttaatcttgtcatttggaaccataaagcatttttatcaggtacctctgttccaagggatttatgtcttagaccatagctgaattgaatgtttgcaaaacactgctataggataaggtggtctttagttttgaacgtgtgaaaggactgcacacttttcagccagggtttgagttactgcccagggtcatcgtctcaaagtaattcaaggagtgatttaacatcagcatttgaaatgtagtcttcatctcctgggatccataaaaaaatgtgaacagggaaatggtggctaagcagagcctgaaataataacttggcaaagaaatgagtttatcaggtcgagtcaaaacatggcatcccctgttacactcaagaaatgttttcttcatgtaaatgtttatacgggcatatataatcacaatgggaacagttaaaaccccctcccttcaaaaaaagaaaatctatatcagttgggtttggttttggttcttcattggctcaaggcagttaactgtctcagtatagccttcggggagatttaacctcattctagccatttttccatcctgaaggccaagaaggactattagaagggtttttgaggggtttcggaggtgagggcccaagacccccataatgacatcattaggcattcttgaaaggtgttaacagaccagcacgctcgatgtgttgtacccttcatttatttttttttctcagcatcccaagttgtccatcagtacattccccttcaccttacctgatcttcatttaatgcccagtctgtaactaatgttctgtttaaagctctcttaatttgttggctatgagtgatttgtgaatctgggatgtaaccctgagtgaggagaaaagggcattgagccagcataaatctgaatgggcagaagccacaaacaaatgggagcagaaaagaagggcgagctcccccgcgccgcaccccgtgtataatccagtgttaacctctgaggaacacctcggctctcccaactgaggagagacaaaagagggattctttttacacccaggctggcgcattttcaagtgacaatctcgggctctagttgcctttgagatatccactctgctctttctcccaggcctcagaccaagaaaaacatgctctcaagattagcccataggcagttcttgtgacctggctgaagaaagaaaggagacctgtttgttttaaaagtcgggcgcaaagtgtcaggtggctttgatttatgacagaaagaggaagaagaaagttggagtaatagcactatccaaataaccctgcccaggaaacttgggggtcaagagagcttatcaagagccttttataggtaagctcttccgtgtgaaagagaaaaggccggaaagagggagagagcccagagagcaggctgcgaactcacttccaatgggattggagtctgttgtattcttaagagatagcctgatatgtggtttataggtgaatcaataaacaccaacaacaacaaaaaaaaaaaaaaaaaaaaaggaagaaaagaaaaaaaggaaaccagccctgtcatggaatttctctccttccctgcacagtaaagacttttgggttttcatggataaaatcaatgtcagtactgaaactcctactctcccctcccgccccactctcccccgttgcccgagatggccaagttcaggcctgtgcaatgccgcttccctctgagcctccctctcaagggccacgcaggcagctgcagcagggccagctgcaggatggggctgccggtcactgaattgtcgttcaaatgcatcatctttgtggcgtctttctcatgcgagcaaagccacgtgctctcctgtctgctgtcacatctgtgcctggattgcttaaatattgtttgtgatggggaggttttaatctggtgatgcagagggaagcagggctgtgggggcacgtttaattggctcccagcagcgtggggggtgcttctatggtgtgtggggttttttgttgcctccctctagaagtgttaccgttttcacgtcctattaatgtcctctggttgttaaattacagcagcacattacagtgcactgggttccctcctggagtgaatacaaacggagggcatctacttgtatttttagaagttttgggagaatttagtgatttgtggctttgatcaatcctgttgactggtgtatgtctgcgcaaacctgtttcaaataaatcttttgttaaagtaa

SEQ ID NO: 109669 - DNA, 5818 bp, Homo sapiens
  Payload ID: 1539
  Gene Symbol: ATP8B1
  Gene Name: ATPase, aminophospholipid transporter, class I, type 8B, member 1
  Uniprot ID: O43520
  ENST ID: ENST00000283684
  CDS Start-End: 1-3756
atgagtacagaaagagactcagaaacgacatttgacgaggattctcagcctaatgacgaagtggttccctacagtgatgatgaaacagaagatgaacttgatgaccaggggtctgctgttgaaccagaacaaaaccgagtcaacagggaagcagaggagaaccgggagccattcagaaaagaatgtacatggcaagtcaaagcaaacgatcgcaagtaccacgaacaacctcactttatgaacacaaaattcttgtgtattaaggagagtaaatatgcgaataatgcaattaaaacatacaagtacaacgcatttacctttataccaatgaatctgtttgagcagtttaagagagcagccaatttatatttcctggctcttcttatcttacaggcagttcctcaaatctctaccctggcttggtacaccacactagtgcccctgcttgtggtgctgggcgtcactgcaatcaaagacctggtggacgatgtggctcgccataaaatggataaggaaatcaacaataggacgtgtgaagtcattaaggatggcaggttcaaagttgctaagtggaaagaaattcaagttggagacgtcattcgtctgaaaaaaaatgattttgttccagctgacattctcctgctgtctagctctgagcctaacagcctctgctatgtggaaacagcagaactggatggagaaaccaatttaaaatttaagatgtcacttgaaatcacagaccagtacctccaaagagaagatacattggctacatttgatggttttattgaatgtgaagaacccaataacagactagataagtttacaggaacactattttggagaaacacaagttttcctttggatgctgataaaattttgttacgtggctgtgtaattaggaacaccgatttctgccacggcttagtcatttttgcaggtgctgacactaaaataatgaagaatagtgggaaaaccagatttaaaagaactaaaattgattacttgatgaactacatggtttacacgatctttgttgttcttattctgctttctgctggtcttgccatcggccatgcttattgggaagcacaggtgggcaattcctcttggtacctctatgatggagaagacgatacaccctcctaccgtggattcctcattttctggggctatatcattgttctcaacaccatggtacccatctctctctatgtcagcgtggaagtgattcgtcttggacagagtcacttcatcaactgggacctgcaaatgtactatgctgagaaggacacacccgcaaaagctagaaccaccacactcaatgaacagctcgggcagatccattatatcttctctgataagacggggacactcacacaaaatatcatgacctttaaaaagtgctgtatcaacgggcagatatatggggaccatcgggatgcctctcaacacaaccacaacaaaatagagcaagttgattttagctggaatacatatgctgatgggaagcttgcattttatgaccactatcttattgagcaaatccagtcagggaaagagccagaagtacgacagttcttcttcttgctcgcagtttgccacacagtcatggtggataggactgatggtcagctcaactaccaggcagcctctcccgatgaaggtgccctggtaaacgctgccaggaactttggctttgccttcctcgccaggacccagaacaccatcaccatcagtgaactgggcactgaaaggacttacaatgttcttgccattttggacttcaacagtgaccggaagcgaatgtctatcattgtaagaaccccagaaggcaatatcaagctttactgtaaaggtgctgacactgttatttatgaacggttacatcgaatgaatcctactaagcaagaaacacaggatgccctggatatctttgcaaatgaaactcttagaaccctatgcctttgctacaaggaaattgaagaaaaagaatttacagaatggaataaaaagtttatggctgccagtgtggcctccaccaaccgggacgaagctctggataaagtatatgaggagattgaaaaagacttaattctcctgggagctacagctattgaagacaagctacaggatggagttccagaaaccatttcaaaacttgcaaaagctgacattaagatctgggtgcttactggagacaaaaaggaaactgctgaaaatataggatttgcttgtgaacttctgactgaagacaccaccatctgctatggggaggatattaattctcttcttcatgcaaggatggaaaaccagaggaatagaggtggcgtctacgcaaagtttgcacctcctgtgcaggaatctttttttccacccggtggaaaccgtgccttaatcatcactggttcttggttgaatgaaattcttctcgagaaaaagaccaagagaaataagattctgaagctgaagttcccaagaacagaagaagaaagacggatgcggacccaaagtaaaaggaggctagaagctaagaaagagcagcggcagaaaaactttgtggacctggcctgcgagtgcagcgcagtcatctgctgccgcgtcacccccaagcagaaggccatggtggtggacctggtgaagaggtacaagaaagccatcacgctggccatcggagatggggccaatgacgtgaacatgatcaaaactgcccacattggcgttggaataagtggacaagaaggaatgcaagctgtcatgtcgagtgactattcctttgctcagttccgatatctgcagaggctactgctggtgcatggccgatggtcttacataaggatgtgcaagttcctacgatacttcttttacaaaaactttgcctttactttggttcatttctggtactccttcttcaatggctactctgcgcagactgcatacgaggattggttcatcaccctctacaacgtgctgtacaccagcctgcccgtgctcctcatggggctgctcgaccaggatgtgagtgacaaactgagcctccgattccctgggttatacatagtgggacaaagagacttactattcaactataagagattctttgtaagcttgttgcatggggtcctaacatcgatgatcctcttcttcatacctcttggagcttatctgcaaaccgtagggcaggatggagaggcaccttccgactaccagtcttttgccgtcaccattgcctctgctcttgtaataacagtcaatttccagattggcttggatacttcttattggacttttgtgaatgctttttcaatttttggaagcattgcactttattttggcatcatgtttgactttcatagtgctggaatacatgttctctttccatctgcatttcaatttacaggcacagcttcaaacgctctgagacagccatacatttggttaactatcatcctggctgttgctgtgtgcttactacccgtcgttgccattcgattcctgtcaatgaccatctggccatcagaaagtgataagatccagaagcatcgcaagcggttgaaggcggaggagcagtggcagcgacggcagcaggtgttccgccggggcgtgtcaacgcggcgctcggcctacgccttctcgcaccagcggggctacgcggacctcatctcctccgggcgcagcatccgcaagaagcgctcgccgcttgatgccatcgtggcggatggcaccgcggagtacaggcgcaccggggacagctgatcccttacccccaggctgggatgcggccacaaagcacgtctatttttttatgaaagactctcaggactttgtgtgtgtgtgtgaattgcattcatcacaaagatattgaagacaataaataatctttataacaaactccttgggttggactattaaacaatagcagagccaagaaataggacttttaaaagtcctattattcggccgggcgtggtggctcaggtctgtaatcccagcactttaggaggctgaggaggggagatcacctgaggccaggagttcgagaccagcccagccaacatggtgaaaccctgtctctaccataaattaaaaattagccgggcttggtggtgggcacccgtaatcccacctatttgagaagctgaagcagaagaatcgcttgaacctgggagatggaggttacagtgagccgagattgcgccactgcactccagcctgggtgacagagcaagactctgtcttaagaaaaatttaaaaataggccgggcatggtggctcatgcctgtcatcctagcactttgggaggccaaggcaggtggatcacttgaggtcaggagaccagcccggccaacatggtgaaaccccatctctactaaaaatacaaaaattagctggaaatcgcttgaacctgggaggtggaggttccagtgagccgagatcgtggcactgcactccaacctgagcaacagagtgagacaccagctcaaaaaaaattttttaataataataaaagtcctattattcaactggttatgtacattatggttgaaagggaacgttttaatccagtctcaatccagggcaatagaattacaaagcatgttgtatttcagttcaaatggtattgtattataaaattacagttacattttcctttcggtgatcttcagcataatttcccagaggcccctttttcctccctataggccatcttattaacagattttaaaatttatagtaatgacaaatgacttatcagtgttcatcatctgaaagctaagtggttcgttcaatcactttttcaaagttgatagtagattgcatggtttcatgtttcctcatattggtttattaattctatttaatcaaggaaaataacttcagattccataaagtttcagtttatttttagtttactactaggtgagatagcacattacatacttttactatcaaatattattttagcagcttcccatagtaccaaatgatttgattccctactctcattttttaaagcatataaatatttatgggcttaaaaagggggtttttaaaaactgaggatatcagtaataaattgcagaatattttgcaaagctttcttttggaaagcaaacttttgtgcctgcctatatgcaaagtattttatcagggacttgaacaaagacctcactctttttcacttgtcttatgtcgagagaaaaggttattggcagccacattcctaagactggggaatggtgtgtccttttaaatttgaagataactttaggtaattatggaaactcctcaaagaggagaaagtaatttttttccagacatttttctcattctgtgtctttcacacactagtttccatagttcgagaattctgttttttaccattgggctgtgaatgttcacaatatcagtcctgttgaattcctatgaggtaatcacaatgtgtatatgttcattttctaggtatgataaaagaatgtatggctttttattctgtggaagtaaaatcctgaacgtttacaacttttccttaacttgtaaataaaaaattgtaagttttttctttttttacagaaaacttagcttgtgtaattctgttagtttcagatttctctcctgtttttgcaaattgtgggaaagattgacaatgcaaatgtgtcaaagacatactgttgggtgcaatattaacaattttaaatgcaaatttctttggataaattatttctatattctgtaaatctgagatttaatgtatattttgtttaaaaaaatgatttagtaaaatctttgaaaagtatgatcttctaaagtatttaaa

SEQ ID NO: 109670 - DNA, 5935 bp, Homo sapiens
  Payload ID: 1539
  Gene Symbol: ATP8B1
  Gene Name: ATPase, aminophospholipid transporter, class I, type 8B, member 1
  Uniprot ID: O43520
  ENST ID: ENST00000536015
  CDS Start-End: 121-3876
tggggccgggcgggcggcggcagcggccaggtgcgcagcgagcgctccgagcggcgcgcaccaggcggatgccccagccggggcccagcgaacgccaggtagttccaatttgccagcagaatgagtacagaaagagactcagaaacgacatttgacgaggattctcagcctaatgacgaagtggttccctacagtgatgatgaaacagaagatgaacttgatgaccaggggtctgctgttgaaccagaacaaaaccgagtcaacagggaagcagaggagaaccgggagccattcagaaaagaatgtacatggcaagtcaaagcaaacgatcgcaagtaccacgaacaacctcactttatgaacacaaaattcttgtgtattaaggagagtaaatatgcgaataatgcaattaaaacatacaagtacaacgcatttacctttataccaatgaatctgtttgagcagtttaagagagcagccaatttatatttcctggctcttcttatcttacaggcagttcctcaaatctctaccctggcttggtacaccacactagtgcccctgcttgtggtgctgggcgtcactgcaatcaaagacctggtggacgatgtggctcgccataaaatggataaggaaatcaacaataggacgtgtgaagtcattaaggatggcaggttcaaagttgctaagtggaaagaaattcaagttggagacgtcattcgtctgaaaaaaaatgattttgttccagctgacattctcctgctgtctagctctgagcctaacagcctctgctatgtggaaacagcagaactggatggagaaaccaatttaaaatttaagatgtcacttgaaatcacagaccagtacctccaaagagaagatacattggctacatttgatggttttattgaatgtgaagaacccaataacagactagataagtttacaggaacactattttggagaaacacaagttttcctttggatgctgataaaattttgttacgtggctgtgtaattaggaacaccgatttctgccacggcttagtcatttttgcaggtgctgacactaaaataatgaagaatagtgggaaaaccagatttaaaagaactaaaattgattacttgatgaactacatggtttacacgatctttgttgttcttattctgctttctgctggtcttgccatcggccatgcttattgggaagcacaggtgggcaattcctcttggtacctctatgatggagaagacgatacaccctcctaccgtggattcctcattttctggggctatatcattgttctcaacaccatggtacccatctctctctatgtcagcgtggaagtgattcgtcttggacagagtcacttcatcaactgggacctgcaaatgtactatgctgagaaggacacacccgcaaaagctagaaccaccacactcaatgaacagctcgggcagatccattatatcttctctgataagacggggacactcacacaaaatatcatgacctttaaaaagtgctgtatcaacgggcagatatatggggaccatcgggatgcctctcaacacaaccacaacaaaatagagcaagttgattttagctggaatacatatgctgatgggaagcttgcattttatgaccactatcttattgagcaaatccagtcagggaaagagccagaagtacgacagttcttcttcttgctcgcagtttgccacacagtcatggtggataggactgatggtcagctcaactaccaggcagcctctcccgatgaaggtgccctggtaaacgctgccaggaactttggctttgccttcctcgccaggacccagaacaccatcaccatcagtgaactgggcactgaaaggacttacaatgttcttgccattttggacttcaacagtgaccggaagcgaatgtctatcattgtaagaaccccagaaggcaatatcaagctttactgtaaaggtgctgacactgttatttatgaacggttacatcgaatgaatcctactaagcaagaaacacaggatgccctggatatctttgcaaatgaaactcttagaaccctatgcctttgctacaaggaaattgaagaaaaagaatttacagaatggaataaaaagtttatggctgccagtgtggcctccaccaaccgggacgaagctctggataaagtatatgaggagattgaaaaagacttaattctcctgggagctacagctattgaagacaagctacaggatggagttccagaaaccatttcaaaacttgcaaaagctgacattaagatctgggtgcttactggagacaaaaaggaaactgctgaaaatataggatttgcttgtgaacttctgactgaagacaccaccatctgctatggggaggatattaattctcttcttcatgcaaggatggaaaaccagaggaatagaggtggcgtctacgcaaagtttgcacctcctgtgcaggaatctttttttccacccggtggaaaccgtgccttaatcatcactggttcttggttgaatgaaattcttctcgagaaaaagaccaagagaaataagattctgaagctgaagttcccaagaacagaagaagaaagacggatgcggacccaaagtaaaaggaggctagaagctaagaaagagcagcggcagaaaaactttgtggacctggcctgcgagtgcagcgcagtcatctgctgccgcgtcacccccaagcagaaggccatggtggtggacctggtgaagaggtacaagaaagccatcacgctggccatcggagatggggccaatgacgtgaacatgatcaaaactgcccacattggcgttggaataagtggacaagaaggaatgcaagctgtcatgtcgagtgactattcctttgctcagttccgatatctgcagaggctactgctggtgcatggccgatggtcttacataaggatgtgcaagttcctacgatacttcttttacaaaaactttgcctttactttggttcatttctggtactccttcttcaatggctactctgcgcagactgcatacgaggattggttcatcaccctctacaacgtgctgtacaccagcctgcccgtgctcctcatggggctgctcgaccaggatgtgagtgacaaactgagcctccgattccctgggttatacatagtgggacaaagagacttactattcaactataagagattctttgtaagcttgttgcatggggtcctaacatcgatgatcctcttcttcatacctcttggagcttatctgcaaaccgtagggcaggatggagaggcaccttccgactaccagtcttttgccgtcaccattgcctctgctcttgtaataacagtcaatttccagattggcttggatacttcttattggacttttgtgaatgctttttcaatttttggaagcattgcactttattttggcatcatgtttgactttcatagtgctggaatacatgttctctttccatctgcatttcaatttacaggcacagcttcaaacgctctgagacagccatacatttggttaactatcatcctggctgttgctgtgtgcttactacccgtcgttgccattcgattcctgtcaatgaccatctggccatcagaaagtgataagatccagaagcatcgcaagcggttgaaggcggaggagcagtggcagcgacggcagcaggtgttccgccggggcgtgtcaacgcggcgctcggcctacgccttctcgcaccagcggggctacgcggacctcatctcctccgggcgcagcatccgcaagaagcgctcgccgcttgatgccatcgtggcggatggcaccgcggagtacaggcgcaccggggacagctgatcccttacccccaggctgggatgcggccacaaagcacgtctatttttttatgaaagactctcaggactttgtgtgtgtgtgtgaattgcattcatcacaaagatattgaagacaataaataatctttataacaaactccttgggttggactattaaacaatagcagagccaagaaataggacttttaaaagtcctattattcggccgggcgtggtggctcaggtctgtaatcccagcactttaggaggctgaggaggggagatcacctgaggccaggagttcgagaccagcccagccaacatggtgaaaccctgtctctaccataaattaaaaattagccgggcttggtggtgggcacccgtaatcccacctatttgagaagctgaagcagaagaatcgcttgaacctgggagatggaggttacagtgagccgagattgcgccactgcactccagcctgggtgacagagcaagactctgtcttaagaaaaatttaaaaataggccgggcatggtggctcatgcctgtcatcctagcactttgggaggccaaggcaggtggatcacttgaggtcaggagaccagcccggccaacatggtgaaaccccatctctactaaaaatacaaaaattagctggaaatcgcttgaacctgggaggtggaggttccagtgagccgagatcgtggcactgcactccaacctgagcaacagagtgagacaccagctcaaaaaaaattttttaataataataaaagtcctattattcaactggttatgtacattatggttgaaagggaacgttttaatccagtctcaatccagggcaatagaattacaaagcatgttgtatttcagttcaaatggtattgtattataaaattacagttacattttcctttcggtgatcttcagcataatttcccagaggcccctttttcctccctataggccatcttattaacagattttaaaatttatagtaatgacaaatgacttatcagtgttcatcatctgaaagctaagtggttcgttcaatcactttttcaaagttgatagtagattgcatggtttcatgtttcctcatattggtttattaattctatttaatcaaggaaaataacttcagattccataaagtttcagtttatttttagtttactactaggtgagatagcacattacatacttttactatcaaatattattttagcagcttcccatagtaccaaatgatttgattccctactctcattttttaaagcatataaatatttatgggcttaaaaagggggtttttaaaaactgaggatatcagtaataaattgcagaatattttgcaaagctttcttttggaaagcaaacttttgtgcctgcctatatgcaaagtattttatcagggacttgaacaaagacctcactctttttcacttgtcttatgtcgagagaaaaggttattggcagccacattcctaagactggggaatggtgtgtccttttaaatttgaagataactttaggtaattatggaaactcctcaaagaggagaaagtaatttttttccagacatttttctcattctgtgtctttcacacactagtttccatagttcgagaattctgttttttaccattgggctgtgaatgttcacaatatcagtcctgttgaattcctatgaggtaatcacaatgtgtatatgttcattttctaggtatgataaaagaatgtatggctttttattctgtggaagtaaaatcctgaacgtttacaacttttccttaacttgtaaataaaaaattgtaagttttttctttttttacagaaaacttagcttgtgtaattctgttagtttcagatttctctcctgtttttgcaaattgtgggaaagattgacaatgcaaatgtgtcaaagacatactgttgggtgcaatattaacaattttaaatgcaaatttctttggataaattatttctatattctgtaaatctgagatttaatgtatattttgtttaaaaaaatgatttagtaaaatctttgaaaagtatgatcttctaaagtattt

SEQ ID NO: 109671 - DNA, 532 bp, Homo sapiens
  Payload ID: 1539
  Gene Symbol: ATP8B1
  Gene Name: ATPase, aminophospholipid transporter, class I, type 8B, member 1
  ENST ID: ENST00000591728
  CDS Start-End: 127-312
cagggctggggccgggcgggcggcggcagcggccaggtgcgcagcgagcgctccgagcggcgcgcaccaggcggatgccccagccggggcccagcgaacgccaggtagttccaatttgccagcagaatgagtacagaaagagactcagaaacgacatttgacgaggattctcagcctaatgacgaagtggttccctacagtgatgatgaaacagaagatgaacttgatgaccaggggtctgctgttgaaccagaacaaaaccgagtcaacagggaagcagaggagaaccgggagccattcagaaaagaataatgcaattaaaacatacaagtacaacgcatttacctttataccaatgaatctgtttgagcagtttaagagagcagccaatttatatttcctggctcttcttatcttacaggcagttcctcaaatctctaccctggcttggtacaccacactagtgcccctgcttgtggtgctgggcgtcactgcaatcaaagacctggtggacgatgtggctcgccataaa

SEQ ID NO: 109672 - DNA, 489 bp, Homo sapiens
  Payload ID: 1539
  Gene Symbol: ATP8B1
  Gene Name: ATPase, aminophospholipid transporter, class I, type 8B, member 1
  ENST ID: ENST00000588255
  CDS Start-End: 214-489
ggggattgggtttcaacatatgaatttggagggggattctaacattcagaccatagcagtaaataagcagcttgctctcgtctgtacaatgagaataaaatctctactacttgccactcgtatccgagctctctacggaaaataatcttctgtcttcctagcgtggaagtgattcgtcttggacagagtcacttcatcaactgggacctgcaaatgtactatgctgagaaggacacacccgcaaaagctagaaccaccacactcaatgaacagctcgggcagatccattatatcttctctgataagacggggacactcacacaaaatatcatgacctttaaaaagtgctgtatcaacgggcagatatatggggaccatcgggatgcctctcaacacaaccacaacaaaatagagcaagttgattttagctggaatacatatgctgatgggaagcttgcattttatgaccactatcttattgagcaaatc

SEQ ID NO: 109673 - DNA, 527 bp, Homo sapiens
  Payload ID: 1539
  Gene Symbol: ATP8B1
  Gene Name: ATPase, aminophospholipid transporter, class I, type 8B, member 1
  ENST ID: ENST00000585322
  CDS Start-End: 495-527
gactccatctcaaaaaataaagcagcaaggttcaggaactcaggcttattttaaaaaaaagaaaatgaagaagaagaaagaaggaaaaggggctggatatggtagctcatgcctgtaatcccagtattttgtgaggccaaggagggaggattgcttgacctcaggagttcaagagcatcctgagcaaactagcaagacctcatctctactaaaaaccaaaaaaattagctgggtgtgatggtgcacacctttagtctcagctacttaggaggctgaggcaggaggatcacttgagcctgggagattgaggctgcagtgagcttgatcaccccagtgtactccagcctaggtgacagagcaagaacttgaatcaacaaccaaaaaaaaaaaaaaaaaggaagaaaaaagaagcaaaccacctcatgtgtatgccacactcacaggaaattaaagatgtgaacaccaaaagcaggtagttccaatttgccagcagaatgagtacagaaagagactcagaaacgacattt

SEQ ID NO: 109674 - DNA, 1523 bp, Homo sapiens
  Payload ID: 1540
  Gene Symbol: ATP8B2
  Gene Name: ATPase, aminophospholipid transporter, class I, type 8B, member 2
  Uniprot ID: P98198
  ENST ID: ENST00000368487
  CDS Start-End: 188-1351
cacaaagtagcgggccgaggccccgggggagcggggccgcagctgggggggcgggagcccgtggggagccgagccgagcgccccccgccccagcccccggcatgggcagtacggggccgccggggcgggcgccgagcgctgagcgctgagggtctcccatgggattgctgggatcttgctgggtgagatggcagtgtgtgcaaaaaagcgccccccagaagaagaaaggagggcgcgggctaatgaccgagaatacaatgagaaattccagtatgcgagtaactgcatcaagacctccaagtacaatattctcaccttcctgcctgtcaacctctttgagcagttccaggaagttgccaacacttacttcctgttcctcctcattctgcagttgatcccccagatctcttccctgtcctggttcaccaccattgtgcctttggttcttgtcctcaccatcacagctgttaaagatgccactgatgactatttccgccacaagagcgataaccaggtgaataaccgccagtctcaggtgctgatcaatggaatcctccagcaggagcagtggatgaatgtctgtgttggtgatattatcaagctagaaaataaccagtttgtggcggcggatctcctcctcctttccagcagtgagccccatgggctgtgttacatagagacagcagaacttgatggcgagaccaacatgaaagtacgtcaggcgattccagtcacctcagaattgggagacatcagtaagcttgccaagtttgacggtgaagtgatctgtgaacctcccaacaacaaactggacaaattcagcggaaccctctactggaaggaaaataagttccctctgagcaaccagaacatgctgctgcggggctgtgtgctgcgaaacaccgagtggtgcttcgggctggtcatctttgcaggtcccgacactaagctgatgcaaaacagcggcagaacaaagttcaaaagaacgagtatcgatcgcctaatgaataccctggtgctctggatttttggattcctggtttgcatgggggtgatcctggccattggcaatgccatctgggagcacgaggtggggatgcgtttccaggtctacctgccgtgggatgaggcagtggacagtgccttcttctctggcttcctctccttctggtcctacatcatcatcctcaacaccgttgtgcccatttcactctatgtcaggtatgtgccttctctgacctggggtctctccagggagtcaggcggtcccatagaacttttcttttctatgaagatgaagtccttgagaagtaacgagaagtcctcttcttcctgtactgtaaacatttgatgttatctgtttatctttgtgggcagagcaaactttttaccacagtttcctggtacttgggactgtattagagaaaaaaaaatattgatttattcagcacctatttattacatgcctactgtgtacaaagaagtgtgctaggtgccatcacaaataaaagatgaattaggaa

SEQ ID NO: 109675 - DNA, 5861 bp, Homo sapiens
  Payload ID: 1540
  Gene Symbol: ATP8B2
  Gene Name: ATPase, aminophospholipid transporter, class I, type 8B, member 2
  Uniprot ID: P98198
  ENST ID: ENST00000368489
  CDS Start-End: 1-3672
atggataccttgagagctgttccccttttttcaatatctggcctcttctcctttccctacagggtctcccatgggattgctgggatcttgctgggtgagatggcagtgtgtgcaaaaaagcgccccccagaagaagaaaggagggcgcgggctaatgaccgagaatacaatgagaaattccagtatgcgagtaactgcatcaagacctccaagtacaatattctcaccttcctgcctgtcaacctctttgagcagttccaggaagttgccaacacttacttcctgttcctcctcattctgcagttgatcccccagatctcttccctgtcctggttcaccaccattgtgcctttggttcttgtcctcaccatcacagctgttaaagatgccactgatgactatttccgccacaagagcgataaccaggtgaataaccgccagtctcaggtgctgatcaatggaatcctccagcaggagcagtggatgaatgtctgtgttggtgatattatcaagctagaaaataaccagtttgtggcggcggatctcctcctcctttccagcagtgagccccatgggctgtgttacatagagacagcagaacttgatggcgagaccaacatgaaagtacgtcaggcgattccagtcacctcagaattgggagacatcagtaagcttgccaagtttgacggtgaagtgatctgtgaacctcccaacaacaaactggacaaattcagcggaaccctctactggaaggaaaataagttccctctgagcaaccagaacatgctgctgcggggctgtgtgctgcgaaacaccgagtggtgcttcgggctggtcatctttgcaggtcccgacactaagctgatgcaaaacagcggcagaacaaagttcaaaagaacgagtatcgatcgcctaatgaataccctggtgctctggatttttggattcctggtttgcatgggggtgatcctggccattggcaatgccatctgggagcacgaggtggggatgcgtttccaggtctacctgccgtgggatgaggcagtggacagtgccttcttctctggcttcctctccttctggtcctacatcatcatcctcaacaccgttgtgcccatttcactctatgtcagtgtggaggtcatccgtctgggccacagctacttcatcaactgggataagaagatgttctgcatgaagaagcggacgcctgcagaagcccgcaccaccaccctaaacgaggagctgggccaggtggagtacatcttctccgacaagacgggcaccctcacccagaacatcatggttttcaacaagtgctccatcaatggccacagctatggtgatgtgtttgacgtcctgggacacaaagctgaattgggagagaggcctgaacctgttgacttctccttcaatcctctggctgacaagaagttcttattttgggaccccagcctgctggaggctgtcaagatcggggacccccacacgcatgagttcttccgcctcctttccctgtgtcatactgtcatgtcagaagaaaagaacgaaggagagctgtactacaaagctcagtccccagatgagggggccctggtcaccgcagccaggaactttggttttgttttccgctctcgcacccccaaaacaatcaccgtccatgagatgggcacagccatcacctaccagctgctggccatcctggacttcaacaacatccgcaagcggatgtcggtcatagtgcggaatccagaggggaagatccgactctactgcaaaggggctgacactatcctactggacagactgcaccactccactcaagagctgctcaacaccaccatggaccaccttaatgagtacgcaggggaagggctgaggaccctggtgctggcctacaaggatctggatgaagagtactacgaggagtgggctgagcgacgcctccaggccagcctggcccaggacagccgggaggacaggctggctagcatctatgaggaggttgagaacaacatgatgctgctgggtgcaacggccattgaggacaaacttcagcaaggggttccagagaccattgccctcctgacactggccaacatcaagatttgggtgctaaccggagacaagcaagagacggctgtgaacatcggctattcctgcaagatgctgacggatgacatgactgaggttttcatagtcactggccatactgtcctggaggtgcgggaggagctcaggaaagcccgggagaagatgatggactcatcccgctccgtaggcaacggcttcacctatcaggacaagctttcttcttccaagctaacttctgtcctggaggccgttgctggggagtacgccctggtcataaatggtcacagcctggcccacgcactggaggcagacatggagctggagtttctggagacagcgtgtgcctgcaaagctgtcatctgctgccgggtgacccccttgcagaaggcacaggtggtagaactggtcaagaagtacaagaaggctgtgacgcttgccattggagacggagccaatgatgtcagcatgatcaaaacggctcacattggtgtggggatcagtgggcaggaagggatccaggctgtcttggcctccgattactccttctcccagttcaagttcctgcagcgcctcctgctggtgcatgggcgctggtcctacctgcgaatgtgcaagtttctttgctatttcttctacaaaaactttgctttcaccatggtccacttctggtttggcttcttctgtggcttctcagcccagaccgtctatgaccagtatttcatcaccctgtataacatcgtgtacacctccctgccagtcctggctatgggggtctttgatcaggatgtccccgagcagcggagcatggagtaccctaagctgtatgagccgggccagctgaaccttctcttcaacaagcgggagttcttcatctgcatcgcccagggcatctacacctccgtgctcatgttcttcattccctatggggtgtttgctgatgccacccgggatgatggcactcagctggctgactaccagtcctttgcagtcactgtggccacatccttggtcattgtggttagcgtgcagattgggctcgacacaggctactggacggccatcaaccacttcttcatctggggaagccttgctgtttactttgccatcctctttgccatgcacagcaatgggctcttcgacatgtttcccaaccagttccggtttgtggggaatgcccagaacaccttggcccagcccacggtgtggctgaccattgtgctcaccacagtcgtctgcatcatgcccgtggttgccttccgattcctcaggctcaacctgaagccggatctctccgacacggtccgctacacacagctcgtgaggaagaagcagaaggcccagcaccgctgcatgcggcgggttggccgcactggctcccggcgctccggctatgccttctcccatcaggagggcttcggggagctcatcatgtctggcaagaacatgcggctgagctctctcgcgctctccagcttcaccacccgctccagctccagctggattgagagcctgcgcaggaagaagagtgacagtgccagtagccccagtggcggtgccgacaagcccctcaagggctgaaggccgaggatggatgccctgtgccagtgaccagagcacccagggctggccagtcactgagggaacagcgtctcggaactgctggtcctcattccttgcttcccgtccccccggtagactctgtcctgctggtcccaccacacatggctgggacatctgttcccagctgtaggcccttccaccagctggggagctagagggagcaggcccaagggcagagcagaggctgaggcacggggagccagccccactcggggaccagaagtggaaccaaaaacaagaaaaaactgtgagagattgtgtctgcccctgccctgcctgggacccacagggagactataatctccttatttttttactcctactccccagaggggccctagtgcctctgttcctgaattacataagaatgtaccatgccgggaagccagagacctgcaggggcctcggcccctcacatcgtgtatgtctctccttgatttgtgttgtgtccagtttggttttgtctttttttatttggcaagtggaggaggcttttatgtgacttttatgttgtggttggtgtcttaactctcctgggaaaaggaggctggcacacactgggatgccgcagcctggccggctgtggggtggtttgggaggatccatgtcggctctgcctgcagtgaccagtgctctgtggggcagaggagctgaccagggagggaggtacccatgagcagagggtagtgggagagtgtaaaggagggtttggtcctgtctgcttcctcaccttgagagtaaagtgctgccctctgcccccaacacacacacatatcaattcctggattccttagtcctgctggccttgggctggagcctaggaaagtggcccccaaatccttagtgagctaaagctgggtctgaaatttggtcagtggggaggggtagttttcttttcttttttctttttctttttttctttttttttttgagatggagtctcactcttgtcacctaggcaagagtgcaatggcacaatctcagctcactgcaacctccacctcctgggttcaagcgattctcctgcctcagcctcctgagtagctgggattacaggcacacaccaccacgcttggttaatttttgtatttttagtagagatgtttcaccatgttggccaggctagtcttgaattcctgacctcctgacctgcccacctcaacctcccaaagtgctgagattacaggcgtgagccaccacacccagctcagggaggcgtagttttctttaattttaaatttaaacccaagtttattggcagactcccttttgacctccctttgcctccccatctggtgctttcttgcatctacaccccagggccctgtggtggggctgcagggggaagctgtgcacctgagatgaggctggaacgggaattggcctctctgctcccttcttcagtaagcaaggagccccgcccctcaggcccagcctctggcaagaggtggtggaatccttgtgccgggtagtagaggaggataagggcaaaaccaggcccaggccagtgcctggcttggtctggatgggacactgtcagagtttggccacagcctgtcctttacttcatccacacctatgaagctattccctaaataaggcatttcccaagttagtcgctacctaatcagccttgagaagaatcctttcctcttctttgatagtgggtcgggggattcttcaggaatggtttggagctgggagtgggtagggggattttaaatgttccatatgggagccccaaaggaactggatgggctgcagtgaggtgggggcgggtgggcagggaatgggagaggggaagtcttggcagggaaatcccttttggccacacagtttacaaacccagtatcatgtctgtctgtgtgtctctcaaggtgagagtctgatttttataccaaagaggaaatgattttttttcatattttgtttgtctatattatataaatatatatatacagttatatatatatatattattttttggttctctctcgttttttagggagggaagaaagtaccaagttgcattgagctgtaattaaggaacattataatttatgacacatttctatacttgcaaaaattatatcattttatggatataagagaaaaatgcctttttataaaatttcaatttctgagaa

SEQ ID NO: 109676 - DNA, 5095 bp, Homo sapiens
  Payload ID: 1541
  Gene Symbol: ATP8B3
  Gene Name: ATPase, aminophospholipid transporter, class I, type 8B, member 3
  Uniprot ID: O60423
  ENST ID: ENST00000310127
  CDS Start-End: 240-4142
gtttcaggaccgttggcaccgggctaacggttccaccacgtccgccgccctggacgcccgcggcctgcccccccctgcctctcctgcgccgatacacttcgagtggattctggccatttgagcattctctccaactctccaatccccagtctgcccccacgggggtctcccccacctctcccccgtcccacagcctaaacccctcttcgccctgaacctcccttttcctcatgcggtgaatgggcactggccccgctcagactcccaggagcaccagagctggccctgagccaagccctgccccaccaggacctggggacacgggtgactcagacgtgactcaggaaggctcaggtcctgctggcatccgcggaggtgagacggtgatcagagctgggatgggagactccccaggcagaggggcacctgagaggaggcacaaggcccagcctggccgggctaggaagtatgaatggagaccagaaggccccaccagcatgggcagcctcggccagagagaagatctccaagatgaggacaggaactcagcattcacctggaaggtccaggccaacaaccgtgcctacaacgggcagttcaaggagaaggtgatcctgtgctggcaaaggaagaaatacaagaccaatgtcatccgcacggccaagtacaacttctactcgttcctgccgctgaacctgtacgagcagttccaccgcgtgtccaacctgttcttcctcatcatcatcatcctgcagagcattcccgacatctccacgctgccctggttctcgctcagtacccctatggtctgcctcctcttcatccgtgccacccgggacctggtggacgacatggggagacacaagagtgacagagccatcaacaacagaccctgccagattctgatggggaagagcttcaagcagaagaaatggcaggatctgtgcgtgggggatgtggtctgtctccgcaaggacaacatcgtcccagccgacatgctcttgctggccagcacggagcccagcagcctgtgctatgtggagacggtggacattgacggggagaccaacttgaagttcagacaggccctgatggtcacccacaaagaactggccactataaagaagatggcgtcctttcaaggcacagtgacgtgtgaggcgcctaacagtcggatgcaccacttcgtggggtgcctggaatggaatgacaagaaatactccctggacattggcaacctcctcctccgaggctgcaggattcgcaacacagacacctgctatggactggtcatttatgctggttttgacacaaaaattatgaagaactgtggcaagatccatttgaagagaaccaagctggacctcctgatgaacaagctggtggttgtgatcttcatctccgtggtgcttgtctgcctggtgttggccttcggcttcggtttctcagtcaaagaattcaaagaccaccactactacctctcgggggtgcatgggagcagcgtggccgcagagtccttcttcgtcttctggagcttcctcatcctgctcagcgtcaccatcccgatgtccatgttcatcctgtccgagttcatctacctggggaacagcgtcttcatcgactgggacgtgcagatgtactacaagccgcaggacgtgcctgccaaggcccgcagcaccagcctcaacgaccacctgggccaggtggaatacatcttctcggacaagacgggcacgctcacgcagaacatcttgaccttcaacaagtgctgcatcagcggccgcgtctatgggccggattcagaggccacgacccgacctaaggagaacccctacctctggaacaagttcgccgacgggaagctgctcttccacaatgcggccctgctgcacctcgtgcggaccaacggggacgaggccgtgcgggagttctggcgcctgctggccatctgccacacggtgatggtgcgggagagcccccgtgagcgcccagaccagctgttgtaccaggcggcctcccccgacgagggggcgctggtcaccgcagcccggaacttcggctacgtgttcctgtcccgcacccaggacaccgtcacgatcatggagctgggggaggaacgggtctaccaggtcctggccataatggacttcaacagcacgcgcaaacggatgtcggtgctggttcgaaagccagagggcgccatctgcctgtacaccaagggcgccgacacggtcatcttcgaacgcttgcacaggaggggggcaatggaatttgccacagaggaggccttggctgcctttgcccaggagaccctgcggacactgtgcctggcctacagggaggtggctgaggacatttacgaggactggcagcagcgccaccaggaggccagcctcctgctgcagaaccgggcacaggccctgcaacagctgctgggagccacagccatcgaggacagactccaggacggtgtccctgaaaccatcaaatgtctcaagaagagcaacatcaaaatatgggtgctcaccggggacaagcaggaaacggctgtgaacatcggcttcgcctgcgagctgctgtcagagaatatgctcattctggaggagaaggagattagccgcatcctggagacctactgggaaaacagtaacaaccttctaaccagggagtccctgtcgcaggtcaagctggccttggtcattaacggagacttcctggacaaactgctggtgtccctgcggaaggagccgcgcgccctggcgcagaacgtgaacatggacgaggcgtggcaggagctcggccagtccaggagggatttcctctacgccaggcgcctgtccctgctgtgccggaggttcgggctcccgctggctgcaccgccagcccaggactccagagcccgccgtagctccgaggtgctgcaggagcgcgccttcgtggacctggcgtccaagtgccaggcggtcatctgctgccgcgtgacgcccaagcagaaggccctgatcgtggccctggtcaagaagtaccaccaggtggtgaccctggccatcggggacggtgccaacgacatcaacatgatcaagaccgcggacgtgggcgtggggctggcgggccaggagggcatgcaggcagttcagaacagcgacttcgtgctcggccagttctgcttcctgcagcgcctcctgctggtgcacggccgctggtcctacgtgcggatctgcaagttcctgcgctacttcttctacaagagcatggccagcatgatggtgcaggtctggtttgcctgctacaacggcttcaccggccagcccctgtatgaaggatggttcctggctcttttcaacctcctgtacagcaccctgccagttctctacattgggctctttgagcaggacgtgagcgcagagcagagcctggagaagccggagctgtacgtggtggggcagaaggacgagctcttcaactactgggtcttcgtccaagccatcgcccatggtgtgaccacctctctggtcaacttcttcatgacactgtggatcagccgcgacacggcgggacccgccagcttcagcgaccaccagtcctttgcggtcgtggtggccctgtcttgcctgctgtccatcaccatggaggtcattcttatcatcaagtactggaccgccctgtgcgtggcgaccatcctcctcagccttggtttctacgccatcatgactaccaccacccagagcttctggctcttcagagtatcccccacgaccttcccgtttctgtatgccgacctcagcgtgatgtcctctccctccatcctgctggtggtcctgctgagtgtgtccataaacaccttccctgtcctggccctccgagtcatcttcccagccctcaaggagctacgtgccaaggaggagaaggtggaggagggccccagcgaggagattttcaccatggagcccttgcctcatgtacaccgggagtctcgtgcccgccgttccagctatgctttctcccaccgtgagggatatgcaaacctcatcactcagggcacaattctgcggaggggaccaggggtcagcagtgacatagcatctgaatccctagacccatctgatgaagaggcagcttcgagcccaaaagagtcacagtgacacctcaggaagatgtccttcctggggaagaagaagcaccagccacaggggcaggtgtcctcccaggaagtacagctcccccctacacctagctcatcattttctatggatagacaatccgctcttcatccagaaaaccaacctgccctccccaaatatgtgctcaccagcagcaacaggctatctgagtctttccaagagcaattgccaagggcacaggagaggtcattgtcacccaagcagaggccaccttctcctgagaagttgctgttgaccaaggagaggtcacattcttttcaggagaaatcactgttgcacagagaaagccagctgtcgtcatttgagagccagccacagcctctggggagccagtcatttctttcaggccagctgacgttggagagccagccagactcctcggaggagaagtcagcatttttgaagccctccacaccgttccggaagagctggcaaaaggagcctcacacccccaaggaggggacggtgccacttccagacaagacccacaaatctcaggtggagactctgccaccaagtctggaagaatcgtccacgtccacgagcgagcagcctatggaggtggagctgtggcccgcggagaagcagtcatcatcatccatggagtggctgctggtgcccggggaggagcagctatccttgcccccagaggagcagtcattgccctctgcggaggggaccagggttcagcagtgacgtagcatctgaatccctagacccatctgatgaagaggcatcttcgagcccaaaggagtcacgctggcatatcaggaagatgtccttcctgggaagaagaagctccagccagttctgctgcaagtcaaccagcatgcagggggccttcctctaaagacaaggactccacatgcttttctttttctaataaaccagggtccatctgaccccagcgctaa

SEQ ID NO: 109677 - DNA, 4014 bp, Homo sapiens
  Payload ID: 1541
  Gene Symbol: ATP8B3
  Gene Name: ATPase, aminophospholipid transporter, class I, type 8B, member 3
  Uniprot ID: O60423
  ENST ID: ENST00000525591
  CDS Start-End: 223-4014
gcctctcctgcgccggtgagcggcgggtgctcccactgctgtgcgtccccgggagcccgcgcaccctctctgggctccacccaggctgagagctggggtcgtggcggcgggggtggagagcgcgcccctagaggacctggggacacgggtgactcagacgtgactcaggaaggctcaggtcctgctggcatccgcggaggtgagacggtgatcagagctgggatgggagactccccaggcagaggggcacctgagaggaggcacaaggcccagcctggccgggctaggaagtatgaatggagaccagaaggccccaccagcatgggcagcctcggccagagagaagatctccaagatgaggacaggaactcagcattcacctggaaggtccaggccaacaaccgtgcctacaacgggcagttcaaggagaaggtgatcctgtgctggcaaaggaagaaatacaagaccaatgtcatccgcacggccaagtacaacttctactcgttcctgccgctgaacctgtacgagcagttccaccgcgtgtccaacctgttcttcctcatcatcatcatcctgcagagcattcccgacatctccacgctgccctggttctcgctcagtacccctatggtctgcctcctcttcatccgtgccacccgggacctggtggacgacatggggagacacaagagtgacagagccatcaacaacagaccctgccagattctgatggggaagagcttcaagcagaagaaatggcaggatctgtgcgtgggggatgtggtctgtctccgcaaggacaacatcgtcccagccgacatgctcttgctggccagcacggagcccagcagcctgtgctatgtggagacggtggacattgacggggagaccaacttgaagttcagacaggccctgatggtcacccacaaagaactggccactataaagaagatggcgtcctttcaaggcacagtgacgtgtgaggcgcctaacagtcggatgcaccacttcgtggggtgcctggaatggaatgacaagaaatactccctggacattggcaacctcctcctccgaggctgcaggattcgcaacacagacacctgctatggactggtcatttatgctgatggatacatgtttgtaggttttgacacaaaaattatgaagaactgtggcaagatccatttgaagagaaccaagctggacctcctgatgaacaagctggtggttgtgatcttcatctccgtggtgcttgtctgcctggtgttggccttcggcttcggtttctcagtcaaagaattcaaagaccaccactactacctctcgggggtgcatgggagcagcgtggccgcagagtccttcttcgtcttctggagcttcctcatcctgctcagcgtcaccatcccgatgtccatgttcatcctgtccgagttcatctacctggggaacagcgtcttcatcgactgggacgtgcagatgtactacaagccgcaggacgtgcctgccaaggcccgcagcaccagcctcaacgaccacctgggccaggtggaatacatcttctcggacaagacgggcacgctcacgcagaacatcttgaccttcaacaagtgctgcatcagcggccgcgtctatgggccggattcagaggccacgacccgacctaaggagaacccctacctctggaacaagttcgccgacgggaagctgctcttccacaatgcggccctgctgcacctcgtgcggaccaacggggacgaggccgtgcgggagttctggcgcctgctggccatctgccacacggtgatggtgcgggagagcccccgtgagcgcccagaccagctgttgtaccaggcggcctcccccgacgagggggcgctggtcaccgcagcccggaacttcggctacgtgttcctgtcccgcacccaggacaccgtcacgatcatggagctgggggaggaacgggtctaccaggtcctggccataatggacttcaacagcacgcgcaaacggatgtcggtgctggttcgaaagccagagggcgccatctgcctgtacaccaagggcgccgacacggtcatcttcgaacgcttgcacaggaggggggcaatggaatttgccacagaggaggccttggctgcctttgcccaggagaccctgcggacactgtgcctggcctacagggaggtggctgaggacatttacgaggactggcagcagcgccaccaggaggccagcctcctgctgcagaaccgggcacaggccctgcaacaggtgtacaacgagatggagcaggacctcaggctgctgggagccacagccatcgaggacagactccaggacggtgtccctgaaaccatcaaatgtctcaagaagagcaacatcaaaatatgggtgctcaccggggacaagcaggaaacggctgtgaacatcggcttcgcctgcgagctgctgtcagagaatatgctcattctggaggagaaggagattagccgcatcctggagacctactgggaaaacagtaacaaccttctaaccagggagtccctgtcgcaggtcaagctggccttggtcattaacggagacttcctggacaaactgctggtgtccctgcggaaggagccgcgcgccctggcgcagaacgtgaacatggacgaggcgtggcaggagctcggccagtccaggagggatttcctctacgccaggcgcctgtccctgctgtgccggaggttcgggctcccgctggctgcaccgccagcccaggactccagagcccgccgtagctccgaggtgctgcaggagcgcgccttcgtggacctggcgtccaagtgccaggcggtcatctgctgccgcgtgacgcccaagcagaaggccctgatcgtggccctggtcaagaagtaccaccaggtggtgaccctggccatcggggacggtgccaacgacatcaacatgatcaagaccgcggacgtgggcgtggggctggcgggccaggagggcatgcaggcagttcagaacagcgacttcgtgctcggccagttctgcttcctgcagcgcctcctgctggtgcacggccgctggtcctacgtgcggatctgcaagttcctgcgctacttcttctacaagagcatggccagcatgatggtgcaggtctggtttgcctgctacaacggcttcaccggccagcccctgtatgaaggatggttcctggctcttttcaacctcctgtacagcaccctgccagttctctacattgggctctttgagcaggacgtgagcgcagagcagagcctggagaagccggagctgtacgtggtggggcagaaggacgagctcttcaactactgggtcttcgtccaagccatcgcccatggtgtgaccacctctctggtcaacttcttcatgacactgtggatcagccgcgacacggcgggacccgccagcttcagcgaccaccagtcctttgcggtcgtggtggccctgtcttgcctgctgtccatcaccatggaggtcattcttatcatcaagtactggaccgccctgtgcgtggcgaccatcctcctcagccttggtttctacgccatcatgactaccaccacccagagcttctggctcttcagagtatcccccacgaccttcccgtttctgtatgccgacctcagcgtgatgtcctctccctccatcctgctggtggtcctgctgagtgtgtccataaacaccttccctgtcctggccctccgagtcatcttcccagccctcaaggagctacgtgccaaggaggagaaggtggaggagggccccagcgaggagattttcaccatggagcccttgcctcatgtacaccgggagtctcgtgcccgccgttccagctatgctttctcccaccgtgagggatatgcaaacctcatcactcagggcacaattctgcggaggggaccaggggtcagcagtgacatagcatctgaatccctagacccatctgatgaagaggcagcttcgagcccaaaagagtcacagtga

SEQ ID NO: 109678 - DNA, 887 bp, Homo sapiens
  Payload ID: 1541
  Gene Symbol: ATP8B3
  Gene Name: ATPase, aminophospholipid transporter, class I, type 8B, member 3
  ENST ID: ENST00000526847
  CDS Start-End: 1-116
tcggcttcgcctgcgagctgctgtcagagaatatgctcattctggaggagaaggagattaggacaaactgctggtgtccctgcggaaggagccgcgcgccctggcgcagaacgtgaacatggacgaggcgtggcaggagctcggccagtccaggagggatttcctctacgccaggcgcctgtccctgctgtgccggaggttcgggctcccgctggctgcaccgccagcccaggactccagagcccgccgtagctccgaggtgctgcaggagcgcgccttcgtggacctggcgtccaagtgccaggcggtcatctgctgccgcgtgacgcccaagcagaaggccctgatcgtggccctggtcaagaagtaccaccaggtggtgaccctggccatcggggacggtgccaacgacatcaacatgatcaagaccgcggacgtgggcgtggggctggcgggccaggagggcatgcaggcagttcagaacagcgacttcgtgctcggccagttctgcttcctgcagcgcctcctgctggtgcacggccgctggtcctacgtgcggatctgcaagttcctgcgctacttcttctacaagagcatggccagcatgatggtgcaggtctggtttgcctgctacaacggcttcaccggccagcccctgtatgaaggatggttcctggctcttttcaacctcctgtacagcaccctgccagttctctacattgggctctttgagcaggacgtgagcgcagagcagagcctggagaagccggagctgtacgtggtggggcagaaggacgagctcttcaactactgggtcttcgtccaagccatcgcccatggtgtgaccacctctctggtcaacttcttcatgacactgtggatcagcc

SEQ ID NO: 109679 - DNA, 5237 bp, Homo sapiens
  Payload ID: 1541
  Gene Symbol: ATP8B3
  Gene Name: ATPase, aminophospholipid transporter, class I, type 8B, member 3
  ENST ID: ENST00000531925
  CDS Start-End: 240-500
gtttcaggaccgttggcaccgggctaacggttccaccacgtccgccgccctggacgcccgcggcctgcccccccctgcctctcctgcgccgatacacttcgagtggattctggccatttgagcattctctccaactctccaatccccagtctgcccccacgggggtctcccccacctctcccccgtcccacagcctaaacccctcttcgccctgaacctcccttttcctcatgcggtgaatgggcactggccccgctcagactcccaggagcaccagagctggccctgagccaagccctgccccaccaggacctggggacacgggtgactcagacgtgactcaggaaggctcaggtcctgctggcatccgcggagccccaccagcatgggcagcctcggccagagagaagatctccaagatgaggacaggaactcagcattcacctggaaggtccaggccaacaaccgtgcctacaacgggcagttcaaggagaaggtgatcctgtgctggcaaaggaagaaatacaagaccaatgtcatccgcacggccaagtacaacttctactcgttcctgccgctgaacctgtacgagcagttccaccgcgtgtccaacctgttcttcctcatcatcatcatcctgcagagcattcccgacatctccacgctgccctggttctcgctcagtacccctatggtctgcctcctcttcatccgtgccacccgggacctggtggacgacatggggagacacaagagtgacagagccatcaacaacagaccctgccagattctgatggggaagagtccgacaggaaccgggcctgcattcattaggcgtttggccgggacgaggacagaggccgaggccctgatggcgaacccttgcagagcttagggctcgggcgatggggaggacaaggaaagtctgaagaggacgtgggtgcaggaccctggaggtcactgggtgggagcgtggacccgcggggagtggggtgggagcccggggaaggcttcctgagggggcaaaggcccggaggtggggactgcagctgcgggccccccgtcatcccgtgcctctggtctcccggtgtggggagggttggcagagggaggggcctccttcacaaccccctctccccgcagcttcaagcagaagaaatggcaggatctgtgcgtgggggatgtggtctgtctccgcaaggacaacatcgtcccagccgacatgctcttgctggccagcacggagcccagcagcctgtgctatgtggagacggtggacattgacggggagaccaacttgaagttcagacaggccctgatggtcacccacaaagaactggccactataaagaagatggcgtcctttcaaggcacagtgacgtgtgaggcgcctaacagtcggatgcaccacttcgtggggtgcctggaatggaatgacaagaaatactccctggacattggcaacctcctcctccgaggctgcaggattcgcaacacagacacctgctatggactggtcatttatgctggttttgacacaaaaattatgaagaactgtggcaagatccatttgaagagaaccaagctggacctcctgatgaacaagctggtggttgtgatcttcatctccgtggtgcttgtctgcctggtgttggccttcggcttcggtttctcagtcaaagaattcaaagaccaccactactacctctcgggggtgcatgggagcagcgtggccgcagagtccttcttcgtcttctggagcttcctcatcctgctcagcgtcaccatcccgatgtccatgttcatcctgtccgagttcatctacctggggaacagcgtcttcatcgactgggacgtgcagatgtactacaagccgcaggacgtgcctgccaaggcccgcagcaccagcctcaacgaccacctgggccaggtggaatacatcttctcggacaagacgggcacgctcacgcagaacatcttgaccttcaacaagtgctgcatcagcggccgcgtctatgggccggattcagaggccacgacccgacctaaggagaacccctacctctggaacaagttcgccgacgggaagctgctcttccacaatgcggccctgctgcacctcgtgcggaccaacggggacgaggccgtgcgggagttctggcgcctgctggccatctgccacacggtgatggtgcgggagagcccccgtgagcgcccagaccagctgttgtaccaggcggcctcccccgacgagggggcgctggtcaccgcagcccggaacttcggctacgtgttcctgtcccgcacccaggacaccgtcacgatcatggagctgggggaggaacgggtctaccaggtcctggccataatggacttcaacagcacgcgcaaacggatgtcggtgctggttcgaaagccagagggcgccatctgcctgtacaccaagggcgccgacacggtcatcttcgaacgcttgcacaggaggggggcaatggaatttgccacagaggaggccttggctgcctttgcccaggagaccctgcggacactgtgcctggcctacagggaggtggctgaggacatttacgaggactggcagcagcgccaccaggaggccagcctcctgctgcagaaccgggcacaggccctgcaacaggtgtacaacgagatggagcaggacctcaggctgctgggagccacagccatcgaggacagactccaggacggtgtccctgaaaccatcaaatgtctcaagaagagcaacatcaaaatatgggtgctcaccggggacaagcaggaaacggctgtgaacatcggcttcgcctgcgagctgctgtcagagaatatgctcattctggaggagaaggagattagccgcatcctggagacctactgggaaaacagtaacaaccttctaaccagggagtccctgtcgcaggtcaagctggccttggtcattaacggagacttcctggcgcctgtccctgctgtgccggaggttcgggctcccgctggctgcaccgccagcccaggactccagagcccgccgtagctccgaggtgctgcaggagcgcgccttcgtggacctggcgtccaagtgccaggcggtcatctgctgccgcgtgacgcccaagcagaaggccctgatcgtggccctggtcaagaagtaccaccaggtggtgaccctggccatcggggacggtgccaacgacatcaacatgatcaagaccgcggacgtgggcgtggggctggcgggccaggagggcatgcaggcagttcagaacagcgacttcgtgctcggccagttctgcttcctgcagcgcctcctgctggtgcacggccgctggtcctacgtgcggatctgcaagttcctgcgctacttcttctacaagagcatggccagcatgatggtgcaggtctggtttgcctgctacaacggcttcaccggccagcccctgtatgaaggatggttcctggctcttttcaacctcctgtacagcaccctgccagttctctacattgggctctttgagcaggacgtgagcgcagagcagagcctggagaagccggagctgtacgtggtggggcagaaggacgagctcttcaactactgggtcttcgtccaagccatcgcccatggtgtgaccacctctctggtcaacttcttcatgacactgtggatcagccgcgacacggcgggacccgccagcttcagcgaccaccagtcctttgcggtcgtggtggccctgtcttgcctgctgtccatcaccatggaggtcattcttatcatcaagtactggaccgccctgtgcgtggcgaccatcctcctcagccttggtttctacgccatcatgactaccaccacccagagcttctggctcttcagagtatcccccacgaccttcccgtttctgtatgccgacctcagcgtgatgtcctctccctccatcctgctggtggtcctgctgagtgtgtccataaacaccttccctgtcctggccctccgagtcatcttcccagccctcaaggagctacgtgccaaggaggagaaggtggaggagggccccagcgaggagattttcaccatggagcccttgcctcatgtacaccgggagtctcgtgcccgccgttccagctatgctttctcccaccgtgagggatatgcaaacctcatcactcagggcacaattctgcggaggggaccaggggtcagcagtgacatagcatctgaatccctagacccatctgatgaagaggcagcttcgagcccaaaagagtcacagtgacacctcaggaagatgtccttcctggggaagaagaagcaccagccacaggggcaggtgtcctcccaggaagtacagctcccccctacacctagctcatcattttctatggatagacaatccgctcttcatccagaaaaccaacctgccctccccaaatatgtgctcaccagcagcaacaggctatctgagtctttccaagagcaattgccaagggcacaggagaggtcattgtcacccaagcagaggccaccttctcctgagaagttgctgttgaccaaggagaggtcacattcttttcaggagaaatcactgttgcacagagaaagccagctgtcgtcatttgagagccagccacagcctctggggagccagtcatttctttcaggccagctgacgttggagagccagccagactcctcggaggagaagtcagcatttttgaagccctccacaccgttccggaagagctggcaaaaggagcctcacacccccaaggaggggacggtgccacttccagacaagacccacaaatctcaggtggagactctgccaccaagtctggaagaatcgtccacgtccacgagcgagcagcctatggaggtggagctgtggcccgcggagaagcagtcatcatcatccatggagtggctgctggtgcccggggaggagcagctatccttgcccccagaggagcagtcattgccctctgcggaggggaccagggttcagcagtgacgtagcatctgaatccctagacccatctgatgaagaggcatcttcgagcccaaaggagtcacgctggcatatcaggaagatgtccttcctgggaagaagaagctccagccagttctgctgcaagtcaaccagcatgcagggggccttcctctaaagacaaggactccacatgcttttctttttctaataaaccagggtccatctgaccccagcgct

SEQ ID NO: 109680 - DNA, 2759 bp, Homo sapiens
  Payload ID: 1541
  Gene Symbol: ATP8B3
  Gene Name: ATPase, aminophospholipid transporter, class I, type 8B, member 3
  ENST ID: ENST00000526092
  CDS Start-End: 181-1869
gtttcaggaccgttggcaccgggctaacggttccaccacgtccgccgccctggacgcccgcggcctgcccccccctgcctctcctgcgccggacctggggacacgggtgactcagacgtgactcaggaaggctcaggtcctgctggcatccgcggaggtgagacggtgatcagagctgggatgggagactccccaggcagaggggcacctgagaggaggcacaaggcccagcctggccgggctaggaagtatgaatggagaccagaaggccccaccagcatgggcagcctcggccagagagaagatctccaagatgaggacaggaactcagcattcacctggaaggtccaggccaacaaccgtgcctacaacgggcagttcaaggagaaggtgatcctgtgctggcaaaggaagaaatacaagaccaatgtcatccgcacggccaagtacaacttctactcgttcctgccgctgaacctgtacgagcagttccaccgcgtgtccaacctgttcttcctcatcatcatcatcctgcagagcattcccgacatctccacgctgccctggttctcgctcagtacccctatggtctgcctcctcttcatccgtgccacccgggacctggtggacgacatggggagacacaagagtgacagagccatcaacaacagaccctgccagattctgatggggaagagcttcaagcagaagaaatggcaggatctgtgcgtgggggatgtggtctgtctccgcaaggacaacatcgtcccagccgacatgctcttgctggccagcacggagcccagcagcctgtgctatgtggagacggtggacattgacggggagaccaacttgaagttcagacaggccctgatggtcacccacaaagaactggccactataaagaagatggcgtcctttcaaggcacagtgacgtgtgaggcgcctaacagtcggatgcaccacttcgtggggtgcctggaatggaatgacaagaaatactccctggacattggcaacctcctcctccgaggctgcaggattcgcaacacagacacctgctatggactggtcatttatgctggttttgacacaaaaattatgaagaactgtggcaagatccatttgaagagaaccaagctggacctcctgatgaacaagctggtggttgtgatcttcatctccgtggtgcttgtctgcctggtgttggccttcggcttcggtttctcagtcaaagaattcaaagaccaccactactacctctcgggggtgcatgggagcagcgtggccgcagagtccttcttcgtcttctggagcttcctcatcctgctcagcgtcaccatcccgatgtccatgttcatcctgtccgagttcatctacctggggaacagcgtcttcatcgactgggacgtgcagatgtactacaagccgcaggacgtgcctgccaaggcccgcagcaccagcctcaacgaccacctgggccaggtggaatacatcttctcggacaagacgggcacgctcacgcagaacatcttgaccttcaacaagtgctgcatcagcggccgcgtctatggtgcggccccgacacctgagctcccagctgggtcctcgatcttcaaggggctcagggtgcctgagaaccagagccacgtctggccccatgcccagcacctccgcccgaatctgaaccagggaaccgtagccagatggcctggtttcctttggagggggccaggaaaatttttttttttttttgaggcagagtctcactctgtctacccaggcaggaatgcagtggtgcaatcttggctcactgcaatctccacctcccaggttcaagcgattctcctggctcagcctcccgagtagctgggattacaggcacctgccaccacacctaatttttttgtatttttagcagagatggggtttcaccatgttggccatgctggtctcgaactcctggcctccggcgatccacctgcctcggcctcccaaagtgctgggattacaggcgtgagccaccacgcccggccgactttttttttttttttctctctgagacggagttttgctctcgttgcccaggctggagtgcagtggtgcgatctctgctcactgaaacctccgcctcctgggttgattctcccgcctcagcctcccaagtagctgggattacagttgcgtgccaccccgcctggctaatttttgtattttttttttcagtagagatggggtttcaccctgtttcccaggctggtctcgaactcctgacttcaggtgatctgcctgcctcagcctccaaaatattggcattgcaggcatgagccaccacacctagccaaacttttaaacagtgtgtatttatttattttttgagatggggtcttgctctgccgcccaggctggaatgcagtggtgcaatcatagcttattgcagcctcgaattcctgggctcaagcaatcctcccacttcagcttcccaagtagccgggactacaggagagtgccaccttacccagcttatttttgtattttttgtcaagacagggaatccctatgttgcccaggctggtcttgaactcctgggcttaagcgatccgcctgcctccgcttttcaaagcactggaattacagatgtgagccaccacacccggccactgctcttcttttgactttcacaagcctttatttgtggatgctgaaattcgaattgctgagtatttctcagatcacaaaataaaatagttttgtttgtt

SEQ ID NO: 109681 - DNA, 933 bp, Homo sapiens
  Payload ID: 1541
  Gene Symbol: ATP8B3
  Gene Name: ATPase, aminophospholipid transporter, class I, type 8B, member 3
  ENST ID: ENST00000587160
  CDS Start-End: 319-933
gtccgccgccctggacgcccgcggcctgcccccccctgcctctcctgcgccggtgagcggcgggtgctcccactgctgtgcgtccccgggagcccgcgcaccctctctgggctccacccaggctgagagctggggtcgtggcggcgggggtggagagcgcgcccctagagatacacttcgagtggattctggccatttgagcattctctccaactctccaatccccagtctgcccccacgggggtctcccccacctctcccccgtcccacagcctaaacccctcttcgccctgaacctcccttttcctcatgcggtgaatgggcactggccccgctcagactcccaggagcaccagagctggccctgagccaagccctgccccaccaggacctggggacacgggtgactcagacgtgactcaggaaggctcaggtcctgctggcatccgcggaggtgagacggtgatcagagctgggatgggagactccccaggcagaggggcacctgagaggaggcacaaggcccagcctggccgggctaggaagtatgaatggagaccagaaggccccaccagcatgggcagcctcggccagagagaagatctccaagatgaggacaggaactcagcattcacctggaaggtccaggccaacaaccgtgcctacaacgggcagttcaaggagaaggtgatcctgtgctggcaaaggaagaaatacaagaccaatgtcatccgcacggccaagtacaacttctactcgttcctgccgctgaacctgtacgagcagttccaccgcgtgtccaacctgttcttcctcatcatcatcatcctgcagagcattcccgacatctccacgctgccctggttctcgctcagtacccctatggtctgcctcctcttcatccgtgccacccgggacctggtggacgacatg

SEQ ID NO: 109682 - DNA, 3532 bp, Homo sapiens
  Payload ID: 1542
  Gene Symbol: ATP2A1
  Gene Name: ATPase, Ca++ transporting, cardiac muscle, fast twitch 1
  Uniprot ID: O14983
  ENST ID: ENST00000357084
  CDS Start-End: 268-3273
agccagccaatccctgatctggtggaggggggagcccggcctccccctgctccctcataaggaccagctgggggccggggggtggccggctgctcaagtgggacgggggtcagagctttgtggagggaagaaaaacctggagggggcaggagagtaaaaagaagaaacccaggcagacaggcagttggacacactgaggaagaccccccacgagtgggaaccccctggaaggaacacaccggccccggcccccaggaagggagcacaatggaggccgctcatgctaaaaccacggaggaatgtttggcctattttggggtgagtgagaccacgggcctcaccccggaccaagttaagcggaatctggagaaatacggcctcaatgagctccctgctgaggaagggaagaccctgtgggagctggtgatagagcagtttgaagacctcctggtgcggattctcctcctggccgcatgcatttccttcgtgctggcctggtttgaggaaggtgaagagaccatcactgcctttgttgaaccctttgtcatcctcttgatcctcattgccaatgccatcgtgggggtttggcaggagcggaacgcagagaacgccatcgaggccctgaaggagtatgagccagagatggggaaggtctaccgggctgaccgcaagtcagtgcaaaggatcaaggctcgggacatcgtccctggggacatcgtggaggtggctgtgggggacaaagtccctgcagacatccgaatcctcgccatcaaatccaccacgctgcgggttgaccagtccatcctgacaggcgagtctgtatctgtcatcaaacacacggagcccgttcctgacccccgagctgtcaaccaggacaagaagaacatgcttttctcgggcaccaacattgcagccggcaaggccttgggcatcgtggccaccactggtgtgggcaccgagattgggaagatccgagaccaaatggctgccacagaacaggacaagacccccttgcagcagaagctggatgagtttggggagcagctctccaaggtcatctccctcatctgtgtggctgtctggcttatcaacattggccacttcaacgaccccgtccatgggggctcctggttccgcggggccatctactactttaagattgccgtggccttggctgtggctgccatccccgaaggtcttcctgcagtcatcaccacctgcctggccctgggtacccgtcggatggcaaagaagaatgccattgtaagaagcttgccctccgtagagaccctgggctgcacctctgtcatctgttccgacaagacaggcaccctcaccaccaaccagatgtctgtctgcaagatgtttatcattgacaaggtggatggggacatctgcctcctgaatgagttctccatcaccggctccacttacgctccagagggagaggtcttgaagaatgataagccagtccggccagggcagtatgacgggctggtggagctggccaccatctgtgccctctgcaatgactcctccttggacttcaacgaggccaaaggtgtctatgagaaggtcggcgaggccaccgagacagcactcaccaccctggtggagaagatgaatgtgttcaacacggatgtgagaagcctctcgaaggtggagagagccaacgcctgcaactcggtgatccgccagctaatgaagaaggaattcaccctggagttctcccgagacagaaagtccatgtctgtctattgctccccagccaaatcttcccgggctgctgtgggcaacaagatgtttgtcaagggtgcccctgagggcgtcatcgaccgctgtaactatgtgcgagttggcaccacccgggtgccactgacggggccggtgaaggaaaagatcatggcggtgatcaaggagtggggcactggccgggacaccctgcgctgcttggccctggccacccgggacacccccccgaagcgagaggaaatggtcctggatgactctgccaggttcctggagtatgagacggacctgacattcgtgggtgtagtgggcatgctggaccctccgcgcaaggaggtcacgggctccatccagctgtgccgtgacgccgggatccgggtgatcatgatcactggggacaacaagggcacagccattgccatctgccggcgaattggcatctttggggagaacgaggaggtggccgatcgcgcctacacgggccgagagttcgacgacctgcccctggctgaacagcgggaagcctgccgacgtgcctgctgcttcgcccgtgtggagccctcgcacaagtccaagattgtggagtacctgcagtcctacgatgagatcacagccatgacaggtgatggcgtcaatgacgcccctgccctgaagaaggctgagattggcattgccatgggatctggcactgccgtggccaagactgcctctgagatggtgctggctgacgacaacttctccaccatcgtagctgctgtggaggagggccgcgccatctacaacaacatgaagcagttcatccgctacctcatttcctccaacgtgggcgaggtggtctgtatcttcctgaccgctgccctggggctgcctgaggccctgatcccggtgcagctgctatgggtgaacttggtgaccgacgggctcccagccacagccctgggcttcaacccaccagacctggacatcatggaccgccccccccggagccccaaggagcccctcatcagtggctggctcttcttccgctacatggcaatcgggggctatgtgggtgcagccaccgtgggagcagctgcctggtggttcctgtacgctgaggatgggcctcatgtcaactacagccagctgactcacttcatgcagtgcaccgaggacaacacccactttgagggcatagactgtgaggtcttcgaggcccccgagcccatgaccatggccctgtccgtgctggtgaccatcgagatgtgcaatgcactgaacagcctgtccgagaaccagtccctgctgcggatgccaccctgggtgaacatctggctgctgggctccatctgcctctccatgtccctgcacttcctcatcctctatgttgaccccctgccgatgatcttcaagctccgggccctggacctcacccagtggctcatggtcctcaagatctcactgccagtcattgggctcgacgaaatcctcaagttcgttgctcggaactacctagaggatccagaagatgaaagaaggaagtgagcatccttttgctctgtcctccccaccccgatagtgacacatcttcaggcagagctgtggcacagacccccgtcctgtcccccacacccgtgtcatgtgtctgtttataaacatgtccccttccctttccttccccctcggccacccgcctccctctcaaccttgtaaattccccttcccaaccccgaggggcttgcagggacaaggcgaccgactgcgctgagctgcttatttattgaaaataaacgacggaaaagtc

SEQ ID NO: 109683 - DNA, 3536 bp, Homo sapiens
  Payload ID: 1542
  Gene Symbol: ATP2A1
  Gene Name: ATPase, Ca++ transporting, cardiac muscle, fast twitch 1
  Uniprot ID: O14983
  ENST ID: ENST00000395503
  CDS Start-End: 185-3169
ggccggctgctcaagtgggacgggggtcagagctttgtggagggaagaaaaacctggagggggcaggagagtaaaaagaagaaacccaggcagacaggcagttggacacactgaggaagaccccccacgagtgggaaccccctggaaggaacacaccggccccggcccccaggaagggagcacaatggaggccgctcatgctaaaaccacggaggaatgtttggcctattttggggtgagtgagaccacgggcctcaccccggaccaagttaagcggaatctggagaaatacggcctcaatgagctccctgctgaggaagggaagaccctgtgggagctggtgatagagcagtttgaagacctcctggtgcggattctcctcctggccgcatgcatttccttcgtgctggcctggtttgaggaaggtgaagagaccatcactgcctttgttgaaccctttgtcatcctcttgatcctcattgccaatgccatcgtgggggtttggcaggagcggaacgcagagaacgccatcgaggccctgaaggagtatgagccagagatggggaaggtctaccgggctgaccgcaagtcagtgcaaaggatcaaggctcgggacatcgtccctggggacatcgtggaggtggctgtgggggacaaagtccctgcagacatccgaatcctcgccatcaaatccaccacgctgcgggttgaccagtccatcctgacaggcgagtctgtatctgtcatcaaacacacggagcccgttcctgacccccgagctgtcaaccaggacaagaagaacatgcttttctcgggcaccaacattgcagccggcaaggccttgggcatcgtggccaccactggtgtgggcaccgagattgggaagatccgagaccaaatggctgccacagaacaggacaagacccccttgcagcagaagctggatgagtttggggagcagctctccaaggtcatctccctcatctgtgtggctgtctggcttatcaacattggccacttcaacgaccccgtccatgggggctcctggttccgcggggccatctactactttaagattgccgtggccttggctgtggctgccatccccgaaggtcttcctgcagtcatcaccacctgcctggccctgggtacccgtcggatggcaaagaagaatgccattgtaagaagcttgccctccgtagagaccctgggctgcacctctgtcatctgttccgacaagacaggcaccctcaccaccaaccagatgtctgtctgcaagatgtttatcattgacaaggtggatggggacatctgcctcctgaatgagttctccatcaccggctccacttacgctccagagggagaggtcttgaagaatgataagccagtccggccagggcagtatgacgggctggtggagctggccaccatctgtgccctctgcaatgactcctccttggacttcaacgaggccaaaggtgtctatgagaaggtcggcgaggccaccgagacagcactcaccaccctggtggagaagatgaatgtgttcaacacggatgtgagaagcctctcgaaggtggagagagccaacgcctgcaactcggtgatccgccagctaatgaagaaggaattcaccctggagttctcccgagacagaaagtccatgtctgtctattgctccccagccaaatcttcccgggctgctgtgggcaacaagatgtttgtcaagggtgcccctgagggcgtcatcgaccgctgtaactatgtgcgagttggcaccacccgggtgccactgacggggccggtgaaggaaaagatcatggcggtgatcaaggagtggggcactggccgggacaccctgcgctgcttggccctggccacccgggacacccccccgaagcgagaggaaatggtcctggatgactctgccaggttcctggagtatgagacggacctgacattcgtgggtgtagtgggcatgctggaccctccgcgcaaggaggtcacgggctccatccagctgtgccgtgacgccgggatccgggtgatcatgatcactggggacaacaagggcacagccattgccatctgccggcgaattggcatctttggggagaacgaggaggtggccgatcgcgcctacacgggccgagagttcgacgacctgcccctggctgaacagcgggaagcctgccgacgtgcctgctgcttcgcccgtgtggagccctcgcacaagtccaagattgtggagtacctgcagtcctacgatgagatcacagccatgacaggtgatggcgtcaatgacgcccctgccctgaagaaggctgagattggcattgccatgggatctggcactgccgtggccaagactgcctctgagatggtgctggctgacgacaacttctccaccatcgtagctgctgtggaggagggccgcgccatctacaacaacatgaagcagttcatccgctacctcatttcctccaacgtgggcgaggtggtctgtatcttcctgaccgctgccctggggctgcctgaggccctgatcccggtgcagctgctatgggtgaacttggtgaccgacgggctcccagccacagccctgggcttcaacccaccagacctggacatcatggaccgccccccccggagccccaaggagcccctcatcagtggctggctcttcttccgctacatggcaatcgggggctatgtgggtgcagccaccgtgggagcagctgcctggtggttcctgtacgctgaggatgggcctcatgtcaactacagccagctgactcacttcatgcagtgcaccgaggacaacacccactttgagggcatagactgtgaggtcttcgaggcccccgagcccatgaccatggccctgtccgtgctggtgaccatcgagatgtgcaatgcactgaacagcctgtccgagaaccagtccctgctgcggatgccaccctgggtgaacatctggctgctgggctccatctgcctctccatgtccctgcacttcctcatcctctatgttgaccccctgccgatgatcttcaagctccgggccctggacctcacccagtggctcatggtcctcaagatctcactgccagtcattgggctcgacgaaatcctcaagttcgttgctcggaactacctagagggataactgttccccctcctccatctctgagcccgtgtcacagatccagaagatgaaagaaggaagtgagcatccttttgctctgtcctccccaccccgatagtgacacatcttcaggcagagctgtggcacagacccccgtcctgtcccccacacccgtgtcatgtgtctgtttataaacatgtccccttccctttccttccccctcggccacccgcctccctctcaaccttgtaaattccccttcccaaccccgaggggcttgcagggacaaggcgaccgactgcgctgagctgcttatttattgaaaataaacgacggaaaagtctggccttgcctctgtgcaagcttggaggcctgggtcgccgctgtg

SEQ ID NO: 109684 - DNA, 3130 bp, Homo sapiens
  Payload ID: 1542
  Gene Symbol: ATP2A1
  Gene Name: ATPase, Ca++ transporting, cardiac muscle, fast twitch 1
  Uniprot ID: O14983
  ENST ID: ENST00000536376
  CDS Start-End: 199-2808
agcgcggcggtgtgatgatgactccaaggagcccggcgcccggtgctggcctggtttgaggaaggtgaagagaccatcactgcctttgttgaaccctttgtcatcctcttgatcctcattgccaatgccatcgtgggggtttggcaggagcggaacgcagagaacgccatcgaggccctgaaggagtatgagccagagatggggaaggtctaccgggctgaccgcaagtcagtgcaaaggatcaaggctcgggacatcgtccctggggacatcgtggaggtggctgtgggggacaaagtccctgcagacatccgaatcctcgccatcaaatccaccacgctgcgggttgaccagtccatcctgacaggcgagtctgtatctgtcatcaaacacacggagcccgttcctgacccccgagctgtcaaccaggacaagaagaacatgcttttctcgggcaccaacattgcagccggcaaggccttgggcatcgtggccaccactggtgtgggcaccgagattgggaagatccgagaccaaatggctgccacagaacaggacaagacccccttgcagcagaagctggatgagtttggggagcagctctccaaggtcatctccctcatctgtgtggctgtctggcttatcaacattggccacttcaacgaccccgtccatgggggctcctggttccgcggggccatctactactttaagattgccgtggccttggctgtggctgccatccccgaaggtcttcctgcagtcatcaccacctgcctggccctgggtacccgtcggatggcaaagaagaatgccattgtaagaagcttgccctccgtagagaccctgggctgcacctctgtcatctgttccgacaagacaggcaccctcaccaccaaccagatgtctgtctgcaagatgtttatcattgacaaggtggatggggacatctgcctcctgaatgagttctccatcaccggctccacttacgctccagagggagaggtcttgaagaatgataagccagtccggccagggcagtatgacgggctggtggagctggccaccatctgtgccctctgcaatgactcctccttggacttcaacgaggccaaaggtgtctatgagaaggtcggcgaggccaccgagacagcactcaccaccctggtggagaagatgaatgtgttcaacacggatgtgagaagcctctcgaaggtggagagagccaacgcctgcaactcggtgatccgccagctaatgaagaaggaattcaccctggagttctcccgagacagaaagtccatgtctgtctattgctccccagccaaatcttcccgggctgctgtgggcaacaagatgtttgtcaagggtgcccctgagggcgtcatcgaccgctgtaactatgtgcgagttggcaccacccgggtgccactgacggggccggtgaaggaaaagatcatggcggtgatcaaggagtggggcactggccgggacaccctgcgctgcttggccctggccacccgggacacccccccgaagcgagaggaaatggtcctggatgactctgccaggttcctggagtatgagacggacctgacattcgtgggtgtagtgggcatgctggaccctccgcgcaaggaggtcacgggctccatccagctgtgccgtgacgccgggatccgggtgatcatgatcactggggacaacaagggcacagccattgccatctgccggcgaattggcatctttggggagaacgaggaggtggccgatcgcgcctacacgggccgagagttcgacgacctgcccctggctgaacagcgggaagcctgccgacgtgcctgctgcttcgcccgtgtggagccctcgcacaagtccaagattgtggagtacctgcagtcctacgatgagatcacagccatgacaggtgatggcgtcaatgacgcccctgccctgaagaaggctgagattggcattgccatgggatctggcactgccgtggccaagactgcctctgagatggtgctggctgacgacaacttctccaccatcgtagctgctgtggaggagggccgcgccatctacaacaacatgaagcagttcatccgctacctcatttcctccaacgtgggcgaggtggtctgtatcttcctgaccgctgccctggggctgcctgaggccctgatcccggtgcagctgctatgggtgaacttggtgaccgacgggctcccagccacagccctgggcttcaacccaccagacctggacatcatggaccgccccccccggagccccaaggagcccctcatcagtggctggctcttcttccgctacatggcaatcgggggctatgtgggtgcagccaccgtgggagcagctgcctggtggttcctgtacgctgaggatgggcctcatgtcaactacagccagctgactcacttcatgcagtgcaccgaggacaacacccactttgagggcatagactgtgaggtcttcgaggcccccgagcccatgaccatggccctgtccgtgctggtgaccatcgagatgtgcaatgcactgaacagcctgtccgagaaccagtccctgctgcggatgccaccctgggtgaacatctggctgctgggctccatctgcctctccatgtccctgcacttcctcatcctctatgttgaccccctgccgatgatcttcaagctccgggccctggacctcacccagtggctcatggtcctcaagatctcactgccagtcattgggctcgacgaaatcctcaagttcgttgctcggaactacctagagggataactgttccccctcctccatctctgagcccgtgtcacagatccagaagatgaaagaaggaagtgagcatccttttgctctgtcctccccaccccgatagtgacacatcttcaggcagagctgtggcacagacccccgtcctgtcccccacacccgtgtcatgtgtctgtttataaacatgtccccttccctttccttccccctcggccacccgcctccctctcaaccttgtaaattccccttcccaaccccgaggggcttgcagggacaaggcgaccgactgcgctgagctgcttatttattgaaaataaacgacggaaaagtc

SEQ ID NO: 109685 - DNA, 467 bp, Homo sapiens
  Payload ID: 1542
  Gene Symbol: ATP2A1
  Gene Name: ATPase, Ca++ transporting, cardiac muscle, fast twitch 1
  ENST ID: ENST00000564470
  CDS Start-End: 1-126
gtcatctgttccgacaagacaggcaccctcaccaccaaccagatgtctgtctgcaagggtcttccactgacctcaggccaagaacccctgcccttcacagagttttgtggaagactacacccatgaactagaaattgctgttctgagaagcaagggctgtgtggtcagatcagggtgagaaaggctgtaaccttggctcctgggcgagacccacaacatctgctgctatttgaaagccttagaggaggctgactgtgtaaagaagacggattctgctttgccccagaggttcccaagttttttttctgaccacagaacttttttgtcttggaacccatcttaaccatctctcttctcgggaatgaaaagcccagtctctgttgcgtttgcccaggattcaggatgtttatcattgacaaggtggatggggacatctgcctcctgaatgagttctccatcaccggctc

SEQ ID NO: 109686 - DNA, 831 bp, Homo sapiens
  Payload ID: 1542
  Gene Symbol: ATP2A1
  Gene Name: ATPase, Ca++ transporting, cardiac muscle, fast twitch 1
  ENST ID: ENST00000564732
  CDS Start-End: 1-386
gcggggccatctactactttaagattgccgtggccttggctgtggctgccatccccgaaggtcttcctgcagtcatcaccacctgcctggccctgggtacccgtcggatggcaaagaagaatgccattgtaagaagcttgccctccgtagagaccctgggctgcacctctgtcatctgttccgacaagacaggcaccctcaccaccaaccagatgtctgtctgcaagatgtttatcattgacaaggtggatggggacatctgcctcctgaatgagttctccatcaccggctccacttacgctccagagggagaggtgccaaaggtgtctatgagaaggtcggcgaggccaccgagacagcactcaccaccctggtggagaagatgaatgtgttcaacacggatgtgagaagcctctcgaaggtggagagagccaacgcctgcaactcggtgatccgccagctaatgaagaaggaattcaccctggagttctcccgagacagaaagtccatgtctgtctattgctccccagccaaatcttcccgggctgctgtgggcaacaagatgtttgtcaagggtgcccctgagggcgtcatcgaccgctgtaactatgtgcgagttggcaccacccgggtgccactgacggggccggtgaaggaaaagatcatggcggtgatcaaggagtggggcactggccgggacaccctgcgctgcttggccctggccacccgggacacccccccgaagcgagaggaaatggtcctggatgactctgccaggttcctggagtatgagacggacctgacattcgtgggtgtagtgggcatgctgga

SEQ ID NO: 109687 - DNA, 195 bp, Homo sapiens
  Payload ID: 1542
  Gene Symbol: ATP2A1
  Gene Name: ATPase, Ca++ transporting, cardiac muscle, fast twitch 1
  ENST ID: ENST00000564112
  CDS Start-End: 1-73
caagatctcactgccagtcattgggctcgacgaaatcctcaagttcgttgctcggaactacctagagggataactgttccccctcctccatctctgagcccgtgtcacaggtatcacccccttcttgccctcagcccagctgctgtgcccctgccacccgcgccccctcagccccttgcgcgtcgcatccaaggt

SEQ ID NO: 109688 - DNA, 576 bp, Homo sapiens
  Payload ID: 1542
  Gene Symbol: ATP2A1
  Gene Name: ATPase, Ca++ transporting, cardiac muscle, fast twitch 1
  ENST ID: ENST00000562185
  CDS Start-End: 498-576
cctaaaggttagagtcctgtccggggcagaagtctcccaggcgctttctccttgaagcagccaacccttgaactgccccccactttgccgagtctgtttctggactccaggcgagcttcttagcccttctctgggcaccaagctgtctgcccaccaccctagagcctccccactgcaggccggagtccagggcgctccatcccagaccttcacccactagaccttaacccggggccctccccttgcctcctcccccagggaagaccctgtgggagctggtgatagagcagtttgaagacctcctggtgcggattctcctcctggccgcatgcatttccttcgtgctggcctggtttgaggaaggtgaagagaccatcactgcctttgttgaaccctttgtcatcctcttgatcctcattgccaatgccatcgtgggggtttggcaggagcggaacgcagagaacgccatcgaggccctgaaggagtatgagccagagatggggaaggtctaccgggctgaccgcaagtcagtgcaaaggatcaaggctcgggacatcgtccctggggacatcgtgg

SEQ ID NO: 109689 - DNA, 545 bp, Homo sapiens
  Payload ID: 1542
  Gene Symbol: ATP2A1
  Gene Name: ATPase, Ca++ transporting, cardiac muscle, fast twitch 1
  ENST ID: ENST00000563975
  CDS Start-End: 205-545
cacgcgtttctcccttcagggtttcttaaggaagagctgggccgttgtccaatgctcgcagggggaagaagatactgagaaaacagagtcccgagatccagagttttgggaggttttaatgggatgaacttgatgaacctcaaggtggcctgattctcttagccacaaagtcttgggtgtggggggcatgaggctgaaccccaaatgaatctgtccttttcttctttttcctgggtagagctccctgctgaggaagggaagaccctgtgggagctggtgatagagcagtttgaagacctcctggtgcggattctcctcctggccgcatgcatttccttcgtgctggcctggtttgaggaaggtgaagagaccatcactgcctttgttgaaccctttgtcatcctcttgatcctcattgccaatgccatcgtgggggtttggcaggagcggaacgcagagaacgccatcgaggccctgaaggagtatgagccagagatggggaaggtctaccgggctgaccgcaagtcagtgcaaaggatcaaggc

SEQ ID NO: 109690 - DNA, 4453 bp, Homo sapiens
  Payload ID: 1543
  Gene Symbol: ATP2A2
  Gene Name: ATPase, Ca++ transporting, cardiac muscle, slow twitch 2
  Uniprot ID: P16615
  ENST ID: ENST00000308664
  CDS Start-End: 675-3668
gcgcgggaggagggagccgggaggagggggcggggccgcgccgcccgcgccgcgctgggcgctctcggccaatgagcggcgtccacatgccgcggcggcggcgaaaggggaggcagcggccgataaatgctattagagcagccgccgcggagccgtccccgacgccacctccttttccttcgccgcagtttcctccgccgctgtcgggcgtgcggcgctgagggacccgggcgagcgcgccgcgcaccgccccgccggctcgcctccctcgccgcgttccgccctcagtggtctgccgggcgccccctcctccggcccgggcggggcctctgatcgcctcaagagagcggggagggggctcgggggccgcggcctgccctcccggcgggcggctgagggcgagggaggccctcccttctggcgaggggagggagggtgggtcaggagcccccaacccgccctgcggagctcggggccgcgcgaggggcggttgtctgggggagggggcgcggggtgattcagcgcccggcgaggcggaagcggccgcaagaggaggaggggagagcccgtccgcgcctgggctcccggggtggcacgagcccgcggccggagtgcgaggcggaggcgaggaggccgcggggacgggaggcgaggccggccgggcccccgaagccatggagaacgcgcacaccaagacggtggaggaggtgctgggccacttcggcgtcaacgagagtacggggctgagcctggaacaggtcaagaagcttaaggagagatggggctccaacgagttaccggctgaagaaggaaaaaccttgctggaacttgtgattgagcagtttgaagacttgctagttaggattttattactggcagcatgtatatcttttgttttggcttggtttgaagaaggtgaagaaacaattacagcctttgtagaaccttttgtaattttactcatattagtagccaatgcaattgtgggtgtatggcaggaaagaaatgctgaaaatgccatcgaagcccttaaggaatatgagcctgaaatgggcaaagtgtatcgacaggacagaaagagtgtgcagcggattaaagctaaagacatagttcctggtgatattgtagaaattgctgttggtgacaaagttcctgctgatataaggttaacttccatcaaatctaccacactaagagttgaccagtcaattctcacaggtgaatctgtctctgtcatcaagcacactgatcccgtccctgacccacgagctgtcaaccaagataaaaagaacatgctgttttctggtacaaacattgctgctgggaaagctatgggagtggtggtagcaactggagttaacaccgaaattggcaagatccgggatgaaatggtggcaacagaacaggagagaacaccccttcagcaaaaactagatgaatttggggaacagctttccaaagtcatctcccttatttgcattgcagtctggatcataaatattgggcacttcaatgacccggttcatggagggtcctggatcagaggtgctatttactactttaaaattgcagtggccctggctgtagcagccattcctgaaggtctgcctgcagtcatcaccacctgcctggctcttggaactcgcagaatggcaaagaaaaatgccattgttcgaagcctcccgtctgtggaaacccttggttgtacttctgttatctgctcagacaagactggtacacttacaacaaaccagatgtcagtctgcaggatgttcattctggacagagtggaaggtgatacttgttcccttaatgagtttaccataactggatcaacttatgcacctattggagaagtgcataaagatgataaaccagtgaattgtcaccagtatgatggtctggtagaattagcaacaatttgtgctctttgtaatgactctgctttggattacaatgaggcaaagggtgtgtatgaaaaagttggagaagctacagagactgctctcacttgcctagtagagaagatgaatgtatttgataccgaattgaagggtctttctaaaatagaacgtgcaaatgcctgcaactcagtcattaaacagctgatgaaaaaggaattcactctagagttttcacgtgacagaaagtcaatgtcggtttactgtacaccaaataaaccaagcaggacatcaatgagcaagatgtttgtgaagggtgctcctgaaggtgtcattgacaggtgcacccacattcgagttggaagtactaaggttcctatgacctctggagtcaaacagaagatcatgtctgtcattcgagagtggggtagtggcagcgacacactgcgatgcctggccctggccactcatgacaacccactgagaagagaagaaatgcaccttgaggactctgccaactttattaaatatgagaccaatctgaccttcgttggctgcgtgggcatgctggatcctccgagaatcgaggtggcctcctccgtgaagctgtgccggcaagcaggcatccgggtcatcatgatcactggggacaacaagggcactgctgtggccatctgtcgccgcatcggcatcttcgggcaggatgaggacgtgacgtcaaaagctttcacaggccgggagtttgatgaactcaacccctccgcccagcgagacgcctgcctgaacgcccgctgttttgctcgagttgaaccctcccacaagtctaaaatcgtagaatttcttcagtcttttgatgagattacagctatgactggcgatggcgtgaacgatgctcctgctctgaagaaagccgagattggcattgctatgggctctggcactgcggtggctaaaaccgcctctgagatggtcctggcggatgacaacttctccaccattgtggctgccgttgaggaggggcgggcaatctacaacaacatgaaacagttcatccgctacctcatctcgtccaacgtcggggaagttgtctgtattttcctgacagcagcccttggatttcccgaggctttgattcctgttcagctgctctgggtcaatctggtgacagatggcctgcctgccactgcactggggttcaaccctcctgatctggacatcatgaataaacctccccggaacccaaaggaaccattgatcagcgggtggctctttttccgttacttggctattggctgttacgtcggcgctgctaccgtgggtgctgctgcatggtggttcattgctgctgacggtggtccaagagtgtccttctaccagctgagtcatttcctacagtgtaaagaggacaacccggactttgaaggcgtggattgtgcaatctttgaatccccatacccgatgacaatggcgctctctgttctagtaactatagaaatgtgtaacgccctcaacagcttgtccgaaaaccagtccttgctgaggatgcccccctgggagaacatctggctcgtgggctccatctgcctgtccatgtcactccacttcctgatcctctatgtcgaacccttgccactcatcttccagatcacaccgctgaacgtgacccagtggctgatggtgctgaaaatctccttgcccgtgattctcatggatgagacgctcaagtttgtggcccgcaactacctggaacctgcaatactggagtaaccgcttcctaaaccattttgcagaaatgtaagggtgttcggttgcgtgcatgtgcgtttttagcaacacatctaccaaccctgtgcatgactgatgttggggaaaaagaaaagtaaaaaacttcccaactcactttgtgttatgtggaggaaatgtgtattaccaatggggttgttagcttttaaatcaaaatactgattacagatgtacaatttagcttaatcagaaagcctctccagagaagtttggtttctttgctgcaagaggaatgaggctctgtaaccttatctaagaacttggaagccgtcagccaagtcgccacatttctctgcaaaatgtcatagcttatataaatgtacagtattcaattgtaatgcatgccttcggttgtaagtagccagatccctctccagtgacattggaacatgctactttttaattggccctgtacagtttgcttatttataaattcattaaaaacactacaggtgttgaatggttaaaatgtaggcctccagttcattttcagttattttctgagtgtgcagacagctatttcgcactgtattaaatgtaacttatttaatgaaatcagaagcagtagacagatgttggtgcaatacaaatattgtgatgcatttatcttaataaaatgctaaatgtcaatttatcactgcgcatgtttgactttagactgtaaatagagatcagtttgtttctttctgtgctggtaacaatgagcgtcgcacagacatggtttcaggtaaataaatctattctatgat

SEQ ID NO: 109691 - DNA, 5702 bp, Homo sapiens
  Payload ID: 1543
  Gene Symbol: ATP2A2
  Gene Name: ATPase, Ca++ transporting, cardiac muscle, slow twitch 2
  ENST ID: ENST00000377685
  CDS Start-End: 494-646
gccgcagtttcctccgccgctgtcgggcgtgcggcgctgagggacccgggcgagcgcgccgcgcaccgccccgccggctcgcctccctcgccgcgttccgccctcagtggtctgccgggcgccccctcctccggcccgggcggggcctctgatcgcctcaagagagcggggagggggctcgggggccgcggcctgccctcccggcgggcggctgagggcgagggaggccctcccttctggcgaggggagggagggtgggtcaggagcccccaacccgccctgcggagctcggggccgcgcgaggggcggttgtctgggggagggggcgcggggtgattcagcgcccggcgaggcggaagcggccgcaagaggaggaggggagagcccgtccgcgcctgggctcccggggtggcacgagcccgcggccggagtgcgaggcggaggcgaggaggccgcggggacgggaggcgaggccggccgggcccccgaagccatggagaacgcgcacaccaagacggtggaggaggtgctgggccacttcggcgtcaacgagagtacggggctgagcctggaacaggtcaagaagcttaaggagagatggggctccaacggtaggtgcagggaaaaaccttgctggaacttgtgattgagcagtttgaagacttgctagttaggattttattactggcagcatgtatatcttttgttttggcttggtttgaagaaggtgaagaaacaattacagcctttgtagaaccttttgtaattttactcatattagtagccaatgcaattgtgggtgtatggcaggaaagaaatgctgaaaatgccatcgaagcccttaaggaatatgagcctgaaatgggcaaagtgtatcgacaggacagaaagagtgtgcagcggattaaagctaaagacatagttcctggtgatattgtagaaattgctgttggtgacaaagttcctgctgatataaggttaacttccatcaaatctaccacactaagagttgaccagtcaattctcacaggtgaatctgtctctgtcatcaagcacactgatcccgtccctgacccacgagctgtcaaccaagataaaaagaacatgctgttttctggtacaaacattgctgctgggaaagctatgggagtggtggtagcaactggagttaacaccgaaattggcaagatccgggatgaaatggtggcaacagaacaggagagaacaccccttcagcaaaaactagatgaatttggggaacagctttccaaagtcatctcccttatttgcattgcagtctggatcataaatattgggcacttcaatgacccggttcatggagggtcctggatcagaggtgctatttactactttaaaattgcagtggccctggctgtagcagccattcctgaaggtctgcctgcagtcatcaccacctgcctggctcttggaactcgcagaatggcaaagaaaaatgccattgttcgaagcctcccgtctgtggaaacccttggttgtacttctgttatctgctcagacaagactggtacacttacaacaaaccagatgtcagtctgcaggatgttcattctggacagagtggaaggtgatacttgttcccttaatgagtttaccataactggatcaacttatgcacctattggagaagtgcataaagatgataaaccagtgaattgtcaccagtatgatggtctggtagaattagcaacaatttgtgctctttgtaatgactctgctttggattacaatgaggcaaagggtgtgtatgaaaaagttggagaagctacagagactgctctcacttgcctagtagagaagatgaatgtatttgataccgaattgaagggtctttctaaaatagaacgtgcaaatgcctgcaactcagtcattaaacagctgatgaaaaaggaattcactctagagttttcacgtgacagaaagtcaatgtcggtttactgtacaccaaataaaccaagcaggacatcaatgagcaagatgtttgtgaagggtgctcctgaaggtgtcattgacaggtgcacccacattcgagttggaagtactaaggttcctatgacctctggagtcaaacagaagatcatgtctgtcattcgagagtggggtagtggcagcgacacactgcgatgcctggccctggccactcatgacaacccactgagaagagaagaaatgcaccttgaggactctgccaactttattaaatatgagaccaatctgaccttcgttggctgcgtgggcatgctggatcctccgagaatcgaggtggcctcctccgtgaagctgtgccggcaagcaggcatccgggtcatcatgatcactggggacaacaagggcactgctgtggccatctgtcgccgcatcggcatcttcgggcaggatgaggacgtgacgtcaaaagctttcacaggccgggagtttgatgaactcaacccctccgcccagcgagacgcctgcctgaacgcccgctgttttgctcgagttgaaccctcccacaagtctaaaatcgtagaatttcttcagtcttttgatgagattacagctatgactggcgatggcgtgaacgatgctcctgctctgaagaaagccgagattggcattgctatgggctctggcactgcggtggctaaaaccgcctctgagatggtcctggcggatgacaacttctccaccattgtggctgccgttgaggaggggcgggcaatctacaacaacatgaaacagttcatccgctacctcatctcgtccaacgtcggggaagttgtctgtattttcctgacagcagcccttggatttcccgaggctttgattcctgttcagctgctctgggtcaatctggtgacagatggcctgcctgccactgcactggggttcaaccctcctgatctggacatcatgaataaacctccccggaacccaaaggaaccattgatcagcgggtggctctttttccgttacttggctattggctgttacgtcggcgctgctaccgtgggtgctgctgcatggtggttcattgctgctgacggtggtccaagagtgtccttctaccagctgagtcatttcctacagtgtaaagaggacaacccggactttgaaggcgtggattgtgcaatctttgaatccccatacccgatgacaatggcgctctctgttctagtaactatagaaatgtgtaacgccctcaacagcttgtccgaaaaccagtccttgctgaggatgcccccctgggagaacatctggctcgtgggctccatctgcctgtccatgtcactccacttcctgatcctctatgtcgaacccttgccactcatcttccagatcacaccgctgaacgtgacccagtggctgatggtgctgaaaatctccttgcccgtgattctcatggatgagacgctcaagtttgtggcccgcaactacctggaacctggtaaagagtgtgtgcagcctgccaccaaatcctgctcgttctcggcatgcaccgatgggatttcctggccgtttgtgctgctcataatgcccctggtgatctgggtctatagcacagacactaactttagcgatatgttctggtcttgactgacagttttccataaagaagatgtttaacttaatcaattaatttttttattgtttaaagcaactgtctatttctgctgaattttcacatgaacatactggctggtgatggaggtttcatactctagattttgttttgctttttctgactccagtggggcaagattttccttttttatacacataattaaagtgtccattgacatgtacagagaactaacactattttatgcaaatatttttttgtagatgaaaaagcatgtacagtgttctgtttaatactcatccttgtataaaaaaaatagttgagccagcagacattgtcagcaaattaattggcagcagattttaggaaatgaatgtgtgtggttttttttctaaaactaaatagcatgtattgtgtcttttgcatgatgatccggatttaatttgatatcacagtctaatttttattcataagccaatttttctgcactgagcagagtcttgctacctcagtcagtattgttttggtttgctacttccctcacccactttggcctccgttcaccccaccccaccccacctctccccaccttacccccgccccgcttggcttcttctttaggattgtgatggttcgttctgtttacatcagttttaacgagaggtatgcctgtactcgcttgtgcagaaaacattgttccagattcaatcgactgggtttatgtcccttcacatagtttttaaggttatttatttaaatgtctaatgtattttattgtaacagacattgttttgccaacattgcctatttcagtggcacgtcatctagttttaaaaaaataaaacattttaaatggacagagaaaaataactgtcttgtctttaactcgtaagtggcttacctgggactaacagacatgtccaactttctctccagttcttagctcagaactttagttgtactctgcttgaggggaagaaggctcctgctctgctgtgtaggtagtcataggaattgtattcttaatgtacaggcactaattgtcatctgtgatgtacattttatgcaagtttctgctggcctggtatagagaacataagggcaagtgtgtatgtgtgtgtatgtgtgtgttttgtaaaatctgtaaatagcacatgaccaaatgaacatattgtatagaactatttttatttgaatgtggcactaaccaccaccaccgttactacgatcaatgtttgcgcatgttcgagatgagtctcaccaacagtgtgtaagtcattaacagtcctaactgtggtgttttcctccaatgccttccaacatccatcaactaaccaatactggagtaaccgcttcctaaaccattttgcagaaatgtaagggtgttcggttgcgtgcatgtgcgtttttagcaacacatctaccaaccctgtgcatgactgatgttggggaaaaagaaaagtaaaaaacttcccaactcactttgtgttatgtggaggaaatgtgtattaccaatggggttgttagcttttaaatcaaaatactgattacagatgtacaatttagcttaatcagaaagcctctccagagaagtttggtttctttgctgcaagaggaatgaggctctgtaaccttatctaagaacttggaagccgtcagccaagtcgccacatttctctgcaaaatgtcatagcttatataaatgtacagtattcaattgtaatgcatgccttcggttgtaagtagccagatccctctccagtgacattggaacatgctactttttaattggccctgtacagtttgcttatttataaattcattaaaaacactacaggtgttgaatggttaaaatgtaggcctccagttcattttcagttattttctgagtgtgcagacagctatttcgcactgtattaaatgtaacttatttaatgaaatcagaagcagtagacagatgttggtgcaatacaaatattgtgatgcatttatcttaataaaatgctaaatgtcaatttatcactgcgcatgtttgactttagactgtaaatagagatcagtttgtttctttctgtgctggtaacaatgagcgtcgcacaga

SEQ ID NO: 109692 - DNA, 4094 bp, Homo sapiens
  Payload ID: 1543
  Gene Symbol: ATP2A2
  Gene Name: ATPase, Ca++ transporting, cardiac muscle, slow twitch 2
  Uniprot ID: P16615
  ENST ID: ENST00000539276
  CDS Start-End: 110-3238
cccgtccgcgcctgggctcccggggtggcacgagcccgcggccggagtgcgaggcggaggcgaggaggccgcggggacgggaggcgaggccggccgggcccccgaagccatggagaacgcgcacaccaagacggtggaggaggtgctgggccacttcggcgtcaacgagagtacggggctgagcctggaacaggtcaagaagcttaaggagagatggggctccaacgagttaccggctgaagaaggaaaaaccttgctggaacttgtgattgagcagtttgaagacttgctagttaggattttattactggcagcatgtatatcttttgttttggcttggtttgaagaaggtgaagaaacaattacagcctttgtagaaccttttgtaattttactcatattagtagccaatgcaattgtgggtgtatggcaggaaagaaatgctgaaaatgccatcgaagcccttaaggaatatgagcctgaaatgggcaaagtgtatcgacaggacagaaagagtgtgcagcggattaaagctaaagacatagttcctggtgatattgtagaaattgctgttggtgacaaagttcctgctgatataaggttaacttccatcaaatctaccacactaagagttgaccagtcaattctcacaggtgaatctgtctctgtcatcaagcacactgatcccgtccctgacccacgagctgtcaaccaagataaaaagaacatgctgttttctggtacaaacattgctgctgggaaagctatgggagtggtggtagcaactggagttaacaccgaaattggcaagatccgggatgaaatggtggcaacagaacaggagagaacaccccttcagcaaaaactagatgaatttggggaacagctttccaaagtcatctcccttatttgcattgcagtctggatcataaatattgggcacttcaatgacccggttcatggagggtcctggatcagaggtgctatttactactttaaaattgcagtggccctggctgtagcagccattcctgaaggtctgcctgcagtcatcaccacctgcctggctcttggaactcgcagaatggcaaagaaaaatgccattgttcgaagcctcccgtctgtggaaacccttggttgtacttctgttatctgctcagacaagactggtacacttacaacaaaccagatgtcagtctgcaggatgttcattctggacagagtggaaggtgatacttgttcccttaatgagtttaccataactggatcaacttatgcacctattggagaagtgcataaagatgataaaccagtgaattgtcaccagtatgatggtctggtagaattagcaacaatttgtgctctttgtaatgactctgctttggattacaatgaggcaaagggtgtgtatgaaaaagttggagaagctacagagactgctctcacttgcctagtagagaagatgaatgtatttgataccgaattgaagggtctttctaaaatagaacgtgcaaatgcctgcaactcagtcattaaacagctgatgaaaaaggaattcactctagagttttcacgtgacagaaagtcaatgtcggtttactgtacaccaaataaaccaagcaggacatcaatgagcaagatgtttgtgaagggtgctcctgaaggtgtcattgacaggtgcacccacattcgagttggaagtactaaggttcctatgacctctggagtcaaacagaagatcatgtctgtcattcgagagtggggtagtggcagcgacacactgcgatgcctggccctggccactcatgacaacccactgagaagagaagaaatgcaccttgaggactctgccaactttattaaatatgagaccaatctgaccttcgttggctgcgtgggcatgctggatcctccgagaatcgaggtggcctcctccgtgaagctgtgccggcaagcaggcatccgggtcatcatgatcactggggacaacaagggcactgctgtggccatctgtcgccgcatcggcatcttcgggcaggatgaggacgtgacgtcaaaagctttcacaggccgggagtttgatgaactcaacccctccgcccagcgagacgcctgcctgaacgcccgctgttttgctcgagttgaaccctcccacaagtctaaaatcgtagaatttcttcagtcttttgatgagattacagctatgactggcgatggcgtgaacgatgctcctgctctgaagaaagccgagattggcattgctatgggctctggcactgcggtggctaaaaccgcctctgagatggtcctggcggatgacaacttctccaccattgtggctgccgttgaggaggggcgggcaatctacaacaacatgaaacagttcatccgctacctcatctcgtccaacgtcggggaagttgtctgtattttcctgacagcagcccttggatttcccgaggctttgattcctgttcagctgctctgggtcaatctggtgacagatggcctgcctgccactgcactggggttcaaccctcctgatctggacatcatgaataaacctccccggaacccaaaggaaccattgatcagcgggtggctctttttccgttacttggctattggctgttacgtcggcgctgctaccgtgggtgctgctgcatggtggttcattgctgctgacggtggtccaagagtgtccttctaccagctgagtcatttcctacagtgtaaagaggacaacccggactttgaaggcgtggattgtgcaatctttgaatccccatacccgatgacaatggcgctctctgttctagtaactatagaaatgtgtaacgccctcaacagcttgtccgaaaaccagtccttgctgaggatgcccccctgggagaacatctggctcgtgggctccatctgcctgtccatgtcactccacttcctgatcctctatgtcgaacccttgccactcatcttccagatcacaccgctgaacgtgacccagtggctgatggtgctgaaaatctccttgcccgtgattctcatggatgagacgctcaagtttgtggcccgcaactacctggaacctggtaaagagtgtgtgcagcctgccaccaaatcctgctcgttctcggcatgcaccgatgggatttcctggccgtttgtgctgctcataatgcccctggtgatctgggtctatagcacagacactaactttagcgatatgttctggtcttgactgacagttttccataaagaagatgtttaacttaatcaattaatttttttattgtttaaagcaactgtctatttctgctgaattttcacatgaacatactggctggtgatggaggtttcatactctagattttgttttgctttttctgactccagtggggcaagattttccttttttatacacataattaaagtgtccattgacatgtacagagaactaacactattttatgcaaatatttttttgtagatgaaaaagcatgtacagtgttctgtttaatactcatccttgtataaaaaaaatagttgagccagcagacattgtcagcaaattaattggcagcagattttaggaaatgaatgtgtgtggttttttttctaaaactaaatagcatgtattgtgtcttttgcatgatgatccggatttaatttgatatcacagtctaatttttattcataagccaatttttctgcactgagcagagtcttgctacctcagtcagtattgttttggtttgctacttccctcacccactttggcctccgttcaccccaccccaccccacctctccccaccttacccccgccccgcttggcttcttctttaggattgtgatggttcgttctgtttacatcagttttaacgagaggtatgcctgtactcgcttgtgcagaaaacattgttccagattcaatcgactgggtttatgtcccttcacatagtttttaaggttatttatttaaatgtctaatgtattttattgtaacagacattgttttgccaacattgcctatttcagtggcacgtcatctagttttaaaaaaataaaacattttaaatggacagagaaaaataa

SEQ ID NO: 109693 - DNA, 529 bp, Homo sapiens
  Payload ID: 1543
  Gene Symbol: ATP2A2
  Gene Name: ATPase, Ca++ transporting, cardiac muscle, slow twitch 2
  ENST ID: ENST00000552636
  CDS Start-End: 393-527
gaggggggctctgaaggagccagattaggatgcagagcgcagcccgggcgaccgagggcgaggaggcgagccaaggacatcagcccgagggcgcctcgagacgccccgcgtggaccgcgctcccagctcctcggcctcgccttccaaccatccgcccaccggccccagagcagcgtgcccactgtgagcgccccaccctgcgtctgcagagttaccggctgaagaaggaaaaaccttgctggaacttgtgattgagcagtttgaagacttgctagttaggattttattactggcagcatgtatatcttttgttttggcttggtttgaagaaggtgaagaaacaattacagcctttgtagaaccttttgtaattttactcatattagtagccaatgcaattgtgggtgtatggcaggaaagaaatgctgaaaatgccatcgaagcccttaaggaatatgagcctgaaatgggcaaagtgtatcgacaggacagaaagagtgtgcagcggattaaagctaaagacatagtt

SEQ ID NO: 109694 - DNA, 2951 bp, Homo sapiens
  Payload ID: 1543
  Gene Symbol: ATP2A2
  Gene Name: ATPase, Ca++ transporting, cardiac muscle, slow twitch 2
  ENST ID: ENST00000548169
  CDS Start-End: 1-2800
aacaattacagcctttgtagaaccttttgtaattttactcatattagtagccaatgcaattgtgggtgtatggcaggaaagaaatgctgaaaatgccatcgaagcccttaaggaatatgagcctgaaatgggcaaagtgtatcgacaggacagaaagagtgtgcagcggattaaagctaaagacatagttcctggtgatattgtagaaattgctggtgaatctgtctctgtcatcaagcacactgatcccgtccctgacccacgagctgtcaaccaagataaaaagaacatgctgttttctggtacaaacattgctgctgggaaagctatgggagtggtggtagcaactggagttaacaccgaaattggcaagatccgggatgaaatggtggcaacagaacaggagagaacaccccttcagcaaaaactagatgaatttggggaacagctttccaaagtcatctcccttatttgcattgcagtctggatcataaatattgggcacttcaatgacccggttcatggagggtcctggatcagaggtgctatttactactttaaaattgcagtggccctggctgtagcagccattcctgaaggtctgcctgcagtcatcaccacctgcctggctcttggaactcgcagaatggcaaagaaaaatgccattgttcgaagcctcccgtctgtggaaacccttggttgtacttctgttatctgctcagacaagactggtacacttacaacaaaccagatgtcagtctgcaggatgttcattctggacagagtggaaggtgatacttgttcccttaatgagtttaccataactggatcaacttatgcacctattggagaagtgcataaagatgataaaccagtgaattgtcaccagtatgatggtctggtagaattagcaacaatttgtgctctttgtaatgactctgctttggattacaatgaggcaaagggtgtgtatgaaaaagttggagaagctacagagactgctctcacttgcctagtagagaagatgaatgtatttgataccgaattgaagggtctttctaaaatagaacgtgcaaatgcctgcaactcagtcattaaacagctgatgaaaaaggaattcactctagagttttcacgtgacagaaagtcaatgtcggtttactgtacaccaaataaaccaagcaggacatcaatgagcaagatgtttgtgaagggtgctcctgaaggtgtcattgacaggtgcacccacattcgagttggaagtactaaggttcctatgacctctggagtcaaacagaagatcatgtctgtcattcgagagtggggtagtggcagcgacacactgcgatgcctggccctggccactcatgacaacccactgagaagagaagaaatgcaccttgaggactctgccaactttattaaatatgagaccaatctgaccttcgttggctgcgtgggcatgctggatcctccgagaatcgaggtggcctcctccgtgaagctgtgccggcaagcaggcatccgggtcatcatgatcactggggacaacaagggcactgctgtggccatctgtcgccgcatcggcatcttcgggcaggatgaggacgtgacgtcaaaagctttcacaggccgggagtttgatgaactcaacccctccgcccagcgagacgcctgcctgaacgcccgctgttttgctcgagttgaaccctcccacaagtctaaaatcgtagaatttcttcagtcttttgatgagattacagctatgactggcgatggcgtgaacgatgctcctgctctgaagaaagccgagattggcattgctatgggctctggcactgcggtggctaaaaccgcctctgagatggtcctggcggatgacaacttctccaccattgtggctgccgttgaggaggggcgggcaatctacaacaacatgaaacagttcatccgctacctcatctcgtccaacgtcggggaagttgtctgtattttcctgacagcagcccttggatttcccgaggctttgattcctgttcagctgctctgggtcaatctggtgacagatggcctgcctgccactgcactggggttcaaccctcctgatctggacatcatgaataaacctccccggaacccaaaggaaccattgatcagcgggtggctctttttccgttacttggctattggctgttacgtcggcgctgctaccgtgggtgctgctgcatggtggttcattgctgctgacggtggtccaagagtgtccttctaccagctgagtcatttcctacagtgtaaagaggacaacccggactttgaaggcgtggattgtgcaatctttgaatccccatacccgatgacaatggcgctctctgttctagtaactatagaaatgtgtaacgccctcaacagcttgtccgaaaaccagtccttgctgaggatgcccccctgggagaacatctggctcgtgggctccatctgcctgtccatgtcactccacttcctgatcctctatgtcgaacccttgccactcatcttccagatcacaccgctgaacgtgacccagtggctgatggtgctgaaaatctccttgcccgtgattctcatggatgagacgctcaagtttgtggcccgcaactacctggaacctggtaaagagtgtgtgcagcctgccaccaaatcctgctcgttctcggcatgcaccgatgggatttcctggccgtttgtgctgctcataatgcccctggtgatctgggtctatagcacagacactaactttagcgatatgttctggtcttgactgacagttttccataaagaagatgtttaacttaatcaattaatttttttattgtttaaagcaactgtctatttctgctgaattttcacatgaacatactggctggtgatggaggtttcatactctagattttgttttgctttttctgact

SEQ ID NO: 109695 - DNA, 264 bp, Homo sapiens
  Payload ID: 1543
  Gene Symbol: ATP2A2
  Gene Name: ATPase, Ca++ transporting, cardiac muscle, slow twitch 2
  ENST ID: ENST00000553144
  CDS Start-End: 1-141
ctcatcttccagatcacaccgctgaacgtgacccagtggctgatggtgctgaaaatctccttgcccgtgattctcatggatgagacgctcaagtttgtggcccgcaactacctggaacctgttcttagctcagaactttagttgtactctgcttgaggggaagaaggctcctgctctgctgtcaatactggagtaaccgcttcctaaaccattttgcagaaatgtaagggtgttcggttgcgtgcatgtgcgtttttagcaaca

SEQ ID NO: 109696 - DNA, 6777 bp, Homo sapiens
  Payload ID: 1544
  Gene Symbol: ATP2B1
  Gene Name: ATPase, Ca++ transporting, plasma membrane 1
  Uniprot ID: P20020
  ENST ID: ENST00000261173
  CDS Start-End: 182-3844
ggccaaaggtcaagatacttctctgggaaatgttgctgctgatgctgctttacaaagtcatacaatgagtgtttggtttaagaaagattttcatacttaaaagattttcatcttggaaatacatcaagtgaaaattaaattcttttgggaaacattttccttctgatatattatacttgtaatgggcgacatggcaaacaactcagttgcttacagtggtgtgaaaaactctttgaaggaagctaatcatgatggagactttggaattacgctcgcagagctgcgggctctcatggagctcaggtccacagatgcattacgaaaaatacaggaaagctatggagatgtctatggaatttgcaccaaattgaaaacatctcccaatgaaggtttaagtggaaaccctgcagatttagaaagaagagaagcagtgtttggaaagaattttatacctcctaaaaagccaaaaacctttcttcaattagtatgggaagcattacaagatgtcactttaattatattagaaattgcagccatagtatcattgggcctttctttttatcagcctccagaaggggataatgcactttgtggagaagtttctgttggggaggaagaaggtgaaggtgaaactggttggattgaaggagctgcaatcctcttgtctgtagtgtgtgtggtgttagtaacagctttcaatgactggagtaaggaaaaacagtttagaggtttgcagagccgaattgaacaagaacagaagttcactgtcatcaggggtggtcaggtcattcagatacctgtagctgacattactgttggagatattgctcaagtgaaatatggtgatcttcttccagctgacggcatacttattcaaggcaacgatcttaaaattgatgaaagctcattgactggtgaatcagatcatgttaaaaagtctttagataaggatcccttacttctatcaggtactcatgtaatggaaggctctggaagaatggtagttacagctgtaggtgtaaattctcaaactggaattatctttaccttacttggagctggaggtgaagaggaagagaagaaagatgagaagaaaaaggaaaagaaaaataagaaacaagatggagctattgagaatcgcaacaaagcaaaagcccaggatggtgcagccatggaaatgcagccattgaagagtgaagaaggtggagatggtgatgaaaaagataaaaagaaagcaaatttgccaaaaaaggaaaaatctgttttacaagggaaacttacaaaactggctgttcagattggcaaagcaggtctgttgatgtctgccatcacagttatcattctagtattatattttgtcattgacaccttctgggttcagaaaagaccatggcttgctgagtgcacaccaatttatatacaatactttgtgaagttcttcattattggagttacagttttagtggtcgcagtgccagaaggtcttccacttgcagtcacgatctcactggcttattcagtcaaaaaaatgatgaaagataataacttagtaaggcatctggatgcttgtgaaaccatgggaaatgctacagctatttgttcagataaaacaggaactttgacaatgaacagaatgacagtcgttcaagcttacataaatgaaaaacattataaaaaggttcctgaaccagaagctattccaccaaatattttgtcctatcttgtaacaggaatttctgtgaattgtgcttatacatcaaaaatattgccaccagagaaagagggtggattacctcgtcacgttggtaataaaactgaatgtgccttgttgggacttcttttggatttaaaacgggattatcaggatgttagaaatgaaataccagaagaagcactgtacaaagtctacaccttcaattctgttaggaagtccatgagtactgtcctgaaaaattcagatggaagttatcgaatattcagcaagggtgcatctgagataattctgaaaaagtgtttcaaaatcttgagtgctaatggtgaggcaaaagtattcagaccaagggaccgtgatgatattgtaaaaactgtgattgaaccgatggcatcagaaggcttgagaaccatatgtcttgcattcagagattttccagcaggagaaccagaaccagagtgggataatgaaaatgatattgtcaccggccttacatgcattgctgttgtggggattgaagatcctgtgagacctgaggtgccagatgcaattaaaaagtgtcagagggctggaattactgtgcggatggtcactggtgataatattaatactgctcgggccattgctaccaaatgtggtattttacatcctggggaagattttctgtgcctagaaggtaaagattttaacagaagaatacgaaatgaaaaaggagagattgagcaagagaggatagacaagatttggccaaaacttcgagtacttgcaagatcatctcctactgataagcatacactggttaaaggtataattgacagcactgtctcagaccaacgccaggttgtagctgtaactggtgatggtacaaatgatggcccagcactaaagaaagcagatgttggatttgcaatgggtattgctggaactgatgtagctaaagaagcatccgatattattctcacagatgacaactttacaagcattgttaaagcagttatgtggggacgaaatgtctatgacagcatctcaaaattccttcagttccaacttactgttaatgtagtagcagtgattgttgcttttacgggcgcctgcattactcaagactcaccgcttaaggctgtgcagatgctgtgggtaaacctcataatggatacactcgcttccctggctctggcaacggaaccacccactgagtctctcttgcttcggaaaccttatggtagaaataagcctctcatctcacgtacaatgatgaagaatattttgggtcatgcattctatcaacttgtagtagtctttacactcttatttgctggagaaaagttttttgacattgatagtggaagaaatgctcctttgcatgctcctccttcagaacattatactattgtttttaatacctttgtgctgatgcaacttttcaacgaaataaatgcccggaaaattcatggtgaaagaaatgtattcgaaggaatctttaacaatgccatcttctgcacaattgttttaggcacttttgtggtacagataataattgtgcagtttggtggaaaacctttcagttgttcagaactttcaatagaacagtggctatggtcaatattcctaggaatgggaacattactctggggccagcttatttcaacaattccaactagccgtttaaaattcctcaaagaagctggtcatggaacacaaaaggaagaaatacctgaggaggaattagcagaggatgttgaagagattgatcacgctgaaagggagttgcggcgtggccaaatcttgtggtttagaggtctgaacagaatccaaacacagattcgagtggtgaatgcatttcgtagttctttatatgaagggttagaaaaaccggaatcaagaagttcgattcacaactttatgacacatcctgagtttaggatagaagattcagagcctcatatcccccttattgatgacactgatgccgaagatgatgctcctacaaaacgtaactccagtcctccaccctctcccaacaaaaataacaatgctgttgacagtggaattcaccttacaatagaaatgaacaagtctgctacctcttcatccccaggaagcccactacatagtttggaaacatcactctgattgtaagctgaatgttaacacactagctgcattgtaaagaaacaaattgaaactgggtcttttcacatattgtgatggacaagctagtattcttgtctttggacttcaacagaagacacacttgtacgaatgtagatttatttttttaaaaaaaaaaaagcaaagctttctgccagactgagggtgctttttggggggtgggagaaatgaactgacagataaacagtaactcagcgtaagtgacctgtggatcatcagtagtacccaagcatggtcctgaacagtgtattagcagagctttagtttatctcagtcctggatgggagagagagggaggagtaaaactgggcaagacaaagagccctggatcgttgaattgatagtttaatttctgctgttggctgttaataatttggattatttatgtttataaatgatacagatctgtttacaaggtttgtagatactttttttgttcctgttcatagatgggaagcttccttataactgatgcagagaaaaattagtccttcaaatactgctgtattttcaggaaaaaaaaaaaaaggggtgtttctattgaaactgtactaaatttttgcctacaatttaccttgttaaatattgtagataaattgctaatactaatagccaaatagataacactaatgctttgtttaaaaaaacgaaaaaaacaaaacaaaacaaaaaaacatgagcagtggtgttctaatgaagttatgacatctgtcctaattagtttcttaaatacatttactacttaatggttttgaagcaactgtttaatttttaaaatttttgaaaacttgctaataaccttttgttcagaatttagtagattgtttaatgcaggacatcaactacataatgaaagatgcttgaaatgcttttgttatttcaggcaaatcaaattaaatcagactatcaaactacaagagaaccttagtcttttttgtttttgtctaaacatgttagtttagtgatgtcttggtgaactgtgagtgaactgtattgatttttctaatctttagagaccttcacacagcatgagggctgttggcattttgaaaaaggttaataagtagaagcatacatgttttccttttgtttttgaaacttgtttgtaaacataaataaatatgcccttttattaaataaattcatggcaatgtttttttaaaagacatttcagcttctttactcagttctgcatatacagtgcatcagtctgttctctttgaccacaattggaatacatttcaagatggtaacagccccatgaagtaccgctttaattccttgctggtaatctaatagaatcagattaagaaaattaacacaattttaccatttgacatactcttcattgaatttagtttgtctaaaatagtctcacaggtaaaaaacataacaacaatgaccaccattgtctttgatacatttattttaattcttaagtggccaaataacagattaggtaaaatgagattacatgaaaaggttctaaaatgatatatttagatgcaataattaaccatatgctagaatgcccacctctaagccaattggattctttagctctctttttctttccttcatctaccttcttctcttttttgcctctgtctttaccctttagaaactggcatgtgttagggcccagatttcaccagatacacaatcctcaggctgacataaagtttacgaggactgctactataactgagagtgctgaccaagcaaagaaacatttagttgatggtgcttgatatttttggtgggtgggggaaatctttttctcaccatcaaatctttgcagtaatcctctgcaggtcttagaaacacattggctctgtcagcatttgtaattgtacatttattcatcaggtatttatagtgaatcatactgtaaaaaagaggtagcatgatatgctggaaagcatattagactaggagtcaagacctggtttctagtcttggttttgccattaatgtgctgcatgatcttgggaaaatcatttaccctaaataagggtggtggactatcttgaagaaccctttcaactctaaaaattgaccctatcaactggagagcccacaaggcatagggaatagagaaaagggaaatgttttcagttttcttttttattttggttatgcttaaatatgaatgtaattaccaaaagatttagaagtgcatgtgctttggaggatttgtattgagcttttacagtattcatttttcaactcaaggcaatggctttctacaccaactctaatccataaacgggtcttatgacatctatgaagtagtagcaagacatgcttagtgtgtatttctctctttgagacactgtaatttctaccagaaatttccagagcattatgtaggtagaaaaaaatgcaagcaagctgttaaagatcttggatcccattatatagtatgtatagctgaaatctgtaattcaatcactttttctcttttatcctctaaccaaaaaattgtttaattttgcatcccaaatgtttttaatctttgtatattttttaaaaatccttttctcctcatcattgccttttttgtggttgtaaatagacttacttgcactttgaagatgagttactccttgtcatcttacaaatatgtgatatggtaattttcataacagatgtcagttttgaaccaagaattggtgatttgtttataagaaaaaaactggcttcatttctgtgaaattgctctttgaaaatttctttttacacgtgtaagccaactgagataccgtgatggtgttgatttctttcaatgatgcttaccatctattttagccactgagccttttattatttgtctatttgtaaagtttatttgtcttaactcatttaataaatatactgtttatctgtttctg

SEQ ID NO: 109697 - DNA, 6977 bp, Homo sapiens
  Payload ID: 1544
  Gene Symbol: ATP2B1
  Gene Name: ATPase, Ca++ transporting, plasma membrane 1
  Uniprot ID: P20020
  ENST ID: ENST00000359142
  CDS Start-End: 226-3756
acagatgtgtatatctcatgattgatatggagaaactagtcatgggccaaaggtcaagatacttctctgggaaatgttgctgctgatgctgctttacaaagtcatacaatgagtgtttggtttaagaaagattttcatacttaaaagattttcatcttggaaatacatcaagtgaaaattaaattcttttgggaaacattttccttctgatatattatacttgtaatgggcgacatggcaaacaactcagttgcttacagtggtgtgaaaaactctttgaaggaagctaatcatgatggagactttggaattacgctcgcagagctgcgggctctcatggagctcaggtccacagatgcattacgaaaaatacaggaaagctatggagatgtctatggaatttgcaccaaattgaaaacatctcccaatgaaggtttaagtggaaaccctgcagatttagaaagaagagaagcagtgtttggaaagaattttatacctcctaaaaagccaaaaacctttcttcaattagtatgggaagcattacaagatgtcactttaattatattagaaattgcagccatagtatcattgggcctttctttttatcagcctccagaaggggataatgcactttgtggagaagtttctgttggggaggaagaaggtgaaggtgaaactggttggattgaaggagctgcaatcctcttgtctgtagtgtgtgtggtgttagtaacagctttcaatgactggagtaaggaaaaacagtttagaggtttgcagagccgaattgaacaagaacagaagttcactgtcatcaggggtggtcaggtcattcagatacctgtagctgacattactgttggagatattgctcaagtgaaatatggtgatcttcttccagctgacggcatacttattcaaggcaacgatcttaaaattgatgaaagctcattgactggtgaatcagatcatgttaaaaagtctttagataaggatcccttacttctatcaggtactcatgtaatggaaggctctggaagaatggtagttacagctgtaggtgtaaattctcaaactggaattatctttaccttacttggagctggaggtgaagaggaagagaagaaagatgagaagaaaaaggaaaagaaaaataagaaacaagatggagctattgagaatcgcaacaaagcaaaagcccaggatggtgcagccatggaaatgcagccattgaagagtgaagaaggtggagatggtgatgaaaaagataaaaagaaagcaaatttgccaaaaaaggaaaaatctgttttacaagggaaacttacaaaactggctgttcagattggcaaagcaggtctgttgatgtctgccatcacagttatcattctagtattatattttgtcattgacaccttctgggttcagaaaagaccatggcttgctgagtgcacaccaatttatatacaatactttgtgaagttcttcattattggagttacagttttagtggtcgcagtgccagaaggtcttccacttgcagtcacgatctcactggcttattcagtcaaaaaaatgatgaaagataataacttagtaaggcatctggatgcttgtgaaaccatgggaaatgctacagctatttgttcagataaaacaggaactttgacaatgaacagaatgacagtcgttcaagcttacataaatgaaaaacattataaaaaggttcctgaaccagaagctattccaccaaatattttgtcctatcttgtaacaggaatttctgtgaattgtgcttatacatcaaaaatattgccaccagagaaagagggtggattacctcgtcacgttggtaataaaactgaatgtgccttgttgggacttcttttggatttaaaacgggattatcaggatgttagaaatgaaataccagaagaagcactgtacaaagtctacaccttcaattctgttaggaagtccatgagtactgtcctgaaaaattcagatggaagttatcgaatattcagcaagggtgcatctgagataattctgaaaaagtgtttcaaaatcttgagtgctaatggtgaggcaaaagtattcagaccaagggaccgtgatgatattgtaaaaactgtgattgaaccgatggcatcagaaggcttgagaaccatatgtcttgcattcagagattttccagcaggagaaccagaaccagagtgggataatgaaaatgatattgtcaccggccttacatgcattgctgttgtggggattgaagatcctgtgagacctgaggtgccagatgcaattaaaaagtgtcagagggctggaattactgtgcggatggtcactggtgataatattaatactgctcgggccattgctaccaaatgtggtattttacatcctggggaagattttctgtgcctagaaggtaaagattttaacagaagaatacgaaatgaaaaaggagagattgagcaagagaggatagacaagatttggccaaaacttcgagtacttgcaagatcatctcctactgataagcatacactggttaaaggtataattgacagcactgtctcagaccaacgccaggttgtagctgtaactggtgatggtacaaatgatggcccagcactaaagaaagcagatgttggatttgcaatgggtattgctggaactgatgtagctaaagaagcatccgatattattctcacagatgacaactttacaagcattgttaaagcagttatgtggggacgaaatgtctatgacagcatctcaaaattccttcagttccaacttactgttaatgtagtagcagtgattgttgcttttacgggcgcctgcattactcaagactcaccgcttaaggctgtgcagatgctgtgggtaaacctcataatggatacactcgcttccctggctctggcaacggaaccacccactgagtctctcttgcttcggaaaccttatggtagaaataagcctctcatctcacgtacaatgatgaagaatattttgggtcatgcattctatcaacttgtagtagtctttacactcttatttgctggagaaaagttttttgacattgatagtggaagaaatgctcctttgcatgctcctccttcagaacattatactattgtttttaatacctttgtgctgatgcaacttttcaacgaaataaatgcccggaaaattcatggtgaaagaaatgtattcgaaggaatctttaacaatgccatcttctgcacaattgttttaggcacttttgtggtacagataataattgtgcagtttggtggaaaacctttcagttgttcagaactttcaatagaacagtggctatggtcaatattcctaggaatgggaacattactctggggccagcttatttcaacaattccaactagccgtttaaaattcctcaaagaagctggtcatggaacacaaaaggaagaaatacctgaggaggaattagcagaggatgttgaagagattgatcacgctgaaagggagttgcggcgtggccaaatcttgtggtttagaggtctgaacagaatccaaacacagatggatgtagtgaatgctttccagagtggaagttccattcagggggctctaaggcggcaaccctccatcgccagccagcatcatgatgtaacaaatatttctacccctacacatgtagtgttttcctcttctactgcttctactactgtggggtattcgagtggtgaatgcatttcgtagttctttatatgaagggttagaaaaaccggaatcaagaagttcgattcacaactttatgacacatcctgagtttaggatagaagattcagagcctcatatcccccttattgatgacactgatgccgaagatgatgctcctacaaaacgtaactccagtcctccaccctctcccaacaaaaataacaatgctgttgacagtggaattcaccttacaatagaaatgaacaagtctgctacctcttcatccccaggaagcccactacatagtttggaaacatcactctgattgtaagctgaatgttaacacactagctgcattgtaaagaaacaaattgaaactgggtcttttcacatattgtgatggacaagctagtattcttgtctttggacttcaacagaagacacacttgtacgaatgtagatttatttttttaaaaaaaaaaaagcaaagctttctgccagactgagggtgctttttggggggtgggagaaatgaactgacagataaacagtaactcagcgtaagtgacctgtggatcatcagtagtacccaagcatggtcctgaacagtgtattagcagagctttagtttatctcagtcctggatgggagagagagggaggagtaaaactgggcaagacaaagagccctggatcgttgaattgatagtttaatttctgctgttggctgttaataatttggattatttatgtttataaatgatacagatctgtttacaaggtttgtagatactttttttgttcctgttcatagatgggaagcttccttataactgatgcagagaaaaattagtccttcaaatactgctgtattttcaggaaaaaaaaaaaaaggggtgtttctattgaaactgtactaaatttttgcctacaatttaccttgttaaatattgtagataaattgctaatactaatagccaaatagataacactaatgctttgtttaaaaaaacgaaaaaaacaaaacaaaacaaaaaaacatgagcagtggtgttctaatgaagttatgacatctgtcctaattagtttcttaaatacatttactacttaatggttttgaagcaactgtttaatttttaaaatttttgaaaacttgctaataaccttttgttcagaatttagtagattgtttaatgcaggacatcaactacataatgaaagatgcttgaaatgcttttgttatttcaggcaaatcaaattaaatcagactatcaaactacaagagaaccttagtcttttttgtttttgtctaaacatgttagtttagtgatgtcttggtgaactgtgagtgaactgtattgatttttctaatctttagagaccttcacacagcatgagggctgttggcattttgaaaaaggttaataagtagaagcatacatgttttccttttgtttttgaaacttgtttgtaaacataaataaatatgcccttttattaaataaattcatggcaatgtttttttaaaagacatttcagcttctttactcagttctgcatatacagtgcatcagtctgttctctttgaccacaattggaatacatttcaagatggtaacagccccatgaagtaccgctttaattccttgctggtaatctaatagaatcagattaagaaaattaacacaattttaccatttgacatactcttcattgaatttagtttgtctaaaatagtctcacaggtaaaaaacataacaacaatgaccaccattgtctttgatacatttattttaattcttaagtggccaaataacagattaggtaaaatgagattacatgaaaaggttctaaaatgatatatttagatgcaataattaaccatatgctagaatgcccacctctaagccaattggattctttagctctctttttctttccttcatctaccttcttctcttttttgcctctgtctttaccctttagaaactggcatgtgttagggcccagatttcaccagatacacaatcctcaggctgacataaagtttacgaggactgctactataactgagagtgctgaccaagcaaagaaacatttagttgatggtgcttgatatttttggtgggtgggggaaatctttttctcaccatcaaatctttgcagtaatcctctgcaggtcttagaaacacattggctctgtcagcatttgtaattgtacatttattcatcaggtatttatagtgaatcatactgtaaaaaagaggtagcatgatatgctggaaagcatattagactaggagtcaagacctggtttctagtcttggttttgccattaatgtgctgcatgatcttgggaaaatcatttaccctaaataagggtggtggactatcttgaagaaccctttcaactctaaaaattgaccctatcaactggagagcccacaaggcatagggaatagagaaaagggaaatgttttcagttttcttttttattttggttatgcttaaatatgaatgtaattaccaaaagatttagaagtgcatgtgctttggaggatttgtattgagcttttacagtattcatttttcaactcaaggcaatggctttctacaccaactctaatccataaacgggtcttatgacatctatgaagtagtagcaagacatgcttagtgtgtatttctctctttgagacactgtaatttctaccagaaatttccagagcattatgtaggtagaaaaaaatgcaagcaagctgttaaagatcttggatcccattatatagtatgtatagctgaaatctgtaattcaatcactttttctcttttatcctctaaccaaaaaattgtttaattttgcatcccaaatgtttttaatctttgtatattttttaaaaatccttttctcctcatcattgccttttttgtggttgtaaatagacttacttgcactttgaagatgagttactccttgtcatcttacaaatatgtgatatggtaattttcataacagatgtcagttttgaaccaagaattggtgatttgtttataagaaaaaaactggcttcatttctgtgaaattgctctttgaaaatttctttttacacgtgtaagccaactgagataccgtgatggtgttgatttctttcaatgatgcttaccatctattttagccactgagccttttattatttgtctatttgtaaagtttatttgtcttaactcatttaataaatatactgtttatctgtttctgaa

SEQ ID NO: 109698 - DNA, 3127 bp, Homo sapiens
  Payload ID: 1544
  Gene Symbol: ATP2B1
  Gene Name: ATPase, Ca++ transporting, plasma membrane 1
  ENST ID: ENST00000393164
  CDS Start-End: 94-2985
tttcctaaatgttgaggctgttaaaaacaatattactgaagtttgaaatttggtggtagcaaggagatctatcagtatttttaaaaacaaactatgtttttggttataggtactcatgtaatggaaggctctggaagaatggtagttacagctgtaggtgtaaattctcaaactggaattatctttaccttacttggagctggaggtgaagaggaagagaagaaagatgagaagaaaaaggaaaagaaaaataagaaacaagatggagctattgagaatcgcaacaaagcaaaagcccaggatggtgcagccatggaaatgcagccattgaagagtgaagaaggtggagatggtgatgaaaaagataaaaagaaagcaaatttgccaaaaaaggaaaaatctgttttacaagggaaacttacaaaactggctgttcagattggcaaagcaggtctgttgatgtctgccatcacagttatcattctagtattatattttgtcattgacaccttctgggttcagaaaagaccatggcttgctgagtgcacaccaatttatatacaatactttgtgaagttcttcattattggagttacagttttagtggtcgcagtgccagaaggtcttccacttgcagtcacgatctcactggcttattcagtcaaaaaaatgatgaaagataataacttagtaaggcatctggatgcttgtgaaaccatgggaaatgctacagctatttgttcagataaaacaggaactttgacaatgaacagaatgacagtcgttcaagcttacataaatgaaaaacattataaaaaggttcctgaaccagaagctattccaccaaatattttgtcctatcttgtaacaggaatttctgtgaattgtgcttatacatcaaaaatattgccaccagagaaagagggtggattacctcgtcacgttggtaataaaactgaatgtgccttgttgggacttcttttggatttaaaacgggattatcaggatgttagaaatgaaataccagaagaagcactgtacaaagtctacaccttcaattctgttaggaagtccatgagtactgtcctgaaaaattcagatggaagttatcgaatattcagcaagggtgcatctgagataattctgaaaaagtgtttcaaaatcttgagtgctaatggtgaggcaaaagtattcagaccaagggaccgtgatgatattgtaaaaactgtgattgaaccgatggcatcagaaggcttgagaaccatatgtcttgcattcagagattttccagcaggagaaccagaaccagagtgggataatgaaaatgatattgtcaccggccttacatgcattgctgttgtggggattgaagatcctgtgagacctgaggtgccagatgcaattaaaaagtgtcagagggctggaattactgtgcggatggtcactggtgataatattaatactgctcgggccattgctaccaaatgtggtattttacatcctggggaagattttctgtgcctagaaggtaaagattttaacagaagaatacgaaatgaaaaaggagagattgagcaagagaggatagacaagatttggccaaaacttcgagtacttgcaagatcatctcctactgataagcatacactggttaaaggtataattgacagcactgtctcagaccaacgccaggttgtagctgtaactggtgatggtacaaatgatggcccagcactaaagaaagcagatgttggatttgcaatgggtattgctggaactgatgtagctaaagaagcatccgatattattctcacagatgacaactttacaagcattgttaaagcagttatgtggggacgaaatgtctatgacagcatctcaaaattccttcagttccaacttactgttaatgtagtagcagtgattgttgcttttacgggcgcctgcattactcaagactcaccgcttaaggctgtgcagatgctgtgggtaaacctcataatggatacactcgcttccctggctctggcaacggaaccacccactgagtctctcttgcttcggaaaccttatggtagaaataagcctctcatctcacgtacaatgatgaagaatattttgggtcatgcattctatcaacttgtagtagtctttacactcttatttgctggagaaaagttttttgacattgatagtggaagaaatgctcctttgcatgctcctccttcagaacattatactattgtttttaatacctttgtgctgatgcaacttttcaacgaaataaatgcccggaaaattcatggtgaaagaaatgtattcgaaggaatctttaacaatgccatcttctgcacaattgttttaggcacttttgtggtacagataataattgtgcagtttggtggaaaacctttcagttgttcagaactttcaatagaacagtggctatggtcaatattcctaggaatgggaacattactctggggccagcttatttcaacaattccaactagccgtttaaaattcctcaaagaagctggtcatggaacacaaaaggaagaaatacctgaggaggaattagcagaggatgttgaagagattgatcacgctgaaagggagttgcggcgtggccaaatcttgtggtttagaggtctgaacagaatccaaacacagattcgagtggtgaatgcatttcgtagttctttatatgaagggttagaaaaaccggaatcaagaagttcgattcacaactttatgacacatcctgagtttaggatagaagattcagagcctcatatcccccttattgatgacactgatgccgaagatgatgctcctacaaaacgtaactccagtcctccaccctctcccaacaaaaataacaatgctgttgacagtggaattcaccttacaatagaaatgaacaagtctgctacctcttcatccccaggaagcccactacatagtttggaaacatcactctgattgtaagctgaatgttaacacactagctgcattgtaaagaaacaaattgaaactgggtcttttcacatattgtgatggacaagctagtattcttgtctttggacttcaacagaagacacacttgtacgaatgtagatttatt

SEQ ID NO: 109699 - DNA, 7032 bp, Homo sapiens
  Payload ID: 1544
  Gene Symbol: ATP2B1
  Gene Name: ATPase, Ca++ transporting, plasma membrane 1
  Uniprot ID: P20020
  ENST ID: ENST00000428670
  CDS Start-End: 458-4120
agcgtgagtagggagccccggctggtggacgccgagcctctcggctccttggccgccccatccccgaggtgcagctgcacctccgcgtggcgccccgagccctgcgagccggctgcggacgcgctgaggacggagcccccatcctctgcgtttcccgctgccccttaacgccccgcgaccctcccgcagcctgcctttccttccccctcggaaaatggttcccactgccgggcgagatgtgtatatctcatgattgatatggagaaactagtcatgggccaaaggtcaagatacttctctgggaaatgttgctgctgatgctgctttacaaagtcatacaatgagtgtttggtttaagaaagattttcatacttaaaagattttcatcttggaaatacatcaagtgaaaattaaattcttttgggaaacattttccttctgatatattatacttgtaatgggcgacatggcaaacaactcagttgcttacagtggtgtgaaaaactctttgaaggaagctaatcatgatggagactttggaattacgctcgcagagctgcgggctctcatggagctcaggtccacagatgcattacgaaaaatacaggaaagctatggagatgtctatggaatttgcaccaaattgaaaacatctcccaatgaaggtttaagtggaaaccctgcagatttagaaagaagagaagcagtgtttggaaagaattttatacctcctaaaaagccaaaaacctttcttcaattagtatgggaagcattacaagatgtcactttaattatattagaaattgcagccatagtatcattgggcctttctttttatcagcctccagaaggggataatgcactttgtggagaagtttctgttggggaggaagaaggtgaaggtgaaactggttggattgaaggagctgcaatcctcttgtctgtagtgtgtgtggtgttagtaacagctttcaatgactggagtaaggaaaaacagtttagaggtttgcagagccgaattgaacaagaacagaagttcactgtcatcaggggtggtcaggtcattcagatacctgtagctgacattactgttggagatattgctcaagtgaaatatggtgatcttcttccagctgacggcatacttattcaaggcaacgatcttaaaattgatgaaagctcattgactggtgaatcagatcatgttaaaaagtctttagataaggatcccttacttctatcaggtactcatgtaatggaaggctctggaagaatggtagttacagctgtaggtgtaaattctcaaactggaattatctttaccttacttggagctggaggtgaagaggaagagaagaaagatgagaagaaaaaggaaaagaaaaataagaaacaagatggagctattgagaatcgcaacaaagcaaaagcccaggatggtgcagccatggaaatgcagccattgaagagtgaagaaggtggagatggtgatgaaaaagataaaaagaaagcaaatttgccaaaaaaggaaaaatctgttttacaagggaaacttacaaaactggctgttcagattggcaaagcaggtctgttgatgtctgccatcacagttatcattctagtattatattttgtcattgacaccttctgggttcagaaaagaccatggcttgctgagtgcacaccaatttatatacaatactttgtgaagttcttcattattggagttacagttttagtggtcgcagtgccagaaggtcttccacttgcagtcacgatctcactggcttattcagtcaaaaaaatgatgaaagataataacttagtaaggcatctggatgcttgtgaaaccatgggaaatgctacagctatttgttcagataaaacaggaactttgacaatgaacagaatgacagtcgttcaagcttacataaatgaaaaacattataaaaaggttcctgaaccagaagctattccaccaaatattttgtcctatcttgtaacaggaatttctgtgaattgtgcttatacatcaaaaatattgccaccagagaaagagggtggattacctcgtcacgttggtaataaaactgaatgtgccttgttgggacttcttttggatttaaaacgggattatcaggatgttagaaatgaaataccagaagaagcactgtacaaagtctacaccttcaattctgttaggaagtccatgagtactgtcctgaaaaattcagatggaagttatcgaatattcagcaagggtgcatctgagataattctgaaaaagtgtttcaaaatcttgagtgctaatggtgaggcaaaagtattcagaccaagggaccgtgatgatattgtaaaaactgtgattgaaccgatggcatcagaaggcttgagaaccatatgtcttgcattcagagattttccagcaggagaaccagaaccagagtgggataatgaaaatgatattgtcaccggccttacatgcattgctgttgtggggattgaagatcctgtgagacctgaggtgccagatgcaattaaaaagtgtcagagggctggaattactgtgcggatggtcactggtgataatattaatactgctcgggccattgctaccaaatgtggtattttacatcctggggaagattttctgtgcctagaaggtaaagattttaacagaagaatacgaaatgaaaaaggagagattgagcaagagaggatagacaagatttggccaaaacttcgagtacttgcaagatcatctcctactgataagcatacactggttaaaggtataattgacagcactgtctcagaccaacgccaggttgtagctgtaactggtgatggtacaaatgatggcccagcactaaagaaagcagatgttggatttgcaatgggtattgctggaactgatgtagctaaagaagcatccgatattattctcacagatgacaactttacaagcattgttaaagcagttatgtggggacgaaatgtctatgacagcatctcaaaattccttcagttccaacttactgttaatgtagtagcagtgattgttgcttttacgggcgcctgcattactcaagactcaccgcttaaggctgtgcagatgctgtgggtaaacctcataatggatacactcgcttccctggctctggcaacggaaccacccactgagtctctcttgcttcggaaaccttatggtagaaataagcctctcatctcacgtacaatgatgaagaatattttgggtcatgcattctatcaacttgtagtagtctttacactcttatttgctggagaaaagttttttgacattgatagtggaagaaatgctcctttgcatgctcctccttcagaacattatactattgtttttaatacctttgtgctgatgcaacttttcaacgaaataaatgcccggaaaattcatggtgaaagaaatgtattcgaaggaatctttaacaatgccatcttctgcacaattgttttaggcacttttgtggtacagataataattgtgcagtttggtggaaaacctttcagttgttcagaactttcaatagaacagtggctatggtcaatattcctaggaatgggaacattactctggggccagcttatttcaacaattccaactagccgtttaaaattcctcaaagaagctggtcatggaacacaaaaggaagaaatacctgaggaggaattagcagaggatgttgaagagattgatcacgctgaaagggagttgcggcgtggccaaatcttgtggtttagaggtctgaacagaatccaaacacagattcgagtggtgaatgcatttcgtagttctttatatgaagggttagaaaaaccggaatcaagaagttcgattcacaactttatgacacatcctgagtttaggatagaagattcagagcctcatatcccccttattgatgacactgatgccgaagatgatgctcctacaaaacgtaactccagtcctccaccctctcccaacaaaaataacaatgctgttgacagtggaattcaccttacaatagaaatgaacaagtctgctacctcttcatccccaggaagcccactacatagtttggaaacatcactctgattgtaagctgaatgttaacacactagctgcattgtaaagaaacaaattgaaactgggtcttttcacatattgtgatggacaagctagtattcttgtctttggacttcaacagaagacacacttgtacgaatgtagatttatttttttaaaaaaaaaaaagcaaagctttctgccagactgagggtgctttttggggggtgggagaaatgaactgacagataaacagtaactcagcgtaagtgacctgtggatcatcagtagtacccaagcatggtcctgaacagtgtattagcagagctttagtttatctcagtcctggatgggagagagagggaggagtaaaactgggcaagacaaagagccctggatcgttgaattgatagtttaatttctgctgttggctgttaataatttggattatttatgtttataaatgatacagatctgtttacaaggtttgtagatactttttttgttcctgttcatagatgggaagcttccttataactgatgcagagaaaaattagtccttcaaatactgctgtattttcaggaaaaaaaaaaaaaggggtgtttctattgaaactgtactaaatttttgcctacaatttaccttgttaaatattgtagataaattgctaatactaatagccaaatagataacactaatgctttgtttaaaaaaacgaaaaaaacaaaacaaaacaaaaaaacatgagcagtggtgttctaatgaagttatgacatctgtcctaattagtttcttaaatacatttactacttaatggttttgaagcaactgtttaatttttaaaatttttgaaaacttgctaataaccttttgttcagaatttagtagattgtttaatgcaggacatcaactacataatgaaagatgcttgaaatgcttttgttatttcaggcaaatcaaattaaatcagactatcaaactacaagagaaccttagtcttttttgtttttgtctaaacatgttagtttagtgatgtcttggtgaactgtgagtgaactgtattgatttttctaatctttagagaccttcacacagcatgagggctgttggcattttgaaaaaggttaataagtagaagcatacatgttttccttttgtttttgaaacttgtttgtaaacataaataaatatgcccttttattaaataaattcatggcaatgtttttttaaaagacatttcagcttctttactcagttctgcatatacagtgcatcagtctgttctctttgaccacaattggaatacatttcaagatggtaacagccccatgaagtaccgctttaattccttgctggtaatctaatagaatcagattaagaaaattaacacaattttaccatttgacatactcttcattgaatttagtttgtctaaaatagtctcacaggtaaaaaacataacaacaatgaccaccattgtctttgatacatttattttaattcttaagtggccaaataacagattaggtaaaatgagattacatgaaaaggttctaaaatgatatatttagatgcaataattaaccatatgctagaatgcccacctctaagccaattggattctttagctctctttttctttccttcatctaccttcttctcttttttgcctctgtctttaccctttagaaactggcatgtgttagggcccagatttcaccagatacacaatcctcaggctgacataaagtttacgaggactgctactataactgagagtgctgaccaagcaaagaaacatttagttgatggtgcttgatatttttggtgggtgggggaaatctttttctcaccatcaaatctttgcagtaatcctctgcaggtcttagaaacacattggctctgtcagcatttgtaattgtacatttattcatcaggtatttatagtgaatcatactgtaaaaaagaggtagcatgatatgctggaaagcatattagactaggagtcaagacctggtttctagtcttggttttgccattaatgtgctgcatgatcttgggaaaatcatttaccctaaataagggtggtggactatcttgaagaaccctttcaactctaaaaattgaccctatcaactggagagcccacaaggcatagggaatagagaaaagggaaatgttttcagttttcttttttattttggttatgcttaaatatgaatgtaattaccaaaagatttagaagtgcatgtgctttggaggatttgtattgagcttttacagtattcatttttcaactcaaggcaatggctttctacaccaactctaatccataaacgggtcttatgacatctatgaagtagtagcaagacatgcttagtgtgtatttctctctttgagacactgtaatttctaccagaaatttccagagcattatgtaggtagaaaaaaatgcaagcaagctgttaaagatcttggatcccattatatagtatgtatagctgaaatctgtaattcaatcactttttctcttttatcctctaaccaaaaaattgtttaattttgcatcccaaatgtttttaatctttgtatattttttaaaaatccttttctcctcatcattgccttttttgtggttgtaaatagacttacttgcactttgaagatgagttactccttgtcatcttacaaatatgtgatatggtaattttcataacagatgtcagttttgaaccaagaattggtgatttgtttataagaaaaaaactggcttcatttctgtgaaattgctctttgaaaatttctttttacacgtgtaagccaactgagataccgtgatggtgttgatttctttcaatgatgcttaccatctattttagccactgagccttttattatttgtctatttgtaaagtttatttgtcttaactcatttaataaa

SEQ ID NO: 109700 - DNA, 607 bp, Homo sapiens
  Payload ID: 1544
  Gene Symbol: ATP2B1
  Gene Name: ATPase, Ca++ transporting, plasma membrane 1
  ENST ID: ENST00000551310
  CDS Start-End: 304-607
gtggcagcgggagcagctgcgccgccagcgtggagcgggaggcgtgtgggtgtggagaaaagggagcgccagaccggaacggatgtgtatatctcatgattgatatggagaaactagtcatgggccaaaggtcaagatacttctctgggaaatgttgctgctgatgctgctttacaaagtcatacaatgagtgtttggtttaagaaagattttcatacttaaaagattttcatcttggaaatacatcaagtgaaaattaaattcttttgggaaacattttccttctgatatattatacttgtaatgggcgacatggcaaacaactcagttgcttacagtggtgtgaaaaactctttgaaggaagctaatcatgatggagactttggaattacgctcgcagagctgcgggctctcatggagctcaggtccacagatgcattacgaaaaatacaggaaagctatggagatgtctatggaatttgcaccaaattgaaaacatctcccaatgaaggtgagttttattatgcttgtttttggttctttgtgcaaagagttctatatatttggcttataaatgagcatgcttatattatcttggcgattgtat

SEQ ID NO: 109701 - DNA, 486 bp, Homo sapiens
  Payload ID: 1544
  Gene Symbol: ATP2B1
  Gene Name: ATPase, Ca++ transporting, plasma membrane 1
  ENST ID: ENST00000550716
  CDS Start-End: 1-486
ttttcaacgaaataaatgcccggaaaattcatggtgaaagaaatgtattcgaaggaatctttaacaatgccatcttctgcacaattgttttaggcacttttgtggtacagcttatttcaacaattccaactagccgtttaaaattcctcaaagaagctggtcatggaacacaaaaggaagaaatacctgaggaggaattagcagaggatgttgaagagattgatcacgctgaaagggagttgcggcgtggccaaatcttgtggtttagaggtctgaacagaatccaaacacagattcgagtggtgaatgcatttcgtagttctttatatgaagggttagaaaaaccggaatcaagaagttcgattcacaactttatgacacatcctgagtttaggatagaagattcagagcctcatatcccccttattgatgacactgatgccgaagatgatgctcctacaaaacgtaactccagtcctccaccct

SEQ ID NO: 109702 - DNA, 1358 bp, Homo sapiens
  Payload ID: 1544
  Gene Symbol: ATP2B1
  Gene Name: ATPase, Ca++ transporting, plasma membrane 1
  ENST ID: ENST00000635033
  CDS Start-End: 1-902
gagaaaagttttttgacattgatagtggaagaaatgctcctttgcatgctcctccttcagaacattatactattgtttttaatacctttgtgctgatgcaacttttcaacgaaataaatgcccggaaaattcatggtgaaagaaatgtattcgaaggaatctttaacaatgccatcttctgcacaattgttttaggcacttttgtggtacagataataattgtgcagtttggtggaaaacctttcagttgttcagaactttcaatagaacagtggctatggtcaatattcctaggaatgggaacattactctggggccagcttatttcaacaattccaactagccgtttaaaattcctcaaagaagctggtcatggaacacaaaaggaagaaatacctgaggaggaattagcagaggatgttgaagagattgatcacgctgaaagggagttgcggcgtggccaaatcttgtggtttagaggtctgaacagaatccaaacacagatggatgtagtgaatgctttccagagtggaagttccattcagggggctctaaggcggcaaccctccatcgccagccagcatcatgatattcgagtggtgaatgcatttcgtagttctttatatgaagggttagaaaaaccggaatcaagaagttcgattcacaactttatgacacatcctgagtttaggatagaagattcagagcctcatatcccccttattgatgacactgatgccgaagatgatgctcctacaaaacgtaactccagtcctccaccctctcccaacaaaaataacaatgctgttgacagtggaattcaccttacaatagaaatgaacaagtctgctacctcttcatccccaggaagcccactacatagtttggaaacatcactctgattgtaagctgaatgttaacacactagctgcattgtaaagaaacaaattgaaactgggtcttttcacatattgtgatggacaagctagtattcttgtctttggacttcaacagaagacacacttgtacgaatgtagatttatttttttaaaaaaaaaaaagcaaagctttctgccagactgagggtgctttttggggggtgggagaaatgaactgacagataaacagtaactcagcgtaagtgacctgtggatcatcagtagtacccaagcatggtcctgaacagtgtattagcagagctttagtttatctcagtcctggatgggagagagagggaggagtaaaactgggcaagacaaagagccctggatcgttgaattgatagtttaatttctgctgttggctgttaataatttggattatttatgtttataaatgatacagatctgtttacaagg

SEQ ID NO: 109703 - DNA, 8593 bp, Homo sapiens
  Payload ID: 1545
  Gene Symbol: ATP2B2
  Gene Name: ATPase, Ca++ transporting, plasma membrane 2
  Uniprot ID: Q01814
  ENST ID: ENST00000352432
  CDS Start-End: 71-3802
agccatcacccggcagcctcttgtccagcgctgacccttgggcccagcccgagcaaggaccgcagcaaacatgggtgacatgaccaacagcgacttttactccaaaaaccaaagaaatgagtcgagccatgggggcgagttcgggtgcacaatggaggagctccgctccctcatggagctgcggggcactgaggctgtggtcaagatcaaggagacttatggggacaccgaagccatctgccggcgcctcaaaacctcacctgttgaaggtttgccgggcaccgctccagacctggaaaagagaaagcaaatttttgggcaaaactttatacctccaaagaagccaaaaaccttcctgcagctcgtgtgggaggcgctgcaggacgtgacgctcatcatcctggagattgccgccatcatctccctggggctgtccttctaccacccgcccggcgagggcaacgaaggatgtgcgacggcccagggtggggcagaggatgaaggagaggcagaggcaggttggatcgagggggccgccattctcctctcagttatctgtgtggtcctggtcacggccttcaatgactggagcaaagagaaacagttccggggcctgcagagccgcatcgagcaggaacagaaatttaccgtggtccgggctggccaggtggtccagatccctgtggctgagatcgtggttggggacatagcccaggtcaaatatggtgacctcctccctgccgacggcctcttcatccagggcaatgacctcaagattgatgaaagctccctaactggagagtctgaccaggtgcgcaagtccgtggacaaggaccccatgctgctgtcaggaacccacgtgatggagggctcaggacggatgttggtgactgctgtgggtgtgaactctcagactggcatcatctttaccctcctgggggctggtggtgaagaggaagagaagaaagacaaaaaaggtgtgaagaagggggatggccttcagctaccagcagcagacggtgcggcagcttcaaatgctgcagatagtgcgaatgccagcctagtcaatggtaaaatgcaggatggcaatgtggacgccagccagagcaaagccaaacaacaggacggggcagccgccatggagatgcagcccctcaagagtgccgagggcggcgacgctgacgacaggaagaaggccagcatgcacaagaaggagaagtccgtgctgcagggcaagctcaccaagctggctgtgcagatcgggaaggcgggcttggtgatgtcagccatcacggtgatcatcctggtgctctacttcactgtggacaccttcgtggtcaacaagaagccgtggctgcctgagtgcacgcccgtctacgtgcagtactttgtcaagttcttcatcattggcgtgacggtgctggtggtcgccgtgcccgaggggctccctctggccgtcaccatctcgttggcctattcggtgaagaaaatgatgaaggacaacaacctggtacgccacctggatgcctgtgagaccatgggcaatgccacagccatctgctcagacaagacaggcacgctgaccaccaatcgcatgacagtggtacaggcctatgtcggcgacgtccactataaagagatccccgaccccagctccatcaacaccaagaccatggagctgctgatcaatgccatcgccatcaacagcgcctacaccaccaagattctgcccccagagaaggagggcgccctgcctcggcaggtgggcaacaagacggagtgcggcctgctgggcttcgtgctggacctgaagcaggactacgagcccgtgcgcagccagatgccagaggagaagttgtacaaagtgtacaccttcaactccgtgcgcaagtccatgagcactgtcatcaagctgcccgacgagagcttccgcatgtacagcaagggggcttctgagatcgtgctcaagaagtgctgcaaaatcctcaatggggcgggagagcctcgtgtcttccggccccgcgaccgggacgagatggtaaagaaggtgattgagcccatggcttgcgatgggctccgcactatctgcgtggcctaccgcgacttccccagcagcccggagccggactgggacaatgagaatgacatcctcaacgaactcacctgcatctgcgtggtgggcatcgaggacccggtgcggccagaggtcccagaagccatccgcaagtgccagcgggcaggcatcacggtccgcatggtcactggcgacaatatcaacacggctcgggccatcgccatcaagtgtggcatcatccatcctggggaggactttctgtgcctcgagggcaaggagttcaacaggaggatccgcaacgagaagggggagattgagcaggagcgaattgacaagatctggccaaagctgcgggtgctggctcgctcctccccaacggacaagcataccctggttaaaggcatcatcgacagcacacacactgagcagcggcaggtggtggccgtgacgggggacgggaccaacgacgggcctgcactcaagaaggccgacgtgggcttcgccatgggcatcgcaggcactgacgtggccaaggaggcctcagacatcatcctgacagacgacaatttcagcagcatcgtcaaggcagtgatgtggggccgcaacgtctatgacagcatctccaaattcttgcagttccagctcaccgtcaacgtggtggccgtgattgtggccttcacaggcgcctgcatcacgcaggactcccctctgaaggccgtgcagatgctctgggtgaacctcatcatggacacgtttgcctcgctggcactggccactgagccgcccacggagaccctgctgctgaggaagccgtacggccgcaacaagccgctcatctccaggaccatgatgaagaacatcctgggccatgctgtctaccagcttgccctcatcttcaccctgctctttgttggcgagaagatgttccagatcgacagcgggaggaacgcgcccctgcattcgccaccctcagaacattacaccatcatcttcaacaccttcgtcatgatgcagctcttcaacgagatcaacgcccgcaagatccacggcgagcgcaatgtctttgacggcatcttccggaaccccatcttctgcaccatcgtgctgggcacctttgccatccagatagtgatcgtgcagtttggagggaagccattcagctgctctccactgcagctggaccagtggatgtggtgcatattcattgggttaggagagctcgtttggggccaggtcatcgccaccatcccgaccagcagactcaagttcctcaaggaggcaggcaggctcacacagaaggaggagatcccggaggaggagctcaacgaggacgtggaggagatcgaccacgcggagcgggagctgcggcggggccagatcctgtggttccgaggcctgaatcggatccagacacagatccgcgtcgtgaaggcgttccgtagctctctctatgaaggtttagaaaagcctgaatctcgaacctccatccataacttcatggctcatcctgaattccggatcgaagattcccagccccacatccccctcattgatgacaccgacctggaagaagatgccgcgctcaagcagaactcgagcccgccgtcatccctcaacaagaacaacagcgccatcgacagtgggatcaacctgacgaccgacacaagcaaatcagctacctcttcaagtccagggagccccatccacagcctggagacgtcgctttagctgaggaccctctcgcctgcccgcccgccctcatggaccccgctgccacccgctttccgggcacccatccatccaggcacccaactcacccaagcagcaacgagcaacaatcggaaaccaaatactggagagaaaaccaacgtttccacccacagaccctttctctggctgcgatgctgtttgaactctttttcacttcaaggcaaggggcgggatctccactgggggcttacgggagtgagcggttttcccaaaacaagcccttcctggctcccacccagacatggaccagccatgcacccgcccagccaccacgtcccccgcatgaatgtactgtacactttcaatcctccccttgtttggtttttgggggttggggaggggtttttgtttgtttgtttgttttcttaggcgggaactgcaaacagactcttttctgagactatttatccaatccactggtctgtgagtttttgaaatgcttgcacagcatggtctcagttgtatagattaatttaataactttttgaaattgcagagcttaactcgcctagtagatttgcaccaatggaaccgaagaacttcatagacactcacaaggttatatccatttctttgtatctatatcaacgtatacttttccgagactgtatacgtccatatagataggtagatatatatatatatatataaatatatatacatggatatataaagtttctttgccggcatgttgccttgtttccgcttaaattgctctattttaacttatttatgtcctaaaagaagaatgtaatttgtttacaaacctgtagataacgtctttggctatttgtatggtttaagaacactggtggctgagatgctataaaaacagctcggcccaacagacacttcccctgggttgcatcctggatgttttatgatagccatgctctgatttttgcctgctatttccgttcaataatgtcactaccgtgagaggctcaggcagaagccaaatgctaccgagttgccatcctgaggggtttaacaacatgctccgtagacgaagggagaggaggagagaaggcttcctgggtttgcaacactaacggccatccggcccaaggatgccaggatctgcaaagcactgctcgaagacttttctctcaatgaaactcgcttgagtttactaagagcatttcaaaaataggttctctttggcactgtctgtacagagattgaggtagtgttgaaatattataaatggtattgtgttgatttttttttttatttagtaacttacaggtttgtttccttattaatggcagcatctgagctgttggcatattggatgaggatcagtatggcttgctgcttttatttttatttttgaagaagaatagcctttttctctgcactatttagatccgaatgaaccttatgatgtgtatattgagatgtactcagtgtgattttaaaccaaattgtcttcctgtagtcacaatatatactgtagccttttaacagcaagtcttgctttcccaaacagaaagccattctgaaaccctacagtatcacaggtgagaaaaggtggttattttttccccaagacaacagcactagtaatcccacttaataagagcttatttaattggatgtcagcctcttaactgctaagcactttgtgggtctcagcgtttttcataaaagaacttttgtatttaatacaaagtttgctttgagacttttcagcatatgatcttttttccataaacttgtacagtgcaaaagacattttgaataccatgatcgatgatgtcccatgcttcgaggaaaaccaaacactttccgcctctcttgcaaaatccattcctcatgctgaccctcctcacgatggctgtgtcagcccagccccttcccttctccaggcccagagaactcttccacaaacaagatgagagccactcgggaaaagagccatagtcaactgggagggcctacatctggatggcggtggaaaaacttgagggtttggggttcaaagtcagcccatcccacctggcaaaatcctcctggaaggaggaccttcaagagcgcatcacctgaatgtcgtgaagaagtatctctgaatgtatccaggagaggaactgcataaccaaaggggtgaccagccctcagatgtgcttattggattccagtacaaacgccaccaaagccagcccactgctctcctacaaggaaggaaagatctgcacgtgtaaaacatggggcagccttggaacatggtgttttttggagtttcctttctcacagttttccatctccccacttctttgatcagtcatgtgtccgtgacctcgttccatgacatcaggatagctgtgtttgcacaccatgctccatgttcattcggagccaggaggggttctcagtggagcctggcttagggaacagggagcgatggaagaatgccaacattagcgttggtcttctcttgtcaggaatgaaggatgcttgcacacatgcaccccctcactctcacacttgcacacatacacacacacacacacgaaatggttggtttgtcaaaactcactgtagtacataaagcttgcactctgcgtcctatatctagcagcatggggtacgtttggcagttcactccattagggggtaaataatttatgaccattcatctgtttttatgaatttttttatctagacaataatgtaaataaagaactcaccatctctgttcatttaatactatgcaatggttatgctttcaatcgctggctcttctgactcgtgcagtgtggttctgaaatgtttgtggtttaaaaaaaaaagcaaaaaacaacatcaaacagaacatagtaaatatatctgtaatgtatacttttttctactttgggactgcatcatccacatagcttcttttctgtcctctagacaagggctccaggagtaagtggcagatttggttctgagagctaagctcaccaacttgtctccccctcaacagatgagggaagggcagggagcccgttcagtgactcctggcgctgcagaatcactcatctttggaggtgagcagagagagctctgaggagtttccttcttgcaactcaggcggagctttctttaactcaggagcagcctccattgctcccgccaacccctcaccatggccccttgtccccttgtcccaaccatagcatagagatgacaagagagaggcagtcctatttctgagactggaccaattaaaatgactgcactggctcaaaggactctgaacctgtcttgtcctgggtcctccagttgttggaagccactcttttccccaaccatgctgaaatgccacctttaccacacactgatgtcttacatagacttagatctatttctggaacttctcttctcttcgcttacttgggtgtctcatctggcaccagccatacaattttaactattgtcaatttctaatgtcttattatgtggtgggatgagtcccttcactcttcttttacaaaatttcctagttattctctcacatctattcttccacataaactttaaattgtgcccagtcctccaccccctgtcccattcccacccccaaattctgggctctgtcattccctgtgccatcatcttccccccattgtaattactgtccactcagggctgtgaaatagactatgttctgtaaagagggacaaaaagggcatcctgatcttgagagaagcctgctgttcctcccatcatttcacctgccccctaagcccaggagttgtcatgagaggtcaccaggcccccactcaatctcagcttgggaaccaaagtcacccaccttggttgtgttggggtggacccgccatctgtccctggtccagacgagaaagaggagtctctcctaggcctggagctgggaaagaatgtgtggcccagttgtctgcacttctaattctcatcatggagaaacctttattcctatctccctttcctgaactggttttttgttgtttttgtttcattttgttttggggggatagtttcttgctctttaatttggagtctccagtacctttgggatgcaggcagttcttgcctgggccttctcggaaccctcactcccctagcccactcttgcgctacctgcaggaggctgccaacctggtgcattctgacaagcctcccacccaaatctctctcctgccattgtgtccaaaatcccaccattagaggctcttgtagggaagagcgtttcttgaaggcttttaggccttccagagccaggagggaagtcagacaatagcaggaagtccccaggccttttcaaagttccaaaccaagctctcctgattttaatgtagagatcataccaacccaggtgggggaggagggtccccagccccaggcagcagccatcaccccctccactgaaaacaatattggaggctgctttgggactgcccttctcagccccctaagtctgttttgtaatgcctgtggtgctctccctcctggacctttcctctcgggggtcaccacactttgctaactcttgtgtgcacatattttataatagagtagcgagggaatggtgccgcctccagcttccgtaagctgcccgggctctggggggctctgggacaatcggggctgggaagtgactgtgctcttattgtacactctttatttctctgtatctttggcttgtgctctttgtaattaatgggatttgtctgccttttcaacactatactgagcaataacaataaatgcacacgtggaaatgca

SEQ ID NO: 109704 - DNA, 8962 bp, Homo sapiens
  Payload ID: 1545
  Gene Symbol: ATP2B2
  Gene Name: ATPase, Ca++ transporting, plasma membrane 2
  Uniprot ID: Q01814
  ENST ID: ENST00000360273
  CDS Start-End: 440-4171
agtctgcagaggggcccgggcacgctggctgggctcagccgcggcaccagctgccgcaccgcgattacggggctgcccgccgggaaaccgtgcaggattggtggtgattttcatagccaagagccaccacccctgaccatgtagatgccagttccagggagcagcatgggccccactgaatggagactcctgggtctacagccctgagcccctccggcccctggacctcgtcccacaccggaggacacctcttggagctcaccaccactgtcaccagcccgcctcggccacccccaccccccgggacccggagtcggccgcctggtgccacagctgaccagtgagggtgtgctgaggacagccacaagcagccatcacccggcagcctcttgtccagcgctgacccttgggcccagcccgagcaaggaccgcagcaaacatgggtgacatgaccaacagcgacttttactccaaaaaccaaagaaatgagtcgagccatgggggcgagttcgggtgcacaatggaggagctccgctccctcatggagctgcggggcactgaggctgtggtcaagatcaaggagacttatggggacaccgaagccatctgccggcgcctcaaaacctcacctgttgaaggtttgccgggcaccgctccagacctggaaaagagaaagcaaatttttgggcaaaactttatacctccaaagaagccaaaaaccttcctgcagctcgtgtgggaggcgctgcaggacgtgacgctcatcatcctggagattgccgccatcatctccctggggctgtccttctaccacccgcccggcgagggcaacgaaggatgtgcgacggcccagggtggggcagaggatgaaggagaggcagaggcaggttggatcgagggggccgccattctcctctcagttatctgtgtggtcctggtcacggccttcaatgactggagcaaagagaaacagttccggggcctgcagagccgcatcgagcaggaacagaaatttaccgtggtccgggctggccaggtggtccagatccctgtggctgagatcgtggttggggacatagcccaggtcaaatatggtgacctcctccctgccgacggcctcttcatccagggcaatgacctcaagattgatgaaagctccctaactggagagtctgaccaggtgcgcaagtccgtggacaaggaccccatgctgctgtcaggaacccacgtgatggagggctcaggacggatgttggtgactgctgtgggtgtgaactctcagactggcatcatctttaccctcctgggggctggtggtgaagaggaagagaagaaagacaaaaaaggtgtgaagaagggggatggccttcagctaccagcagcagacggtgcggcagcttcaaatgctgcagatagtgcgaatgccagcctagtcaatggtaaaatgcaggatggcaatgtggacgccagccagagcaaagccaaacaacaggacggggcagccgccatggagatgcagcccctcaagagtgccgagggcggcgacgctgacgacaggaagaaggccagcatgcacaagaaggagaagtccgtgctgcagggcaagctcaccaagctggctgtgcagatcgggaaggcgggcttggtgatgtcagccatcacggtgatcatcctggtgctctacttcactgtggacaccttcgtggtcaacaagaagccgtggctgcctgagtgcacgcccgtctacgtgcagtactttgtcaagttcttcatcattggcgtgacggtgctggtggtcgccgtgcccgaggggctccctctggccgtcaccatctcgttggcctattcggtgaagaaaatgatgaaggacaacaacctggtacgccacctggatgcctgtgagaccatgggcaatgccacagccatctgctcagacaagacaggcacgctgaccaccaatcgcatgacagtggtacaggcctatgtcggcgacgtccactataaagagatccccgaccccagctccatcaacaccaagaccatggagctgctgatcaatgccatcgccatcaacagcgcctacaccaccaagattctgcccccagagaaggagggcgccctgcctcggcaggtgggcaacaagacggagtgcggcctgctgggcttcgtgctggacctgaagcaggactacgagcccgtgcgcagccagatgccagaggagaagttgtacaaagtgtacaccttcaactccgtgcgcaagtccatgagcactgtcatcaagctgcccgacgagagcttccgcatgtacagcaagggggcttctgagatcgtgctcaagaagtgctgcaaaatcctcaatggggcgggagagcctcgtgtcttccggccccgcgaccgggacgagatggtaaagaaggtgattgagcccatggcttgcgatgggctccgcactatctgcgtggcctaccgcgacttccccagcagcccggagccggactgggacaatgagaatgacatcctcaacgaactcacctgcatctgcgtggtgggcatcgaggacccggtgcggccagaggtcccagaagccatccgcaagtgccagcgggcaggcatcacggtccgcatggtcactggcgacaatatcaacacggctcgggccatcgccatcaagtgtggcatcatccatcctggggaggactttctgtgcctcgagggcaaggagttcaacaggaggatccgcaacgagaagggggagattgagcaggagcgaattgacaagatctggccaaagctgcgggtgctggctcgctcctccccaacggacaagcataccctggttaaaggcatcatcgacagcacacacactgagcagcggcaggtggtggccgtgacgggggacgggaccaacgacgggcctgcactcaagaaggccgacgtgggcttcgccatgggcatcgcaggcactgacgtggccaaggaggcctcagacatcatcctgacagacgacaatttcagcagcatcgtcaaggcagtgatgtggggccgcaacgtctatgacagcatctccaaattcttgcagttccagctcaccgtcaacgtggtggccgtgattgtggccttcacaggcgcctgcatcacgcaggactcccctctgaaggccgtgcagatgctctgggtgaacctcatcatggacacgtttgcctcgctggcactggccactgagccgcccacggagaccctgctgctgaggaagccgtacggccgcaacaagccgctcatctccaggaccatgatgaagaacatcctgggccatgctgtctaccagcttgccctcatcttcaccctgctctttgttggcgagaagatgttccagatcgacagcgggaggaacgcgcccctgcattcgccaccctcagaacattacaccatcatcttcaacaccttcgtcatgatgcagctcttcaacgagatcaacgcccgcaagatccacggcgagcgcaatgtctttgacggcatcttccggaaccccatcttctgcaccatcgtgctgggcacctttgccatccagatagtgatcgtgcagtttggagggaagccattcagctgctctccactgcagctggaccagtggatgtggtgcatattcattgggttaggagagctcgtttggggccaggtcatcgccaccatcccgaccagcagactcaagttcctcaaggaggcaggcaggctcacacagaaggaggagatcccggaggaggagctcaacgaggacgtggaggagatcgaccacgcggagcgggagctgcggcggggccagatcctgtggttccgaggcctgaatcggatccagacacagatccgcgtcgtgaaggcgttccgtagctctctctatgaaggtttagaaaagcctgaatctcgaacctccatccataacttcatggctcatcctgaattccggatcgaagattcccagccccacatccccctcattgatgacaccgacctggaagaagatgccgcgctcaagcagaactcgagcccgccgtcatccctcaacaagaacaacagcgccatcgacagtgggatcaacctgacgaccgacacaagcaaatcagctacctcttcaagtccagggagccccatccacagcctggagacgtcgctttagctgaggaccctctcgcctgcccgcccgccctcatggaccccgctgccacccgctttccgggcacccatccatccaggcacccaactcacccaagcagcaacgagcaacaatcggaaaccaaatactggagagaaaaccaacgtttccacccacagaccctttctctggctgcgatgctgtttgaactctttttcacttcaaggcaaggggcgggatctccactgggggcttacgggagtgagcggttttcccaaaacaagcccttcctggctcccacccagacatggaccagccatgcacccgcccagccaccacgtcccccgcatgaatgtactgtacactttcaatcctccccttgtttggtttttgggggttggggaggggtttttgtttgtttgtttgttttcttaggcgggaactgcaaacagactcttttctgagactatttatccaatccactggtctgtgagtttttgaaatgcttgcacagcatggtctcagttgtatagattaatttaataactttttgaaattgcagagcttaactcgcctagtagatttgcaccaatggaaccgaagaacttcatagacactcacaaggttatatccatttctttgtatctatatcaacgtatacttttccgagactgtatacgtccatatagataggtagatatatatatatatatataaatatatatacatggatatataaagtttctttgccggcatgttgccttgtttccgcttaaattgctctattttaacttatttatgtcctaaaagaagaatgtaatttgtttacaaacctgtagataacgtctttggctatttgtatggtttaagaacactggtggctgagatgctataaaaacagctcggcccaacagacacttcccctgggttgcatcctggatgttttatgatagccatgctctgatttttgcctgctatttccgttcaataatgtcactaccgtgagaggctcaggcagaagccaaatgctaccgagttgccatcctgaggggtttaacaacatgctccgtagacgaagggagaggaggagagaaggcttcctgggtttgcaacactaacggccatccggcccaaggatgccaggatctgcaaagcactgctcgaagacttttctctcaatgaaactcgcttgagtttactaagagcatttcaaaaataggttctctttggcactgtctgtacagagattgaggtagtgttgaaatattataaatggtattgtgttgatttttttttttatttagtaacttacaggtttgtttccttattaatggcagcatctgagctgttggcatattggatgaggatcagtatggcttgctgcttttatttttatttttgaagaagaatagcctttttctctgcactatttagatccgaatgaaccttatgatgtgtatattgagatgtactcagtgtgattttaaaccaaattgtcttcctgtagtcacaatatatactgtagccttttaacagcaagtcttgctttcccaaacagaaagccattctgaaaccctacagtatcacaggtgagaaaaggtggttattttttccccaagacaacagcactagtaatcccacttaataagagcttatttaattggatgtcagcctcttaactgctaagcactttgtgggtctcagcgtttttcataaaagaacttttgtatttaatacaaagtttgctttgagacttttcagcatatgatcttttttccataaacttgtacagtgcaaaagacattttgaataccatgatcgatgatgtcccatgcttcgaggaaaaccaaacactttccgcctctcttgcaaaatccattcctcatgctgaccctcctcacgatggctgtgtcagcccagccccttcccttctccaggcccagagaactcttccacaaacaagatgagagccactcgggaaaagagccatagtcaactgggagggcctacatctggatggcggtggaaaaacttgagggtttggggttcaaagtcagcccatcccacctggcaaaatcctcctggaaggaggaccttcaagagcgcatcacctgaatgtcgtgaagaagtatctctgaatgtatccaggagaggaactgcataaccaaaggggtgaccagccctcagatgtgcttattggattccagtacaaacgccaccaaagccagcccactgctctcctacaaggaaggaaagatctgcacgtgtaaaacatggggcagccttggaacatggtgttttttggagtttcctttctcacagttttccatctccccacttctttgatcagtcatgtgtccgtgacctcgttccatgacatcaggatagctgtgtttgcacaccatgctccatgttcattcggagccaggaggggttctcagtggagcctggcttagggaacagggagcgatggaagaatgccaacattagcgttggtcttctcttgtcaggaatgaaggatgcttgcacacatgcaccccctcactctcacacttgcacacatacacacacacacacacgaaatggttggtttgtcaaaactcactgtagtacataaagcttgcactctgcgtcctatatctagcagcatggggtacgtttggcagttcactccattagggggtaaataatttatgaccattcatctgtttttatgaatttttttatctagacaataatgtaaataaagaactcaccatctctgttcatttaatactatgcaatggttatgctttcaatcgctggctcttctgactcgtgcagtgtggttctgaaatgtttgtggtttaaaaaaaaaagcaaaaaacaacatcaaacagaacatagtaaatatatctgtaatgtatacttttttctactttgggactgcatcatccacatagcttcttttctgtcctctagacaagggctccaggagtaagtggcagatttggttctgagagctaagctcaccaacttgtctccccctcaacagatgagggaagggcagggagcccgttcagtgactcctggcgctgcagaatcactcatctttggaggtgagcagagagagctctgaggagtttccttcttgcaactcaggcggagctttctttaactcaggagcagcctccattgctcccgccaacccctcaccatggccccttgtccccttgtcccaaccatagcatagagatgacaagagagaggcagtcctatttctgagactggaccaattaaaatgactgcactggctcaaaggactctgaacctgtcttgtcctgggtcctccagttgttggaagccactcttttccccaaccatgctgaaatgccacctttaccacacactgatgtcttacatagacttagatctatttctggaacttctcttctcttcgcttacttgggtgtctcatctggcaccagccatacaattttaactattgtcaatttctaatgtcttattatgtggtgggatgagtcccttcactcttcttttacaaaatttcctagttattctctcacatctattcttccacataaactttaaattgtgcccagtcctccaccccctgtcccattcccacccccaaattctgggctctgtcattccctgtgccatcatcttccccccattgtaattactgtccactcagggctgtgaaatagactatgttctgtaaagagggacaaaaagggcatcctgatcttgagagaagcctgctgttcctcccatcatttcacctgccccctaagcccaggagttgtcatgagaggtcaccaggcccccactcaatctcagcttgggaaccaaagtcacccaccttggttgtgttggggtggacccgccatctgtccctggtccagacgagaaagaggagtctctcctaggcctggagctgggaaagaatgtgtggcccagttgtctgcacttctaattctcatcatggagaaacctttattcctatctccctttcctgaactggttttttgttgtttttgtttcattttgttttggggggatagtttcttgctctttaatttggagtctccagtacctttgggatgcaggcagttcttgcctgggccttctcggaaccctcactcccctagcccactcttgcgctacctgcaggaggctgccaacctggtgcattctgacaagcctcccacccaaatctctctcctgccattgtgtccaaaatcccaccattagaggctcttgtagggaagagcgtttcttgaaggcttttaggccttccagagccaggagggaagtcagacaatagcaggaagtccccaggccttttcaaagttccaaaccaagctctcctgattttaatgtagagatcataccaacccaggtgggggaggagggtccccagccccaggcagcagccatcaccccctccactgaaaacaatattggaggctgctttgggactgcccttctcagccccctaagtctgttttgtaatgcctgtggtgctctccctcctggacctttcctctcgggggtcaccacactttgctaactcttgtgtgcacatattttataatagagtagcgagggaatggtgccgcctccagcttccgtaagctgcccgggctctggggggctctgggacaatcggggctgggaagtgactgtgctcttattgtacactctttatttctctgtatctttggcttgtgctctttgtaattaatgggatttgtctgccttttcaacactatactgagcaataacaataaatgcacacgtggaaatgca

SEQ ID NO: 109705 - DNA, 8900 bp, Homo sapiens
  Payload ID: 1545
  Gene Symbol: ATP2B2
  Gene Name: ATPase, Ca++ transporting, plasma membrane 2
  Uniprot ID: Q01814
  ENST ID: ENST00000383800
  CDS Start-End: 513-4109
ggcgagatgctctcctagaaccggcgccggcgcctccgccccccgccccccacccgctcgggcaggatggtacagtctgcagaggggcccgggcacgctggctgggctcagccgcggcaccagctgccgcaccgcgattacggggctgcccgccgggaaaccgtgcaggattggtggtgattttcatagccaagagccaccacccctgaccatgtagatgccagttccagggagcagcatgggccccactgaatggagactcctgggtctacagccctgagcccctccggcccctggacctcgtcccacaccggaggacacctcttggagctcaccaccactgtcaccagcccgcctcggccacccccaccccccgggacccggagtcggccgcctggtgccacagctgaccagtgagggtgtgctgaggacagccacaagcagccatcacccggcagcctcttgtccagcgctgacccttgggcccagcccgagcaaggaccgcagcaaacatgggtgacatgaccaacagcgacttttactccaaaaaccaaagaaatgagtcgagccatgggggcgagttcgggtgcacaatggaggagctccgctccctcatggagctgcggggcactgaggctgtggtcaagatcaaggagacttatggggacaccgaagccatctgccggcgcctcaaaacctcacctgttgaaggtttgccgggcaccgctccagacctggaaaagagaaagcaaatttttgggcaaaactttatacctccaaagaagccaaaaaccttcctgcagctcgtgtgggaggcgctgcaggacgtgacgctcatcatcctggagattgccgccatcatctccctggggctgtccttctaccacccgcccggcgagggcaacgaaggatgtgcgacggcccagggtggggcagaggatgaaggagaggcagaggcaggttggatcgagggggccgccattctcctctcagttatctgtgtggtcctggtcacggccttcaatgactggagcaaagagaaacagttccggggcctgcagagccgcatcgagcaggaacagaaatttaccgtggtccgggctggccaggtggtccagatccctgtggctgagatcgtggttggggacatagcccaggtcaaatatggtgacctcctccctgccgacggcctcttcatccagggcaatgacctcaagattgatgaaagctccctaactggagagtctgaccaggtgcgcaagtccgtggacaaggaccccatgctgctgtcaggaacccacgtgatggagggctcaggacggatgttggtgactgctgtgggtgtgaactctcagactggcatcatctttaccctcctgggggctggtggtgaagaggaagagaagaaagacaaaaaagccaaacaacaggacggggcagccgccatggagatgcagcccctcaagagtgccgagggcggcgacgctgacgacaggaagaaggccagcatgcacaagaaggagaagtccgtgctgcagggcaagctcaccaagctggctgtgcagatcgggaaggcgggcttggtgatgtcagccatcacggtgatcatcctggtgctctacttcactgtggacaccttcgtggtcaacaagaagccgtggctgcctgagtgcacgcccgtctacgtgcagtactttgtcaagttcttcatcattggcgtgacggtgctggtggtcgccgtgcccgaggggctccctctggccgtcaccatctcgttggcctattcggtgaagaaaatgatgaaggacaacaacctggtacgccacctggatgcctgtgagaccatgggcaatgccacagccatctgctcagacaagacaggcacgctgaccaccaatcgcatgacagtggtacaggcctatgtcggcgacgtccactataaagagatccccgaccccagctccatcaacaccaagaccatggagctgctgatcaatgccatcgccatcaacagcgcctacaccaccaagattctgcccccagagaaggagggcgccctgcctcggcaggtgggcaacaagacggagtgcggcctgctgggcttcgtgctggacctgaagcaggactacgagcccgtgcgcagccagatgccagaggagaagttgtacaaagtgtacaccttcaactccgtgcgcaagtccatgagcactgtcatcaagctgcccgacgagagcttccgcatgtacagcaagggggcttctgagatcgtgctcaagaagtgctgcaaaatcctcaatggggcgggagagcctcgtgtcttccggccccgcgaccgggacgagatggtaaagaaggtgattgagcccatggcttgcgatgggctccgcactatctgcgtggcctaccgcgacttccccagcagcccggagccggactgggacaatgagaatgacatcctcaacgaactcacctgcatctgcgtggtgggcatcgaggacccggtgcggccagaggtcccagaagccatccgcaagtgccagcgggcaggcatcacggtccgcatggtcactggcgacaatatcaacacggctcgggccatcgccatcaagtgtggcatcatccatcctggggaggactttctgtgcctcgagggcaaggagttcaacaggaggatccgcaacgagaagggggagattgagcaggagcgaattgacaagatctggccaaagctgcgggtgctggctcgctcctccccaacggacaagcataccctggttaaaggcatcatcgacagcacacacactgagcagcggcaggtggtggccgtgacgggggacgggaccaacgacgggcctgcactcaagaaggccgacgtgggcttcgccatgggcatcgcaggcactgacgtggccaaggaggcctcagacatcatcctgacagacgacaatttcagcagcatcgtcaaggcagtgatgtggggccgcaacgtctatgacagcatctccaaattcttgcagttccagctcaccgtcaacgtggtggccgtgattgtggccttcacaggcgcctgcatcacgcaggactcccctctgaaggccgtgcagatgctctgggtgaacctcatcatggacacgtttgcctcgctggcactggccactgagccgcccacggagaccctgctgctgaggaagccgtacggccgcaacaagccgctcatctccaggaccatgatgaagaacatcctgggccatgctgtctaccagcttgccctcatcttcaccctgctctttgttggcgagaagatgttccagatcgacagcgggaggaacgcgcccctgcattcgccaccctcagaacattacaccatcatcttcaacaccttcgtcatgatgcagctcttcaacgagatcaacgcccgcaagatccacggcgagcgcaatgtctttgacggcatcttccggaaccccatcttctgcaccatcgtgctgggcacctttgccatccagatagtgatcgtgcagtttggagggaagccattcagctgctctccactgcagctggaccagtggatgtggtgcatattcattgggttaggagagctcgtttggggccaggtcatcgccaccatcccgaccagcagactcaagttcctcaaggaggcaggcaggctcacacagaaggaggagatcccggaggaggagctcaacgaggacgtggaggagatcgaccacgcggagcgggagctgcggcggggccagatcctgtggttccgaggcctgaatcggatccagacacagatccgcgtcgtgaaggcgttccgtagctctctctatgaaggtttagaaaagcctgaatctcgaacctccatccataacttcatggctcatcctgaattccggatcgaagattcccagccccacatccccctcattgatgacaccgacctggaagaagatgccgcgctcaagcagaactcgagcccgccgtcatccctcaacaagaacaacagcgccatcgacagtgggatcaacctgacgaccgacacaagcaaatcagctacctcttcaagtccagggagccccatccacagcctggagacgtcgctttagctgaggaccctctcgcctgcccgcccgccctcatggaccccgctgccacccgctttccgggcacccatccatccaggcacccaactcacccaagcagcaacgagcaacaatcggaaaccaaatactggagagaaaaccaacgtttccacccacagaccctttctctggctgcgatgctgtttgaactctttttcacttcaaggcaaggggcgggatctccactgggggcttacgggagtgagcggttttcccaaaacaagcccttcctggctcccacccagacatggaccagccatgcacccgcccagccaccacgtcccccgcatgaatgtactgtacactttcaatcctccccttgtttggtttttgggggttggggaggggtttttgtttgtttgtttgttttcttaggcgggaactgcaaacagactcttttctgagactatttatccaatccactggtctgtgagtttttgaaatgcttgcacagcatggtctcagttgtatagattaatttaataactttttgaaattgcagagcttaactcgcctagtagatttgcaccaatggaaccgaagaacttcatagacactcacaaggttatatccatttctttgtatctatatcaacgtatacttttccgagactgtatacgtccatatagataggtagatatatatatatatatataaatatatatacatggatatataaagtttctttgccggcatgttgccttgtttccgcttaaattgctctattttaacttatttatgtcctaaaagaagaatgtaatttgtttacaaacctgtagataacgtctttggctatttgtatggtttaagaacactggtggctgagatgctataaaaacagctcggcccaacagacacttcccctgggttgcatcctggatgttttatgatagccatgctctgatttttgcctgctatttccgttcaataatgtcactaccgtgagaggctcaggcagaagccaaatgctaccgagttgccatcctgaggggtttaacaacatgctccgtagacgaagggagaggaggagagaaggcttcctgggtttgcaacactaacggccatccggcccaaggatgccaggatctgcaaagcactgctcgaagacttttctctcaatgaaactcgcttgagtttactaagagcatttcaaaaataggttctctttggcactgtctgtacagagattgaggtagtgttgaaatattataaatggtattgtgttgatttttttttttatttagtaacttacaggtttgtttccttattaatggcagcatctgagctgttggcatattggatgaggatcagtatggcttgctgcttttatttttatttttgaagaagaatagcctttttctctgcactatttagatccgaatgaaccttatgatgtgtatattgagatgtactcagtgtgattttaaaccaaattgtcttcctgtagtcacaatatatactgtagccttttaacagcaagtcttgctttcccaaacagaaagccattctgaaaccctacagtatcacaggtgagaaaaggtggttattttttccccaagacaacagcactagtaatcccacttaataagagcttatttaattggatgtcagcctcttaactgctaagcactttgtgggtctcagcgtttttcataaaagaacttttgtatttaatacaaagtttgctttgagacttttcagcatatgatcttttttccataaacttgtacagtgcaaaagacattttgaataccatgatcgatgatgtcccatgcttcgaggaaaaccaaacactttccgcctctcttgcaaaatccattcctcatgctgaccctcctcacgatggctgtgtcagcccagccccttcccttctccaggcccagagaactcttccacaaacaagatgagagccactcgggaaaagagccatagtcaactgggagggcctacatctggatggcggtggaaaaacttgagggtttggggttcaaagtcagcccatcccacctggcaaaatcctcctggaaggaggaccttcaagagcgcatcacctgaatgtcgtgaagaagtatctctgaatgtatccaggagaggaactgcataaccaaaggggtgaccagccctcagatgtgcttattggattccagtacaaacgccaccaaagccagcccactgctctcctacaaggaaggaaagatctgcacgtgtaaaacatggggcagccttggaacatggtgttttttggagtttcctttctcacagttttccatctccccacttctttgatcagtcatgtgtccgtgacctcgttccatgacatcaggatagctgtgtttgcacaccatgctccatgttcattcggagccaggaggggttctcagtggagcctggcttagggaacagggagcgatggaagaatgccaacattagcgttggtcttctcttgtcaggaatgaaggatgcttgcacacatgcaccccctcactctcacacttgcacacatacacacacacacacacgaaatggttggtttgtcaaaactcactgtagtacataaagcttgcactctgcgtcctatatctagcagcatggggtacgtttggcagttcactccattagggggtaaataatttatgaccattcatctgtttttatgaatttttttatctagacaataatgtaaataaagaactcaccatctctgttcatttaatactatgcaatggttatgctttcaatcgctggctcttctgactcgtgcagtgtggttctgaaatgtttgtggtttaaaaaaaaaagcaaaaaacaacatcaaacagaacatagtaaatatatctgtaatgtatacttttttctactttgggactgcatcatccacatagcttcttttctgtcctctagacaagggctccaggagtaagtggcagatttggttctgagagctaagctcaccaacttgtctccccctcaacagatgagggaagggcagggagcccgttcagtgactcctggcgctgcagaatcactcatctttggaggtgagcagagagagctctgaggagtttccttcttgcaactcaggcggagctttctttaactcaggagcagcctccattgctcccgccaacccctcaccatggccccttgtccccttgtcccaaccatagcatagagatgacaagagagaggcagtcctatttctgagactggaccaattaaaatgactgcactggctcaaaggactctgaacctgtcttgtcctgggtcctccagttgttggaagccactcttttccccaaccatgctgaaatgccacctttaccacacactgatgtcttacatagacttagatctatttctggaacttctcttctcttcgcttacttgggtgtctcatctggcaccagccatacaattttaactattgtcaatttctaatgtcttattatgtggtgggatgagtcccttcactcttcttttacaaaatttcctagttattctctcacatctattcttccacataaactttaaattgtgcccagtcctccaccccctgtcccattcccacccccaaattctgggctctgtcattccctgtgccatcatcttccccccattgtaattactgtccactcagggctgtgaaatagactatgttctgtaaagagggacaaaaagggcatcctgatcttgagagaagcctgctgttcctcccatcatttcacctgccccctaagcccaggagttgtcatgagaggtcaccaggcccccactcaatctcagcttgggaaccaaagtcacccaccttggttgtgttggggtggacccgccatctgtccctggtccagacgagaaagaggagtctctcctaggcctggagctgggaaagaatgtgtggcccagttgtctgcacttctaattctcatcatggagaaacctttattcctatctccctttcctgaactggttttttgttgtttttgtttcattttgttttggggggatagtttcttgctctttaatttggagtctccagtacctttgggatgcaggcagttcttgcctgggccttctcggaaccctcactcccctagcccactcttgcgctacctgcaggaggctgccaacctggtgcattctgacaagcctcccacccaaatctctctcctgccattgtgtccaaaatcccaccattagaggctcttgtagggaagagcgtttcttgaaggcttttaggccttccagagccaggagggaagtcagacaatagcaggaagtccccaggccttttcaaagttccaaaccaagctctcctgattttaatgtagagatcataccaacccaggtgggggaggagggtccccagccccaggcagcagccatcaccccctccactgaaaacaatattggaggctgctttgggactgcccttctcagccccctaagtctgttttgtaatgcctgtggtgctctccctcctggacctttcctctcgggggtcaccacactttgctaactcttgtgtgcacatattttataatagagtagcgagggaatggtgccgcctccagcttccgtaagctgcccgggctctggggggctctgggacaatcggggctgggaagtgactgtgctcttattgtacactctttatttctctgtatctttggcttgtgctctttgtaattaatgggatttgtctgccttttcaacactatactgagcaataacaataaatgcacacgtggaaatgca

SEQ ID NO: 109706 - DNA, 8964 bp, Homo sapiens
  Payload ID: 1545
  Gene Symbol: ATP2B2
  Gene Name: ATPase, Ca++ transporting, plasma membrane 2
  Uniprot ID: Q01814
  ENST ID: ENST00000397077
  CDS Start-End: 577-4173
gggcagccgcggcagaggagccgcagccgcagcggggccgggccgggccgggcgcgcaccagcggcagcggcggcggcagcggcggcggcagcatctcgctctcggagccggcgcaggtttccctgtacttagagcgtggactgtgaacccccaagcagacgagctgaacttcgtcacccagtccctagagccagcaagacatgggccccagtttccagaccctgacacctctcatttaaccagaagacgtggaggggagccaccacccctgaccatgtagatgccagttccagggagcagcatgggccccactgaatggagactcctgggtctacagccctgagcccctccggcccctggacctcgtcccacaccggaggacacctcttggagctcaccaccactgtcaccagcccgcctcggccacccccaccccccgggacccggagtcggccgcctggtgccacagctgaccagtgagggtgtgctgaggacagccacaagcagccatcacccggcagcctcttgtccagcgctgacccttgggcccagcccgagcaaggaccgcagcaaacatgggtgacatgaccaacagcgacttttactccaaaaaccaaagaaatgagtcgagccatgggggcgagttcgggtgcacaatggaggagctccgctccctcatggagctgcggggcactgaggctgtggtcaagatcaaggagacttatggggacaccgaagccatctgccggcgcctcaaaacctcacctgttgaaggtttgccgggcaccgctccagacctggaaaagagaaagcaaatttttgggcaaaactttatacctccaaagaagccaaaaaccttcctgcagctcgtgtgggaggcgctgcaggacgtgacgctcatcatcctggagattgccgccatcatctccctggggctgtccttctaccacccgcccggcgagggcaacgaaggatgtgcgacggcccagggtggggcagaggatgaaggagaggcagaggcaggttggatcgagggggccgccattctcctctcagttatctgtgtggtcctggtcacggccttcaatgactggagcaaagagaaacagttccggggcctgcagagccgcatcgagcaggaacagaaatttaccgtggtccgggctggccaggtggtccagatccctgtggctgagatcgtggttggggacatagcccaggtcaaatatggtgacctcctccctgccgacggcctcttcatccagggcaatgacctcaagattgatgaaagctccctaactggagagtctgaccaggtgcgcaagtccgtggacaaggaccccatgctgctgtcaggaacccacgtgatggagggctcaggacggatgttggtgactgctgtgggtgtgaactctcagactggcatcatctttaccctcctgggggctggtggtgaagaggaagagaagaaagacaaaaaagccaaacaacaggacggggcagccgccatggagatgcagcccctcaagagtgccgagggcggcgacgctgacgacaggaagaaggccagcatgcacaagaaggagaagtccgtgctgcagggcaagctcaccaagctggctgtgcagatcgggaaggcgggcttggtgatgtcagccatcacggtgatcatcctggtgctctacttcactgtggacaccttcgtggtcaacaagaagccgtggctgcctgagtgcacgcccgtctacgtgcagtactttgtcaagttcttcatcattggcgtgacggtgctggtggtcgccgtgcccgaggggctccctctggccgtcaccatctcgttggcctattcggtgaagaaaatgatgaaggacaacaacctggtacgccacctggatgcctgtgagaccatgggcaatgccacagccatctgctcagacaagacaggcacgctgaccaccaatcgcatgacagtggtacaggcctatgtcggcgacgtccactataaagagatccccgaccccagctccatcaacaccaagaccatggagctgctgatcaatgccatcgccatcaacagcgcctacaccaccaagattctgcccccagagaaggagggcgccctgcctcggcaggtgggcaacaagacggagtgcggcctgctgggcttcgtgctggacctgaagcaggactacgagcccgtgcgcagccagatgccagaggagaagttgtacaaagtgtacaccttcaactccgtgcgcaagtccatgagcactgtcatcaagctgcccgacgagagcttccgcatgtacagcaagggggcttctgagatcgtgctcaagaagtgctgcaaaatcctcaatggggcgggagagcctcgtgtcttccggccccgcgaccgggacgagatggtaaagaaggtgattgagcccatggcttgcgatgggctccgcactatctgcgtggcctaccgcgacttccccagcagcccggagccggactgggacaatgagaatgacatcctcaacgaactcacctgcatctgcgtggtgggcatcgaggacccggtgcggccagaggtcccagaagccatccgcaagtgccagcgggcaggcatcacggtccgcatggtcactggcgacaatatcaacacggctcgggccatcgccatcaagtgtggcatcatccatcctggggaggactttctgtgcctcgagggcaaggagttcaacaggaggatccgcaacgagaagggggagattgagcaggagcgaattgacaagatctggccaaagctgcgggtgctggctcgctcctccccaacggacaagcataccctggttaaaggcatcatcgacagcacacacactgagcagcggcaggtggtggccgtgacgggggacgggaccaacgacgggcctgcactcaagaaggccgacgtgggcttcgccatgggcatcgcaggcactgacgtggccaaggaggcctcagacatcatcctgacagacgacaatttcagcagcatcgtcaaggcagtgatgtggggccgcaacgtctatgacagcatctccaaattcttgcagttccagctcaccgtcaacgtggtggccgtgattgtggccttcacaggcgcctgcatcacgcaggactcccctctgaaggccgtgcagatgctctgggtgaacctcatcatggacacgtttgcctcgctggcactggccactgagccgcccacggagaccctgctgctgaggaagccgtacggccgcaacaagccgctcatctccaggaccatgatgaagaacatcctgggccatgctgtctaccagcttgccctcatcttcaccctgctctttgttggcgagaagatgttccagatcgacagcgggaggaacgcgcccctgcattcgccaccctcagaacattacaccatcatcttcaacaccttcgtcatgatgcagctcttcaacgagatcaacgcccgcaagatccacggcgagcgcaatgtctttgacggcatcttccggaaccccatcttctgcaccatcgtgctgggcacctttgccatccagatagtgatcgtgcagtttggagggaagccattcagctgctctccactgcagctggaccagtggatgtggtgcatattcattgggttaggagagctcgtttggggccaggtcatcgccaccatcccgaccagcagactcaagttcctcaaggaggcaggcaggctcacacagaaggaggagatcccggaggaggagctcaacgaggacgtggaggagatcgaccacgcggagcgggagctgcggcggggccagatcctgtggttccgaggcctgaatcggatccagacacagatccgcgtcgtgaaggcgttccgtagctctctctatgaaggtttagaaaagcctgaatctcgaacctccatccataacttcatggctcatcctgaattccggatcgaagattcccagccccacatccccctcattgatgacaccgacctggaagaagatgccgcgctcaagcagaactcgagcccgccgtcatccctcaacaagaacaacagcgccatcgacagtgggatcaacctgacgaccgacacaagcaaatcagctacctcttcaagtccagggagccccatccacagcctggagacgtcgctttagctgaggaccctctcgcctgcccgcccgccctcatggaccccgctgccacccgctttccgggcacccatccatccaggcacccaactcacccaagcagcaacgagcaacaatcggaaaccaaatactggagagaaaaccaacgtttccacccacagaccctttctctggctgcgatgctgtttgaactctttttcacttcaaggcaaggggcgggatctccactgggggcttacgggagtgagcggttttcccaaaacaagcccttcctggctcccacccagacatggaccagccatgcacccgcccagccaccacgtcccccgcatgaatgtactgtacactttcaatcctccccttgtttggtttttgggggttggggaggggtttttgtttgtttgtttgttttcttaggcgggaactgcaaacagactcttttctgagactatttatccaatccactggtctgtgagtttttgaaatgcttgcacagcatggtctcagttgtatagattaatttaataactttttgaaattgcagagcttaactcgcctagtagatttgcaccaatggaaccgaagaacttcatagacactcacaaggttatatccatttctttgtatctatatcaacgtatacttttccgagactgtatacgtccatatagataggtagatatatatatatatatataaatatatatacatggatatataaagtttctttgccggcatgttgccttgtttccgcttaaattgctctattttaacttatttatgtcctaaaagaagaatgtaatttgtttacaaacctgtagataacgtctttggctatttgtatggtttaagaacactggtggctgagatgctataaaaacagctcggcccaacagacacttcccctgggttgcatcctggatgttttatgatagccatgctctgatttttgcctgctatttccgttcaataatgtcactaccgtgagaggctcaggcagaagccaaatgctaccgagttgccatcctgaggggtttaacaacatgctccgtagacgaagggagaggaggagagaaggcttcctgggtttgcaacactaacggccatccggcccaaggatgccaggatctgcaaagcactgctcgaagacttttctctcaatgaaactcgcttgagtttactaagagcatttcaaaaataggttctctttggcactgtctgtacagagattgaggtagtgttgaaatattataaatggtattgtgttgatttttttttttatttagtaacttacaggtttgtttccttattaatggcagcatctgagctgttggcatattggatgaggatcagtatggcttgctgcttttatttttatttttgaagaagaatagcctttttctctgcactatttagatccgaatgaaccttatgatgtgtatattgagatgtactcagtgtgattttaaaccaaattgtcttcctgtagtcacaatatatactgtagccttttaacagcaagtcttgctttcccaaacagaaagccattctgaaaccctacagtatcacaggtgagaaaaggtggttattttttccccaagacaacagcactagtaatcccacttaataagagcttatttaattggatgtcagcctcttaactgctaagcactttgtgggtctcagcgtttttcataaaagaacttttgtatttaatacaaagtttgctttgagacttttcagcatatgatcttttttccataaacttgtacagtgcaaaagacattttgaataccatgatcgatgatgtcccatgcttcgaggaaaaccaaacactttccgcctctcttgcaaaatccattcctcatgctgaccctcctcacgatggctgtgtcagcccagccccttcccttctccaggcccagagaactcttccacaaacaagatgagagccactcgggaaaagagccatagtcaactgggagggcctacatctggatggcggtggaaaaacttgagggtttggggttcaaagtcagcccatcccacctggcaaaatcctcctggaaggaggaccttcaagagcgcatcacctgaatgtcgtgaagaagtatctctgaatgtatccaggagaggaactgcataaccaaaggggtgaccagccctcagatgtgcttattggattccagtacaaacgccaccaaagccagcccactgctctcctacaaggaaggaaagatctgcacgtgtaaaacatggggcagccttggaacatggtgttttttggagtttcctttctcacagttttccatctccccacttctttgatcagtcatgtgtccgtgacctcgttccatgacatcaggatagctgtgtttgcacaccatgctccatgttcattcggagccaggaggggttctcagtggagcctggcttagggaacagggagcgatggaagaatgccaacattagcgttggtcttctcttgtcaggaatgaaggatgcttgcacacatgcaccccctcactctcacacttgcacacatacacacacacacacacgaaatggttggtttgtcaaaactcactgtagtacataaagcttgcactctgcgtcctatatctagcagcatggggtacgtttggcagttcactccattagggggtaaataatttatgaccattcatctgtttttatgaatttttttatctagacaataatgtaaataaagaactcaccatctctgttcatttaatactatgcaatggttatgctttcaatcgctggctcttctgactcgtgcagtgtggttctgaaatgtttgtggtttaaaaaaaaaagcaaaaaacaacatcaaacagaacatagtaaatatatctgtaatgtatacttttttctactttgggactgcatcatccacatagcttcttttctgtcctctagacaagggctccaggagtaagtggcagatttggttctgagagctaagctcaccaacttgtctccccctcaacagatgagggaagggcagggagcccgttcagtgactcctggcgctgcagaatcactcatctttggaggtgagcagagagagctctgaggagtttccttcttgcaactcaggcggagctttctttaactcaggagcagcctccattgctcccgccaacccctcaccatggccccttgtccccttgtcccaaccatagcatagagatgacaagagagaggcagtcctatttctgagactggaccaattaaaatgactgcactggctcaaaggactctgaacctgtcttgtcctgggtcctccagttgttggaagccactcttttccccaaccatgctgaaatgccacctttaccacacactgatgtcttacatagacttagatctatttctggaacttctcttctcttcgcttacttgggtgtctcatctggcaccagccatacaattttaactattgtcaatttctaatgtcttattatgtggtgggatgagtcccttcactcttcttttacaaaatttcctagttattctctcacatctattcttccacataaactttaaattgtgcccagtcctccaccccctgtcccattcccacccccaaattctgggctctgtcattccctgtgccatcatcttccccccattgtaattactgtccactcagggctgtgaaatagactatgttctgtaaagagggacaaaaagggcatcctgatcttgagagaagcctgctgttcctcccatcatttcacctgccccctaagcccaggagttgtcatgagaggtcaccaggcccccactcaatctcagcttgggaaccaaagtcacccaccttggttgtgttggggtggacccgccatctgtccctggtccagacgagaaagaggagtctctcctaggcctggagctgggaaagaatgtgtggcccagttgtctgcacttctaattctcatcatggagaaacctttattcctatctccctttcctgaactggttttttgttgtttttgtttcattttgttttggggggatagtttcttgctctttaatttggagtctccagtacctttgggatgcaggcagttcttgcctgggccttctcggaaccctcactcccctagcccactcttgcgctacctgcaggaggctgccaacctggtgcattctgacaagcctcccacccaaatctctctcctgccattgtgtccaaaatcccaccattagaggctcttgtagggaagagcgtttcttgaaggcttttaggccttccagagccaggagggaagtcagacaatagcaggaagtccccaggccttttcaaagttccaaaccaagctctcctgattttaatgtagagatcataccaacccaggtgggggaggagggtccccagccccaggcagcagccatcaccccctccactgaaaacaatattggaggctgctttgggactgcccttctcagccccctaagtctgttttgtaatgcctgtggtgctctccctcctggacctttcctctcgggggtcaccacactttgctaactcttgtgtgcacatattttataatagagtagcgagggaatggtgccgcctccagcttccgtaagctgcccgggctctggggggctctgggacaatcggggctgggaagtgactgtgctcttattgtacactctttatttctctgtatctttggcttgtgctctttgtaattaatgggatttgtctgccttttcaacactatactgagcaataacaataaatgcacacgtggaaatgca

SEQ ID NO: 109707 - DNA, 4016 bp, Homo sapiens
  Payload ID: 1545
  Gene Symbol: ATP2B2
  Gene Name: ATPase, Ca++ transporting, plasma membrane 2
  ENST ID: ENST00000452124
  CDS Start-End: 1-3300
gccgccatcatctccctggggctgtccttctaccacccgcccggcgagggcaacgaaggatgtgcgacggcccagggtggggcagaggatgaaggagaggcagaggcaggttggatcgagggggccgccattctcctctcagttatctgtgtggtcctggtcacggccttcaatgactggagcaaagagaaacagttccggggcctgcagagccgcatcgagcaggaacagaaatttaccgtggtccgggctggccaggtggtccagatccctgtggctgagatcgtggttggggacatagcccaggtcaaatatggtgacctcctccctgccgacggcctcttcatccagggcaatgacctcaagattgatgaaagctccctaactggagagtctgaccaggtgcgcaagtccgtggacaaggaccccatgctgctgtcaggaacccacgtgatggagggctcaggacggatgttggtgactgctgtgggtgtgaactctcagactggcatcatctttaccctcctgggggctggtggtgaagaggaagagaagaaagacaaaaaaggtaaaatgcaggatggcaatgtggacgccagccagagcaaagccaaacaacaggacggggcagccgccatggagatgcagcccctcaagagtgccgagggcggcgacgctgacgacaggaagaaggccagcatgcacaagaaggagaagtccgtgctgcagggcaagctcaccaagctggctgtgcagatcgggaaggcgggcttggtgatgtcagccatcacggtgatcatcctggtgctctacttcactgtggacaccttcgtggtcaacaagaagccgtggctgcctgagtgcacgcccgtctacgtgcagtactttgtcaagttcttcatcattggcgtgacggtgctggtggtcgccgtgcccgaggggctccctctggccgtcaccatctcgttggcctattcggtgaagaaaatgatgaaggacaacaacctggtacgccacctggatgcctgtgagaccatgggcaatgccacagccatctgctcagacaagacaggcacgctgaccaccaatcgcatgacagtggtacaggcctatgtcggcgacgtccactataaagagatccccgaccccagctccatcaacaccaagaccatggagctgctgatcaatgccatcgccatcaacagcgcctacaccaccaagattctgcccccagagaaggagggcgccctgcctcggcaggtgggcaacaagacggagtgcggcctgctgggcttcgtgctggacctgaagcaggactacgagcccgtgcgcagccagatgccagaggagaagttgtacaaagtgtacaccttcaactccgtgcgcaagtccatgagcactgtcatcaagctgcccgacgagagcttccgcatgtacagcaagggggcttctgagatcgtgctcaagaagtgctgcaaaatcctcaatggggcgggagagcctcgtgtcttccggccccgcgaccgggacgagatggtaaagaaggtgattgagcccatggcttgcgatgggctccgcactatctgcgtggcctaccgcgacttccccagcagcccggagccggactgggacaatgagaatgacatcctcaacgaactcacctgcatctgcgtggtgggcatcgaggacccggtgcggccagaggtcccagaagccatccgcaagtgccagcgggcaggcatcacggtccgcatggtcactggcgacaatatcaacacggctcgggccatcgccatcaagtgtggcatcatccatcctggggaggactttctgtgcctcgagggcaaggagttcaacaggaggatccgcaacgagaagggggagattgagcaggagcgaattgacaagatctggccaaagctgcgggtgctggctcgctcctccccaacggacaagcataccctggttaaaggcatcatcgacagcacacacactgagcagcggcaggtggtggccgtgacgggggacgggaccaacgacgggcctgcactcaagaaggccgacgtgggcttcgccatgggcatcgcaggcactgacgtggccaaggaggcctcagacatcatcctgacagacgacaatttcagcagcatcgtcaaggcagtgatgtggggccgcaacgtctatgacagcatctccaaattcttgcagttccagctcaccgtcaacgtggtggccgtgattgtggccttcacaggcgcctgcatcacgcaggactcccctctgaaggccgtgcagatgctctgggtgaacctcatcatggacacgtttgcctcgctggcactggccactgagccgcccacggagaccctgctgctgaggaagccgtacggccgcaacaagccgctcatctccaggaccatgatgaagaacatcctgggccatgctgtctaccagcttgccctcatcttcaccctgctctttgttggcgagaagatgttccagatcgacagcgggaggaacgcgcccctgcattcgccaccctcagaacattacaccatcatcttcaacaccttcgtcatgatgcagctcttcaacgagatcaacgcccgcaagatccacggcgagcgcaatgtctttgacggcatcttccggaaccccatcttctgcaccatcgtgctgggcacctttgccatccagatagtgatcgtgcagtttggagggaagccattcagctgctctccactgcagctggaccagtggatgtggtgcatattcattgggttaggagagctcgtttggggccaggtcatcgccaccatcccgaccagcagactcaagttcctcaaggaggcaggcaggctcacacagaaggaggagatcccggaggaggagctcaacgaggacgtggaggagatcgaccacgcggagcgggagctgcggcggggccagatcctgtggttccgaggcctgaatcggatccagacacagatccgcgtcgtgaaggcgttccgtagctctctctatgaaggtttagaaaagcctgaatctcgaacctccatccataacttcatggctcatcctgaattccggatcgaagattcccagccccacatccccctcattgatgacaccgacctggaagaagatgccgcgctcaagcagaactcgagcccgccgtcatccctcaacaagaacaacagcgccatcgacagtgggatcaacctgacgaccgacacaagcaaatcagctacctcttcaagtccagggagccccatccacagcctggagacgtcgctttagctgaggaccctctcgcctgcccgcccgccctcatggaccccgctgccacccgctttccgggcacccatccatccaggcacccaactcacccaagcagcaacgagcaacaatcggaaaccaaatactggagagaaaaccaacgtttccacccacagaccctttctctggctgcgatgctgtttgaactctttttcacttcaaggcaaggggcgggatctccactgggggcttacgggagtgagcggttttcccaaaacaagcccttcctggctcccacccagacatggaccagccatgcacccgcccagccaccacgtcccccgcatgaatgtactgtacactttcaatcctccccttgtttggtttttgggggttggggaggggtttttgtttgtttgtttgttttcttaggcgggaactgcaaacagactcttttctgagactatttatccaatccactggtctgtgagtttttgaaatgcttgcacagcatggtctcagttgtatagattaatttaataactttttgaaattgcagagcttaactcgcctagtagatttgcaccaatggaaccgaagaacttcatagacactcacaaggttatatccatttctttgtatctatatcaacgtatacttttccgagactgtatacgtccatatagataggtagatatatatatatatatataaatatatatacatggatatataaa

SEQ ID NO: 109708 - DNA, 9101 bp, Homo sapiens
  Payload ID: 1545
  Gene Symbol: ATP2B2
  Gene Name: ATPase, Ca++ transporting, plasma membrane 2
  Uniprot ID: Q01814
  ENST ID: ENST00000460129
  CDS Start-End: 415-3879
agctgaacttcgtcacccagtccctagagccagcaagacatgggccccagtttccagaccctgacacctctcatttaaccagaagacgtggaggggagccaccacccctgaccatgtagatgccagttccagggagcagcatgggccccactgaatggagactcctgggtctacagccctgagcccctccggcccctggacctcgtcccacaccggaggacacctcttggagctcaccaccactgtcaccagcccgcctcggccacccccaccccccgggacccggagtcggccgcctggtgccacagctgaccagtgagggtgtgctgaggacagccacaagcagccatcacccggcagcctcttgtccagcgctgacccttgggcccagcccgagcaaggaccgcagcaaacatgggtgacatgaccaacagcgacttttactccaaaaaccaaagaaatgagtcgagccatgggggcgagttcgggtgcacaatggaggagctccgctccctcatggagctgcggggcactgaggctgtggtcaagatcaaggagacttatggggacaccgaagccatctgccggcgcctcaaaacctcacctgttgaaggtttgccgggcaccgctccagacctggaaaagagaaagcaaatttttgggcaaaactttatacctccaaagaagccaaaaaccttcctgcagctcgtgtgggaggcgctgcaggacgtgacgctcatcatcctggagattgccgccatcatctccctggggctgtccttctaccacccgcccggcgagggcaacgaaggatgtgcgacggcccagggtggggcagaggatgaaggagaggcagaggcaggttggatcgagggggccgccattctcctctcagttatctgtgtggtcctggtcacggccttcaatgactggagcaaagagaaacagttccggggcctgcagagccgcatcgagcaggaacagaaatttaccgtggtccgggctggccaggtggtccagatccctgtggctgagatcgtggttggggacatagcccaggtcaaatatggtgacctcctccctgccgacggcctcttcatccagggcaatgacctcaagattgatgaaagctccctaactggagagtctgaccaggtgcgcaagtccgtggacaaggaccccatgctgctgtcaggaacccacgtgatggagggctcaggacggatgttggtgactgctgtgggtgtgaactctcagactggcatcatctttaccctcctgggggctggtggtgaagaggaagagaagaaagacaaaaaagccaaacaacaggacggggcagccgccatggagatgcagcccctcaagagtgccgagggcggcgacgctgacgacaggaagaaggccagcatgcacaagaaggagaagtccgtgctgcagggcaagctcaccaagctggctgtgcagatcgggaaggcgggcttggtgatgtcagccatcacggtgatcatcctggtgctctacttcactgtggacaccttcgtggtcaacaagaagccgtggctgcctgagtgcacgcccgtctacgtgcagtactttgtcaagttcttcatcattggcgtgacggtgctggtggtcgccgtgcccgaggggctccctctggccgtcaccatctcgttggcctattcggtgaagaaaatgatgaaggacaacaacctggtacgccacctggatgcctgtgagaccatgggcaatgccacagccatctgctcagacaagacaggcacgctgaccaccaatcgcatgacagtggtacaggcctatgtcggcgacgtccactataaagagatccccgaccccagctccatcaacaccaagaccatggagctgctgatcaatgccatcgccatcaacagcgcctacaccaccaagattctgcccccagagaaggagggcgccctgcctcggcaggtgggcaacaagacggagtgcggcctgctgggcttcgtgctggacctgaagcaggactacgagcccgtgcgcagccagatgccagaggagaagttgtacaaagtgtacaccttcaactccgtgcgcaagtccatgagcactgtcatcaagctgcccgacgagagcttccgcatgtacagcaagggggcttctgagatcgtgctcaagaagtgctgcaaaatcctcaatggggcgggagagcctcgtgtcttccggccccgcgaccgggacgagatggtaaagaaggtgattgagcccatggcttgcgatgggctccgcactatctgcgtggcctaccgcgacttccccagcagcccggagccggactgggacaatgagaatgacatcctcaacgaactcacctgcatctgcgtggtgggcatcgaggacccggtgcggccagaggtcccagaagccatccgcaagtgccagcgggcaggcatcacggtccgcatggtcactggcgacaatatcaacacggctcgggccatcgccatcaagtgtggcatcatccatcctggggaggactttctgtgcctcgagggcaaggagttcaacaggaggatccgcaacgagaagggggagattgagcaggagcgaattgacaagatctggccaaagctgcgggtgctggctcgctcctccccaacggacaagcataccctggttaaaggcatcatcgacagcacacacactgagcagcggcaggtggtggccgtgacgggggacgggaccaacgacgggcctgcactcaagaaggccgacgtgggcttcgccatgggcatcgcaggcactgacgtggccaaggaggcctcagacatcatcctgacagacgacaatttcagcagcatcgtcaaggcagtgatgtggggccgcaacgtctatgacagcatctccaaattcttgcagttccagctcaccgtcaacgtggtggccgtgattgtggccttcacaggcgcctgcatcacgcaggactcccctctgaaggccgtgcagatgctctgggtgaacctcatcatggacacgtttgcctcgctggcactggccactgagccgcccacggagaccctgctgctgaggaagccgtacggccgcaacaagccgctcatctccaggaccatgatgaagaacatcctgggccatgctgtctaccagcttgccctcatcttcaccctgctctttgttggcgagaagatgttccagatcgacagcgggaggaacgcgcccctgcattcgccaccctcagaacattacaccatcatcttcaacaccttcgtcatgatgcagctcttcaacgagatcaacgcccgcaagatccacggcgagcgcaatgtctttgacggcatcttccggaaccccatcttctgcaccatcgtgctgggcacctttgccatccagatagtgatcgtgcagtttggagggaagccattcagctgctctccactgcagctggaccagtggatgtggtgcatattcattgggttaggagagctcgtttggggccaggtcatcgccaccatcccgaccagcagactcaagttcctcaaggaggcaggcaggctcacacagaaggaggagatcccggaggaggagctcaacgaggacgtggaggagatcgaccacgcggagcgggagctgcggcggggccagatcctgtggttccgaggcctgaatcggatccagacacagattgaagtagtcaatactttcaagagcggggcctcctttcagggggccctgcggagacagtcctcggtcaccagccagagccaggatgtagccaatctctctagccctagtcgcgtgtcgttgtccaatgctctttcctctccgaccagccttcctcctgctgcagccgggcagggctagagaaccctggacacagagttcagcaagagagagtgaaattaaaagaggttgtgagtctttaaccttgagcctgaaatgaatgtgaatcaatcccagactcttggcttccttgaagccggatccgcgtcgtgaaggcgttccgtagctctctctatgaaggtttagaaaagcctgaatctcgaacctccatccataacttcatggctcatcctgaattccggatcgaagattcccagccccacatccccctcattgatgacaccgacctggaagaagatgccgcgctcaagcagaactcgagcccgccgtcatccctcaacaagaacaacagcgccatcgacagtgggatcaacctgacgaccgacacaagcaaatcagctacctcttcaagtccagggagccccatccacagcctggagacgtcgctttagctgaggaccctctcgcctgcccgcccgccctcatggaccccgctgccacccgctttccgggcacccatccatccaggcacccaactcacccaagcagcaacgagcaacaatcggaaaccaaatactggagagaaaaccaacgtttccacccacagaccctttctctggctgcgatgctgtttgaactctttttcacttcaaggcaaggggcgggatctccactgggggcttacgggagtgagcggttttcccaaaacaagcccttcctggctcccacccagacatggaccagccatgcacccgcccagccaccacgtcccccgcatgaatgtactgtacactttcaatcctccccttgtttggtttttgggggttggggaggggtttttgtttgtttgtttgttttcttaggcgggaactgcaaacagactcttttctgagactatttatccaatccactggtctgtgagtttttgaaatgcttgcacagcatggtctcagttgtatagattaatttaataactttttgaaattgcagagcttaactcgcctagtagatttgcaccaatggaaccgaagaacttcatagacactcacaaggttatatccatttctttgtatctatatcaacgtatacttttccgagactgtatacgtccatatagataggtagatatatatatatatatataaatatatatacatggatatataaagtttctttgccggcatgttgccttgtttccgcttaaattgctctattttaacttatttatgtcctaaaagaagaatgtaatttgtttacaaacctgtagataacgtctttggctatttgtatggtttaagaacactggtggctgagatgctataaaaacagctcggcccaacagacacttcccctgggttgcatcctggatgttttatgatagccatgctctgatttttgcctgctatttccgttcaataatgtcactaccgtgagaggctcaggcagaagccaaatgctaccgagttgccatcctgaggggtttaacaacatgctccgtagacgaagggagaggaggagagaaggcttcctgggtttgcaacactaacggccatccggcccaaggatgccaggatctgcaaagcactgctcgaagacttttctctcaatgaaactcgcttgagtttactaagagcatttcaaaaataggttctctttggcactgtctgtacagagattgaggtagtgttgaaatattataaatggtattgtgttgatttttttttttatttagtaacttacaggtttgtttccttattaatggcagcatctgagctgttggcatattggatgaggatcagtatggcttgctgcttttatttttatttttgaagaagaatagcctttttctctgcactatttagatccgaatgaaccttatgatgtgtatattgagatgtactcagtgtgattttaaaccaaattgtcttcctgtagtcacaatatatactgtagccttttaacagcaagtcttgctttcccaaacagaaagccattctgaaaccctacagtatcacaggtgagaaaaggtggttattttttccccaagacaacagcactagtaatcccacttaataagagcttatttaattggatgtcagcctcttaactgctaagcactttgtgggtctcagcgtttttcataaaagaacttttgtatttaatacaaagtttgctttgagacttttcagcatatgatcttttttccataaacttgtacagtgcaaaagacattttgaataccatgatcgatgatgtcccatgcttcgaggaaaaccaaacactttccgcctctcttgcaaaatccattcctcatgctgaccctcctcacgatggctgtgtcagcccagccccttcccttctccaggcccagagaactcttccacaaacaagatgagagccactcgggaaaagagccatagtcaactgggagggcctacatctggatggcggtggaaaaacttgagggtttggggttcaaagtcagcccatcccacctggcaaaatcctcctggaaggaggaccttcaagagcgcatcacctgaatgtcgtgaagaagtatctctgaatgtatccaggagaggaactgcataaccaaaggggtgaccagccctcagatgtgcttattggattccagtacaaacgccaccaaagccagcccactgctctcctacaaggaaggaaagatctgcacgtgtaaaacatggggcagccttggaacatggtgttttttggagtttcctttctcacagttttccatctccccacttctttgatcagtcatgtgtccgtgacctcgttccatgacatcaggatagctgtgtttgcacaccatgctccatgttcattcggagccaggaggggttctcagtggagcctggcttagggaacagggagcgatggaagaatgccaacattagcgttggtcttctcttgtcaggaatgaaggatgcttgcacacatgcaccccctcactctcacacttgcacacatacacacacacacacacgaaatggttggtttgtcaaaactcactgtagtacataaagcttgcactctgcgtcctatatctagcagcatggggtacgtttggcagttcactccattagggggtaaataatttatgaccattcatctgtttttatgaatttttttatctagacaataatgtaaataaagaactcaccatctctgttcatttaatactatgcaatggttatgctttcaatcgctggctcttctgactcgtgcagtgtggttctgaaatgtttgtggtttaaaaaaaaaagcaaaaaacaacatcaaacagaacatagtaaatatatctgtaatgtatacttttttctactttgggactgcatcatccacatagcttcttttctgtcctctagacaagggctccaggagtaagtggcagatttggttctgagagctaagctcaccaacttgtctccccctcaacagatgagggaagggcagggagcccgttcagtgactcctggcgctgcagaatcactcatctttggaggtgagcagagagagctctgaggagtttccttcttgcaactcaggcggagctttctttaactcaggagcagcctccattgctcccgccaacccctcaccatggccccttgtccccttgtcccaaccatagcatagagatgacaagagagaggcagtcctatttctgagactggaccaattaaaatgactgcactggctcaaaggactctgaacctgtcttgtcctgggtcctccagttgttggaagccactcttttccccaaccatgctgaaatgccacctttaccacacactgatgtcttacatagacttagatctatttctggaacttctcttctcttcgcttacttgggtgtctcatctggcaccagccatacaattttaactattgtcaatttctaatgtcttattatgtggtgggatgagtcccttcactcttcttttacaaaatttcctagttattctctcacatctattcttccacataaactttaaattgtgcccagtcctccaccccctgtcccattcccacccccaaattctgggctctgtcattccctgtgccatcatcttccccccattgtaattactgtccactcagggctgtgaaatagactatgttctgtaaagagggacaaaaagggcatcctgatcttgagagaagcctgctgttcctcccatcatttcacctgccccctaagcccaggagttgtcatgagaggtcaccaggcccccactcaatctcagcttgggaaccaaagtcacccaccttggttgtgttggggtggacccgccatctgtccctggtccagacgagaaagaggagtctctcctaggcctggagctgggaaagaatgtgtggcccagttgtctgcacttctaattctcatcatggagaaacctttattcctatctccctttcctgaactggttttttgttgtttttgtttcattttgttttggggggatagtttcttgctctttaatttggagtctccagtacctttgggatgcaggcagttcttgcctgggccttctcggaaccctcactcccctagcccactcttgcgctacctgcaggaggctgccaacctggtgcattctgacaagcctcccacccaaatctctctcctgccattgtgtccaaaatcccaccattagaggctcttgtagggaagagcgtttcttgaaggcttttaggccttccagagccaggagggaagtcagacaatagcaggaagtccccaggccttttcaaagttccaaaccaagctctcctgattttaatgtagagatcataccaacccaggtgggggaggagggtccccagccccaggcagcagccatcaccccctccactgaaaacaatattggaggctgctttgggactgcccttctcagccccctaagtctgttttgtaatgcctgtggtgctctccctcctggacctttcctctcgggggtcaccacactttgctaactcttgtgtgcacatattttataatagagtagcgagggaatggtgccgcctccagcttccgtaagctgcccgggctctggggggctctgggacaatcggggctgggaagtgactgtgctcttattgtacactctttatttctctgtatctttggcttgtgctctttgtaattaatgggatttgtctgccttttcaacactatactgagcaataacaataaatgcacacgtggaaatgca

SEQ ID NO: 109709 - DNA, 6420 bp, Homo sapiens
  Payload ID: 1546
  Gene Symbol: ATP2B3
  Gene Name: ATPase, Ca++ transporting, plasma membrane 3
  Uniprot ID: Q16720
  ENST ID: ENST00000263519
  CDS Start-End: 127-3789
gtgtccacgcttagcagctttctcaccgccgccaaaccttgcctgggcactgggaccgtgggtggccgcctgtccctagctgtggctgagccaagattgcacttgtgagaaggcctgacaggcagcatgggcgacatggccaatagttccatcgagttccaccccaagccccagcagcagcgggatgtcccccaggctggaggctttgggtgcacgctggcggagctgcgcaccctcatggagctgcgaggggccgaggcgctgcagaagatcgaggaggcctacggggatgtcagcgggctctgccggaggctgaagacctcacccacagagggcctggcggacaacaccaatgacctggagaagcgcaggcagatctacgggcagaacttcatccccccaaagcaacccaagaccttcctgcagctggtgtgggaggccctgcaggacgtgaccctcatcatcctggaggtggctgccatcgtctctctgggcctctcgttctatgcgccgccaggagaggagagtgaagcctgtgggaatgtgtcgggaggcgcagaagatgagggcgaggccgaagctggctggatcgagggggctgccatcctgctgtccgtcatctgtgtggtgctggtcacggccttcaatgactggagcaaggagaagcagttccgaggcctgcagagccgaattgagcaggagcagaagttcacggtcatccggaacgggcagctcctccaggtccccgtggctgcgctggtggtgggggacattgcccaggtcaagtacggcgacctgctgccagccgacggcgtgctcatccaggccaatgacctcaagatcgacgagagctccctgacgggcgagtctgaccacgtgcgcaagtcagctgacaaagatcccatgctgctctcaggcactcatgtcatggaaggttctggaagaatggtggtgaccgccgttggcgtgaattcccagacaggcatcatcttcacgctgcttggagctggcggagaggaggaagagaagaaagataagaaaggcaagcagcaggatggggccatggagagtagccagaccaaagctaagaagcaggatggtgcagtggccatggagatgcagcccctgaagagcgcggagggtggggagatggaggagcgggagaagaagaaagccaacgcacccaaaaaggagaagtctgtccttcaggggaagctcacaaagctagccgtgcagatcgggaaagcagggctggtgatgtctgccatcaccgtcatcatcctggtcctctactttgtgattgagacgtttgtcgtggaaggccggacatggctggcagagtgcacgccggtctatgtacaatacttcgtgaagttcttcatcattggtgtcactgtgctggtcgtggctgtcccagagggcctgcctcttgctgtcaccatctccttagcttactctgtcaagaaaatgatgaaagacaacaacctggtgcgccacctggatgcctgcgagaccatgggcaacgccacagccatctgctccgacaagacgggcacgctcaccaccaaccgtatgaccgtggtccagtcctacctaggagacacccactacaaagagattccggcccccagcgccctgacccctaagatcctcgacctcctggtccatgccatctccatcaacagtgcctataccaccaaaatactacctcctgagaaggaaggcgccctcccacgccaggtgggcaataagacggagtgcgccctgctgggcttcgtcttggacctgaagcgggacttccagcccgtgcgcgagcagatcccggaagacaagctttacaaagtgtacaccttcaactcggtccgcaagtccatgagcacagtcatccgcatgcccgacggtggcttccgcctcttcagcaagggggcctcagagatcctcttgaaaaagtgcaccaacatcttgaacagcaatggcgaactccggggctttcggcctcgggaccgggacgacatggtgaggaagatcatcgagccgatggcttgcgatggcctccgcaccatctgcatcgcctaccgggacttctctgcaggccaggagcccgactgggacaacgagaatgaggtcgtgggtgacctcacctgcatagctgtcgtgggcattgaggaccctgtgcggcccgaggtccctgaagctatccgaaaatgccagcgtgctggcatcacagtccgcatggtgactggggacaacatcaacacggcccgggccatcgcagccaaatgcggcatcatccagcccggggaggacttcctgtgcctagaagggaaggagttcaaccggcggatccgcaatgagaaaggcgagatagaacaggagcggctggacaaggtgtggcccaagctgagggtgctggcccggtcgtctcccaccgacaagcacacactggtcaaagggattatcgacagcaccactggtgagcagcggcaggtggtggctgtgacaggggatggcaccaacgatgggccggccctcaagaaggcggacgtgggcttcgccatgggcatcgcagggaccgacgtggccaaggaggcctccgacatcatcctgaccgatgacaacttcaccagcatcgtcaaggcagtcatgtggggccgtaacgtctatgacagcatctccaagttcctgcagtttcaactgacggtcaatgtggtggctgtgatcgtggccttcacaggtgcctgcattactcaggactctcctctcaaagccgtgcagatgttgtgggtgaacttgatcatggacacatttgcctctctggccctggcgacggagccacccacagagtcgctgctgctgcggaagccgtacggccgcgacaagcccctcatctcccgcaccatgatgaagaacattctgggccacgccgtgtaccagctcgccatcatcttcaccctgctgtttgtcggggagctcttcttcgacatcgacagcgggaggaatgcgcccctgcactcgccaccctcagagcactacaccatcatcttcaacacgttcgtcatgatgcagctctttaacgagatcaacgcccgcaagatccacggcgagaggaacgtgttcgacggcatcttcagcaaccccatcttctgcaccatcgttttgggcactttcgggattcagattgtcatcgtccagtttggcgggaagcccttcagctgctccccactatccacagaacagtggctctggtgcctgtttgttggtgttggggagctggtctggggacaggtcattgccaccatccccaccagccagctcaagtgcctgaaggaagccgggcacgggcccgggaaggacgagatgaccgacgaggagctggccgaaggcgaggaagagatcgaccatgccgagcgggagctccgcaggggccagatcctctggttccggggcctgaaccggattcagacgcagatccgggtggtgaaagcgttccgtagctcgctctatgaaggcctggagaaaccagaatccaagacctccattcacaacttcatggccacgcccgagtttctgatcaatgactacacccacaacatcccgctcattgacgacacggacgtggacgagaacgaggagcgcctccgggcccccccgcccccgtcccccaaccagaacaacaacgccatagacagcggcatctacctgaccacgcatgtcaccaagtcagctacctcttcagtgttttcctccagtcccgggagcccgctccacagcgtggagacgtccctctaacaagaacttgtctcagcacatgcgcacacgcacactcggactcacacgaagtcacacgcacacatgcacgcacacacacatatggggacctgcacacctgcaaaacgagggaacaactaaggtggctgaagacctttctggcagggcatttgcaaggacccaaatccattcaacaagggtgcagcctgccacaggctcctcatccggactgaggaagacgaggacagggaggaggaaaaggaggaagaggaggacaaaaagggggaggagaaggttcttcgtccaaaggaggaaggagaagaagtagaaagtgcgaagagctgagttccccacctttttttctattgatgcttcttttttaacaaactacagttttaccgtgtgtttgccatttgagctgtgtggtgggcagggggctggtttgggtttatggggagcttttgttgcacccatgcaggggcaatcagatcagcatcttcatgcaaaaaaaaaaaaaaagttgagtgctctgcaggcctgtgaagggtgccacctgagggagccgcctgcaagcggccctgcagccacaaagcaacccgccctctgcaaaaactaggcacatccgcagtgcgcatgtgtgtgcgtgcatgcacatatgtgtatgtgtgtggatctgtacacacacacgtatatatggccagatgcgtatttcaataaggaactatttactggcatgatatttgcattcctcttatcaggcattttcatttggaaatttcattattgaatgtagcaaggttgtagttgtttttttttttttttcagggaactagactgcaagaatatctttctggtcaacccatttttgtccctcatcaccccgcccccacctttcgctcctgccctctgcccggccctactgagattcccaaggagaaggccgagagggggcgctccaggtctggagcaggtataattggagcatttgcactgagacccctgccagagaggagaaaaccctttcaagggaaattttaatctaaaaggaaaaaaccaaaatattgatgagaaggagtcctccagttagtgaaaggggagtttcgttttcagctttctttggttcctactccaattccacatccttcatcctggccatgcccccaccttcaagagcatgaagcactcttggagttgtgggtcctgcccagagtccagagagcagcctcagctgagcacaggtccgagggggcgggggcagggccaagagttcaaaagaagccaatggagggagagggagcgtcagaagcccggaggagctggtggtgggagaatgacggcagggacgcagccacagttcagaccctgtcccctcagcacctggatggactcccactgtttgctttggcaaatgccgaggagtcctcggtagaccaccttgatgtctgctgtgacatcagaggtgccaccaccaaagcactcttcccaccctagtctttgtgtccagcggccaagcttaagccatgaagtcatggatttgtggctcagcaccaggtcctgaggggagcgtatcctggcagtgtgggcacctggtggccaagcctcagtttcccccaaatgagcaaaggggataaagaggggcccgacttttgccaccctcctgaggaagcccctaggtccacacagtgatgccatgggggacccttgccttccacacttgcaggtgtcacgttttgcagggaggtgtttgggccttgggctcagccactgggagacagttgggacctgagggacagaggatcggaatggaaaccaccaacgtgcactggcaccctcagaaggcttgtctcacctccaccggcatccacacaaaaccaaacaggagcaggcgtcatccccactattcccatgaatgccatgtcacccctgagcagaagcagtcaaatcttgggcaaaagaatttcggttagaaaagaaaatcccactttaaaatgccagctgcagataactcaaagccatcccttttttctaaagggcacattgagaatgtcacccatttgtaaactgttccctgatgtccttgtttaaacgataataagaaaaagggcaactccatttgttgagggtctttgtgttcttcaatgagaaatcaaatttgagacgttgaaattggagctgcgtgctgctgcactcaccggcttcttctcactctctgtcgtagacacaccgataggaccaatggccaatagatattaaaagcaaaccctcactgctgctgtataaagttgcctaatgtaaatgtctattgtttagtccctaggtcacctttgtgctgtgctgtggagttcagaaacggggtaccatgacctggaatcttttgctcttgtttttgcagtcttcaaggctgggggccctgtctcattgggaagcccctctttataaagcattatattacttggaatggcttggtcaactgtgttcagttcataaatatgttttacatttttatctgcctgttataaagatgaacaaaaaaacttaatgagaaagatcacagatacgtaataatttaaagtctgtagttgaatttcctaacttaaagaatagaccaaaatttctgtgtataaaaaaaaatgaaaggctccttacatcctg

SEQ ID NO: 109710 - DNA, 4280 bp, Homo sapiens
  Payload ID: 1546
  Gene Symbol: ATP2B3
  Gene Name: ATPase, Ca++ transporting, plasma membrane 3
  Uniprot ID: Q16720
  ENST ID: ENST00000349466
  CDS Start-End: 327-3989
ccgccgccggtgcagagcgtggggagcactcggccgcagccctcgcccgccgcagagggtcgcgtcccgcgccgccggccaggccgccccgtgcccaggcctttccatccttggagcggatcgttgcccgcctgacgcccgcccgcagcgacagcgcccgccggagccgaggccgcggcggcggccgtgcccatgcccgggtgtccacgcttagcagctttctcaccgccgccaaaccttgcctgggcactgggaccgtgggtggccgcctgtccctagctgtggctgagccaagattgcacttgtgagaaggcctgacaggcagcatgggcgacatggccaatagttccatcgagttccaccccaagccccagcagcagcgggatgtcccccaggctggaggctttgggtgcacgctggcggagctgcgcaccctcatggagctgcgaggggccgaggcgctgcagaagatcgaggaggcctacggggatgtcagcgggctctgccggaggctgaagacctcacccacagagggcctggcggacaacaccaatgacctggagaagcgcaggcagatctacgggcagaacttcatccccccaaagcaacccaagaccttcctgcagctggtgtgggaggccctgcaggacgtgaccctcatcatcctggaggtggctgccatcgtctctctgggcctctcgttctatgcgccgccaggagaggagagtgaagcctgtgggaatgtgtcgggaggcgcagaagatgagggcgaggccgaagctggctggatcgagggggctgccatcctgctgtccgtcatctgtgtggtgctggtcacggccttcaatgactggagcaaggagaagcagttccgaggcctgcagagccgaattgagcaggagcagaagttcacggtcatccggaacgggcagctcctccaggtccccgtggctgcgctggtggtgggggacattgcccaggtcaagtacggcgacctgctgccagccgacggcgtgctcatccaggccaatgacctcaagatcgacgagagctccctgacgggcgagtctgaccacgtgcgcaagtcagctgacaaagatcccatgctgctctcaggcactcatgtcatggaaggttctggaagaatggtggtgaccgccgttggcgtgaattcccagacaggcatcatcttcacgctgcttggagctggcggagaggaggaagagaagaaagataagaaaggcaagcagcaggatggggccatggagagtagccagaccaaagctaagaagcaggatggtgcagtggccatggagatgcagcccctgaagagcgcggagggtggggagatggaggagcgggagaagaagaaagccaacgcacccaaaaaggagaagtctgtccttcaggggaagctcacaaagctagccgtgcagatcgggaaagcagggctggtgatgtctgccatcaccgtcatcatcctggtcctctactttgtgattgagacgtttgtcgtggaaggccggacatggctggcagagtgcacgccggtctatgtacaatacttcgtgaagttcttcatcattggtgtcactgtgctggtcgtggctgtcccagagggcctgcctcttgctgtcaccatctccttagcttactctgtcaagaaaatgatgaaagacaacaacctggtgcgccacctggatgcctgcgagaccatgggcaacgccacagccatctgctccgacaagacgggcacgctcaccaccaaccgtatgaccgtggtccagtcctacctaggagacacccactacaaagagattccggcccccagcgccctgacccctaagatcctcgacctcctggtccatgccatctccatcaacagtgcctataccaccaaaatactacctcctgagaaggaaggcgccctcccacgccaggtgggcaataagacggagtgcgccctgctgggcttcgtcttggacctgaagcgggacttccagcccgtgcgcgagcagatcccggaagacaagctttacaaagtgtacaccttcaactcggtccgcaagtccatgagcacagtcatccgcatgcccgacggtggcttccgcctcttcagcaagggggcctcagagatcctcttgaaaaagtgcaccaacatcttgaacagcaatggcgaactccggggctttcggcctcgggaccgggacgacatggtgaggaagatcatcgagccgatggcttgcgatggcctccgcaccatctgcatcgcctaccgggacttctctgcaggccaggagcccgactgggacaacgagaatgaggtcgtgggtgacctcacctgcatagctgtcgtgggcattgaggaccctgtgcggcccgaggtccctgaagctatccgaaaatgccagcgtgctggcatcacagtccgcatggtgactggggacaacatcaacacggcccgggccatcgcagccaaatgcggcatcatccagcccggggaggacttcctgtgcctagaagggaaggagttcaaccggcggatccgcaatgagaaaggcgagatagaacaggagcggctggacaaggtgtggcccaagctgagggtgctggcccggtcgtctcccaccgacaagcacacactggtcaaagggattatcgacagcaccactggtgagcagcggcaggtggtggctgtgacaggggatggcaccaacgatgggccggccctcaagaaggcggacgtgggcttcgccatgggcatcgcagggaccgacgtggccaaggaggcctccgacatcatcctgaccgatgacaacttcaccagcatcgtcaaggcagtcatgtggggccgtaacgtctatgacagcatctccaagttcctgcagtttcaactgacggtcaatgtggtggctgtgatcgtggccttcacaggtgcctgcattactcaggactctcctctcaaagccgtgcagatgttgtgggtgaacttgatcatggacacatttgcctctctggccctggcgacggagccacccacagagtcgctgctgctgcggaagccgtacggccgcgacaagcccctcatctcccgcaccatgatgaagaacattctgggccacgccgtgtaccagctcgccatcatcttcaccctgctgtttgtcggggagctcttcttcgacatcgacagcgggaggaatgcgcccctgcactcgccaccctcagagcactacaccatcatcttcaacacgttcgtcatgatgcagctctttaacgagatcaacgcccgcaagatccacggcgagaggaacgtgttcgacggcatcttcagcaaccccatcttctgcaccatcgttttgggcactttcgggattcagattgtcatcgtccagtttggcgggaagcccttcagctgctccccactatccacagaacagtggctctggtgcctgtttgttggtgttggggagctggtctggggacaggtcattgccaccatccccaccagccagctcaagtgcctgaaggaagccgggcacgggcccgggaaggacgagatgaccgacgaggagctggccgaaggcgaggaagagatcgaccatgccgagcgggagctccgcaggggccagatcctctggttccggggcctgaaccggattcagacgcagatccgggtggtgaaagcgttccgtagctcgctctatgaaggcctggagaaaccagaatccaagacctccattcacaacttcatggccacgcccgagtttctgatcaatgactacacccacaacatcccgctcattgacgacacggacgtggacgagaacgaggagcgcctccgggcccccccgcccccgtcccccaaccagaacaacaacgccatagacagcggcatctacctgaccacgcatgtcaccaagtcagctacctcttcagtgttttcctccagtcccgggagcccgctccacagcgtggagacgtccctctaacaagaacttgtctcagcacatgcgcacacgcacactcggactcacacgaagtcacacgcacacatgcacgcacacacacatatggggacctgcacacctgcaaaacgagggaacaactaaggtggctgaagacctttctggcagggcatttgcaaggacccaaatccattcaacaagggtgcagcctgccacaggctcctcatccggactgaggaagacgaggacagggaggaggaaaaggaggaagaggaggacaaaaagggggaggagaaggttcttcgtccaaaggag

SEQ ID NO: 109711 - DNA, 4234 bp, Homo sapiens
  Payload ID: 1546
  Gene Symbol: ATP2B3
  Gene Name: ATPase, Ca++ transporting, plasma membrane 3
  Uniprot ID: Q16720
  ENST ID: ENST00000359149
  CDS Start-End: 127-3648
gtgtccacgcttagcagctttctcaccgccgccaaaccttgcctgggcactgggaccgtgggtggccgcctgtccctagctgtggctgagccaagattgcacttgtgagaaggcctgacaggcagcatgggcgacatggccaatagttccatcgagttccaccccaagccccagcagcagcgggatgtcccccaggctggaggctttgggtgcacgctggcggagctgcgcaccctcatggagctgcgaggggccgaggcgctgcagaagatcgaggaggcctacggggatgtcagcgggctctgccggaggctgaagacctcacccacagagggcctggcggacaacaccaatgacctggagaagcgcaggcagatctacgggcagaacttcatccccccaaagcaacccaagaccttcctgcagctggtgtgggaggccctgcaggacgtgaccctcatcatcctggaggtggctgccatcgtctctctgggcctctcgttctatgcgccgccaggagaggagagtgaagcctgtgggaatgtgtcgggaggcgcagaagatgagggcgaggccgaagctggctggatcgagggggctgccatcctgctgtccgtcatctgtgtggtgctggtcacggccttcaatgactggagcaaggagaagcagttccgaggcctgcagagccgaattgagcaggagcagaagttcacggtcatccggaacgggcagctcctccaggtccccgtggctgcgctggtggtgggggacattgcccaggtcaagtacggcgacctgctgccagccgacggcgtgctcatccaggccaatgacctcaagatcgacgagagctccctgacgggcgagtctgaccacgtgcgcaagtcagctgacaaagatcccatgctgctctcaggcactcatgtcatggaaggttctggaagaatggtggtgaccgccgttggcgtgaattcccagacaggcatcatcttcacgctgcttggagctggcggagaggaggaagagaagaaagataagaaaggcaagcagcaggatggggccatggagagtagccagaccaaagctaagaagcaggatggtgcagtggccatggagatgcagcccctgaagagcgcggagggtggggagatggaggagcgggagaagaagaaagccaacgcacccaaaaaggagaagtctgtccttcaggggaagctcacaaagctagccgtgcagatcgggaaagcagggctggtgatgtctgccatcaccgtcatcatcctggtcctctactttgtgattgagacgtttgtcgtggaaggccggacatggctggcagagtgcacgccggtctatgtacaatacttcgtgaagttcttcatcattggtgtcactgtgctggtcgtggctgtcccagagggcctgcctcttgctgtcaccatctccttagcttactctgtcaagaaaatgatgaaagacaacaacctggtgcgccacctggatgcctgcgagaccatgggcaacgccacagccatctgctccgacaagacgggcacgctcaccaccaaccgtatgaccgtggtccagtcctacctaggagacacccactacaaagagattccggcccccagcgccctgacccctaagatcctcgacctcctggtccatgccatctccatcaacagtgcctataccaccaaaatactacctcctgagaaggaaggcgccctcccacgccaggtgggcaataagacggagtgcgccctgctgggcttcgtcttggacctgaagcgggacttccagcccgtgcgcgagcagatcccggaagacaagctttacaaagtgtacaccttcaactcggtccgcaagtccatgagcacagtcatccgcatgcccgacggtggcttccgcctcttcagcaagggggcctcagagatcctcttgaaaaagtgcaccaacatcttgaacagcaatggcgaactccggggctttcggcctcgggaccgggacgacatggtgaggaagatcatcgagccgatggcttgcgatggcctccgcaccatctgcatcgcctaccgggacttctctgcaggccaggagcccgactgggacaacgagaatgaggtcgtgggtgacctcacctgcatagctgtcgtgggcattgaggaccctgtgcggcccgaggtccctgaagctatccgaaaatgccagcgtgctggcatcacagtccgcatggtgactggggacaacatcaacacggcccgggccatcgcagccaaatgcggcatcatccagcccggggaggacttcctgtgcctagaagggaaggagttcaaccggcggatccgcaatgagaaaggcgagatagaacaggagcggctggacaaggtgtggcccaagctgagggtgctggcccggtcgtctcccaccgacaagcacacactggtcaaagggattatcgacagcaccactggtgagcagcggcaggtggtggctgtgacaggggatggcaccaacgatgggccggccctcaagaaggcggacgtgggcttcgccatgggcatcgcagggaccgacgtggccaaggaggcctccgacatcatcctgaccgatgacaacttcaccagcatcgtcaaggcagtcatgtggggccgtaacgtctatgacagcatctccaagttcctgcagtttcaactgacggtcaatgtggtggctgtgatcgtggccttcacaggtgcctgcattactcaggactctcctctcaaagccgtgcagatgttgtgggtgaacttgatcatggacacatttgcctctctggccctggcgacggagccacccacagagtcgctgctgctgcggaagccgtacggccgcgacaagcccctcatctcccgcaccatgatgaagaacattctgggccacgccgtgtaccagctcgccatcatcttcaccctgctgtttgtcggggagctcttcttcgacatcgacagcgggaggaatgcgcccctgcactcgccaccctcagagcactacaccatcatcttcaacacgttcgtcatgatgcagctctttaacgagatcaacgcccgcaagatccacggcgagaggaacgtgttcgacggcatcttcagcaaccccatcttctgcaccatcgttttgggcactttcgggattcagattgtcatcgtccagtttggcgggaagcccttcagctgctccccactatccacagaacagtggctctggtgcctgtttgttggtgttggggagctggtctggggacaggtcattgccaccatccccaccagccagctcaagtgcctgaaggaagccgggcacgggcccgggaaggacgagatgaccgacgaggagctggccgaaggcgaggaagagatcgaccatgccgagcgggagctccgcaggggccagatcctctggttccggggcctgaaccggattcagacgcagatggaggtagtgagtaccttcaagagaagcggttcagttcagggtgctgtgcgccggcggtcttcggtcctcagccagcttcatgacgtaaccaatctttctacccctactcacgcaattctctctgctgccaatcctaccagtgctgctgggaatccgggtggtgaaagcgttccgtagctcgctctatgaaggcctggagaaaccagaatccaagacctccattcacaacttcatggccacgcccgagtttctgatcaatgactacacccacaacatcccgctcattgacgacacggacgtggacgagaacgaggagcgcctccgggcccccccgcccccgtcccccaaccagaacaacaacgccatagacagcggcatctacctgaccacgcatgtcaccaagtcagctacctcttcagtgttttcctccagtcccgggagcccgctccacagcgtggagacgtccctctaacaagaacttgtctcagcacatgcgcacacgcacactcggactcacacgaagtcacacgcacacatgcacgcacacacacatatggggacctgcacacctgcaaaacgagggaacaactaaggtggctgaagacctttctggcagggcatttgcaaggacccaaatccattcaacaagggtgcagcctgccacaggctcctcatccggactgaggaagacgaggacagggaggaggaaaaggaggaagaggaggacaaaaagggggaggagaaggttcttcgtccaaaggag

SEQ ID NO: 109712 - DNA, 6742 bp, Homo sapiens
  Payload ID: 1546
  Gene Symbol: ATP2B3
  Gene Name: ATPase, Ca++ transporting, plasma membrane 3
  Uniprot ID: Q16720
  ENST ID: ENST00000370186
  CDS Start-End: 327-3806
ccgccgccggtgcagagcgtggggagcactcggccgcagccctcgcccgccgcagagggtcgcgtcccgcgccgccggccaggccgccccgtgcccaggcctttccatccttggagcggatcgttgcccgcctgacgcccgcccgcagcgacagcgcccgccggagccgaggccgcggcggcggccgtgcccatgcccgggtgtccacgcttagcagctttctcaccgccgccaaaccttgcctgggcactgggaccgtgggtggccgcctgtccctagctgtggctgagccaagattgcacttgtgagaaggcctgacaggcagcatgggcgacatggccaatagttccatcgagttccaccccaagccccagcagcagcgggatgtcccccaggctggaggctttgggtgcacgctggcggagctgcgcaccctcatggagctgcgaggggccgaggcgctgcagaagatcgaggaggcctacggggatgtcagcgggctctgccggaggctgaagacctcacccacagagggcctggcggacaacaccaatgacctggagaagcgcaggcagatctacgggcagaacttcatccccccaaagcaacccaagaccttcctgcagctggtgtgggaggccctgcaggacgtgaccctcatcatcctggaggtggctgccatcgtctctctgggcctctcgttctatgcgccgccaggagaggagagtgaagcctgtgggaatgtgtcgggaggcgcagaagatgagggcgaggccgaagctggctggatcgagggggctgccatcctgctgtccgtcatctgtgtggtgctggtcacggccttcaatgactggagcaaggagaagcagttccgaggcctgcagagccgaattgagcaggagcagaagttcacggtcatccggaacgggcagctcctccaggtccccgtggctgcgctggtggtgggggacattgcccaggtcaagtacggcgacctgctgccagccgacggcgtgctcatccaggccaatgacctcaagatcgacgagagctccctgacgggcgagtctgaccacgtgcgcaagtcagctgacaaagatcccatgctgctctcaggcactcatgtcatggaaggttctggaagaatggtggtgaccgccgttggcgtgaattcccagacaggcatcatcttcacgctgcttggagctggcggagaggaggaagagaagaaagataagaaagctaagaagcaggatggtgcagtggccatggagatgcagcccctgaagagcgcggagggtggggagatggaggagcgggagaagaagaaagccaacgcacccaaaaaggagaagtctgtccttcaggggaagctcacaaagctagccgtgcagatcgggaaagcagggctggtgatgtctgccatcaccgtcatcatcctggtcctctactttgtgattgagacgtttgtcgtggaaggccggacatggctggcagagtgcacgccggtctatgtacaatacttcgtgaagttcttcatcattggtgtcactgtgctggtcgtggctgtcccagagggcctgcctcttgctgtcaccatctccttagcttactctgtcaagaaaatgatgaaagacaacaacctggtgcgccacctggatgcctgcgagaccatgggcaacgccacagccatctgctccgacaagacgggcacgctcaccaccaaccgtatgaccgtggtccagtcctacctaggagacacccactacaaagagattccggcccccagcgccctgacccctaagatcctcgacctcctggtccatgccatctccatcaacagtgcctataccaccaaaatactacctcctgagaaggaaggcgccctcccacgccaggtgggcaataagacggagtgcgccctgctgggcttcgtcttggacctgaagcgggacttccagcccgtgcgcgagcagatcccggaagacaagctttacaaagtgtacaccttcaactcggtccgcaagtccatgagcacagtcatccgcatgcccgacggtggcttccgcctcttcagcaagggggcctcagagatcctcttgaaaaagtgcaccaacatcttgaacagcaatggcgaactccggggctttcggcctcgggaccgggacgacatggtgaggaagatcatcgagccgatggcttgcgatggcctccgcaccatctgcatcgcctaccgggacttctctgcaggccaggagcccgactgggacaacgagaatgaggtcgtgggtgacctcacctgcatagctgtcgtgggcattgaggaccctgtgcggcccgaggtccctgaagctatccgaaaatgccagcgtgctggcatcacagtccgcatggtgactggggacaacatcaacacggcccgggccatcgcagccaaatgcggcatcatccagcccggggaggacttcctgtgcctagaagggaaggagttcaaccggcggatccgcaatgagaaaggcgagatagaacaggagcggctggacaaggtgtggcccaagctgagggtgctggcccggtcgtctcccaccgacaagcacacactggtcaaagggattatcgacagcaccactggtgagcagcggcaggtggtggctgtgacaggggatggcaccaacgatgggccggccctcaagaaggcggacgtgggcttcgccatgggcatcgcagggaccgacgtggccaaggaggcctccgacatcatcctgaccgatgacaacttcaccagcatcgtcaaggcagtcatgtggggccgtaacgtctatgacagcatctccaagttcctgcagtttcaactgacggtcaatgtggtggctgtgatcgtggccttcacaggtgcctgcattactcaggactctcctctcaaagccgtgcagatgttgtgggtgaacttgatcatggacacatttgcctctctggccctggcgacggagccacccacagagtcgctgctgctgcggaagccgtacggccgcgacaagcccctcatctcccgcaccatgatgaagaacattctgggccacgccgtgtaccagctcgccatcatcttcaccctgctgtttgtcggggagctcttcttcgacatcgacagcgggaggaatgcgcccctgcactcgccaccctcagagcactacaccatcatcttcaacacgttcgtcatgatgcagctctttaacgagatcaacgcccgcaagatccacggcgagaggaacgtgttcgacggcatcttcagcaaccccatcttctgcaccatcgttttgggcactttcgggattcagattgtcatcgtccagtttggcgggaagcccttcagctgctccccactatccacagaacagtggctctggtgcctgtttgttggtgttggggagctggtctggggacaggtcattgccaccatccccaccagccagctcaagtgcctgaaggaagccgggcacgggcccgggaaggacgagatgaccgacgaggagctggccgaaggcgaggaagagatcgaccatgccgagcgggagctccgcaggggccagatcctctggttccggggcctgaaccggattcagacgcagatggaggtagtgagtaccttcaagagaagcggttcagttcagggtgctgtgcgccggcggtcttcggtcctcagccagcttcatgacgtaaccaatctttctacccctactcacgcaattctctctgctgccaatcctaccagtgctgctgggaatccgggtggtgaaagcgttccgtagctcgctctatgaaggcctggagaaaccagaatccaagacctccattcacaacttcatggccacgcccgagtttctgatcaatgactacacccacaacatcccgctcattgacgacacggacgtggacgagaacgaggagcgcctccgggcccccccgcccccgtcccccaaccagaacaacaacgccatagacagcggcatctacctgaccacgcatgtcaccaagtcagctacctcttcagtgttttcctccagtcccgggagcccgctccacagcgtggagacgtccctctaacaagaacttgtctcagcacatgcgcacacgcacactcggactcacacgaagtcacacgcacacatgcacgcacacacacatatggggacctgcacacctgcaaaacgagggaacaactaaggtggctgaagacctttctggcagggcatttgcaaggacccaaatccattcaacaagggtgcagcctgccacaggctcctcatccggactgaggaagacgaggacagggaggaggaaaaggaggaagaggaggacaaaaagggggaggagaaggttcttcgtccaaaggaggaaggagaagaagtagaaagtgcgaagagctgagttccccacctttttttctattgatgcttcttttttaacaaactacagttttaccgtgtgtttgccatttgagctgtgtggtgggcagggggctggtttgggtttatggggagcttttgttgcacccatgcaggggcaatcagatcagcatcttcatgcaaaaaaaaaaaaaaagttgagtgctctgcaggcctgtgaagggtgccacctgagggagccgcctgcaagcggccctgcagccacaaagcaacccgccctctgcaaaaactaggcacatccgcagtgcgcatgtgtgtgcgtgcatgcacatatgtgtatgtgtgtggatctgtacacacacacgtatatatggccagatgcgtatttcaataaggaactatttactggcatgatatttgcattcctcttatcaggcattttcatttggaaatttcattattgaatgtagcaaggttgtagttgtttttttttttttttcagggaactagactgcaagaatatctttctggtcaacccatttttgtccctcatcaccccgcccccacctttcgctcctgccctctgcccggccctactgagattcccaaggagaaggccgagagggggcgctccaggtctggagcaggtataattggagcatttgcactgagacccctgccagagaggagaaaaccctttcaagggaaattttaatctaaaaggaaaaaaccaaaatattgatgagaaggagtcctccagttagtgaaaggggagtttcgttttcagctttctttggttcctactccaattccacatccttcatcctggccatgcccccaccttcaagagcatgaagcactcttggagttgtgggtcctgcccagagtccagagagcagcctcagctgagcacaggtccgagggggcgggggcagggccaagagttcaaaagaagccaatggagggagagggagcgtcagaagcccggaggagctggtggtgggagaatgacggcagggacgcagccacagttcagaccctgtcccctcagcacctggatggactcccactgtttgctttggcaaatgccgaggagtcctcggtagaccaccttgatgtctgctgtgacatcagaggtgccaccaccaaagcactcttcccaccctagtctttgtgtccagcggccaagcttaagccatgaagtcatggatttgtggctcagcaccaggtcctgaggggagcgtatcctggcagtgtgggcacctggtggccaagcctcagtttcccccaaatgagcaaaggggataaagaggggcccgacttttgccaccctcctgaggaagcccctaggtccacacagtgatgccatgggggacccttgccttccacacttgcaggtgtcacgttttgcagggaggtgtttgggccttgggctcagccactgggagacagttgggacctgagggacagaggatcggaatggaaaccaccaacgtgcactggcaccctcagaaggcttgtctcacctccaccggcatccacacaaaaccaaacaggagcaggcgtcatccccactattcccatgaatgccatgtcacccctgagcagaagcagtcaaatcttgggcaaaagaatttcggttagaaaagaaaatcccactttaaaatgccagctgcagataactcaaagccatcccttttttctaaagggcacattgagaatgtcacccatttgtaaactgttccctgatgtccttgtttaaacgataataagaaaaagggcaactccatttgttgagggtctttgtgttcttcaatgagaaatcaaatttgagacgttgaaattggagctgcgtgctgctgcactcaccggcttcttctcactctctgtcgtagacacaccgataggaccaatggccaatagatattaaaagcaaaccctcactgctgctgtataaagttgcctaatgtaaatgtctattgtttagtccctaggtcacctttgtgctgtgctgtggagttcagaaacggggtaccatgacctggaatcttttgctcttgtttttgcagtcttcaaggctgggggccctgtctcattgggaagcccctctttataaagcattatattacttggaatggcttggtcaactgtgttcagttcataaatatgttttacatttttatctgcctgttataaagatgaacaaaaaaacttaatgagaaagatcacagatacgtaataatttaaagtctgtagttgaatttcctaacttaaagaatagaccaaaatttctgtgtataaaaaaaaatgaaaggctccttacatcctggtctgggtaa

SEQ ID NO: 109713 - DNA, 4064 bp, Homo sapiens
  Payload ID: 1546
  Gene Symbol: ATP2B3
  Gene Name: ATPase, Ca++ transporting, plasma membrane 3
  Uniprot ID: Q16720
  ENST ID: ENST00000393842
  CDS Start-End: 405-3869
cagccaacagtcgctctaaatgggccttactctaactgatggatcctgtctgccctatagcctgttgcattcatgaagacagtgagggttagcagagcaccccgaccccaccctgtcctccaggatggagactccacctcccaggactccaagttcctcccctgtgggccaggcccccattcactcattcctccaggcccccggccacatgcgggactgaccacgcggtagacttcctgccgactccataccacgtgtctcaaagagcttagggcccagtgtccacgcttagcagctttctcaccgccgccaaaccttgcctgggcactgggaccgtgggtggccgcctgtccctagctgtggctgagccaagattgcacttgtgagaaggcctgacaggcagcatgggcgacatggccaatagttccatcgagttccaccccaagccccagcagcagcgggatgtcccccaggctggaggctttgggtgcacgctggcggagctgcgcaccctcatggagctgcgaggggccgaggcgctgcagaagatcgaggaggcctacggggatgtcagcgggctctgccggaggctgaagacctcacccacagagggcctggcggacaacaccaatgacctggagaagcgcaggcagatctacgggcagaacttcatccccccaaagcaacccaagaccttcctgcagctggtgtgggaggccctgcaggacgtgaccctcatcatcctggaggtggctgccatcgtctctctgggcctctcgttctatgcgccgccaggagaggagagtgaagcctgtgggaatgtgtcgggaggcgcagaagatgagggcgaggccgaagctggctggatcgagggggctgccatcctgctgtccgtcatctgtgtggtgctggtcacggccttcaatgactggagcaaggagaagcagttccgaggcctgcagagccgaattgagcaggagcagaagttcacggtcatccggaacgggcagctcctccaggtccccgtggctgcgctggtggtgggggacattgcccaggtcaagtacggcgacctgctgccagccgacggcgtgctcatccaggccaatgacctcaagatcgacgagagctccctgacgggcgagtctgaccacgtgcgcaagtcagctgacaaagatcccatgctgctctcaggcactcatgtcatggaaggttctggaagaatggtggtgaccgccgttggcgtgaattcccagacaggcatcatcttcacgctgcttggagctggcggagaggaggaagagaagaaagataagaaagctaagaagcaggatggtgcagtggccatggagatgcagcccctgaagagcgcggagggtggggagatggaggagcgggagaagaagaaagccaacgcacccaaaaaggagaagtctgtccttcaggggaagctcacaaagctagccgtgcagatcgggaaagcagggctggtgatgtctgccatcaccgtcatcatcctggtcctctactttgtgattgagacgtttgtcgtggaaggccggacatggctggcagagtgcacgccggtctatgtacaatacttcgtgaagttcttcatcattggtgtcactgtgctggtcgtggctgtcccagagggcctgcctcttgctgtcaccatctccttagcttactctgtcaagaaaatgatgaaagacaacaacctggtgcgccacctggatgcctgcgagaccatgggcaacgccacagccatctgctccgacaagacgggcacgctcaccaccaaccgtatgaccgtggtccagtcctacctaggagacacccactacaaagagattccggcccccagcgccctgacccctaagatcctcgacctcctggtccatgccatctccatcaacagtgcctataccaccaaaatactacctcctgagaaggaaggcgccctcccacgccaggtgggcaataagacggagtgcgccctgctgggcttcgtcttggacctgaagcgggacttccagcccgtgcgcgagcagatcccggaagacaagctttacaaagtgtacaccttcaactcggtccgcaagtccatgagcacagtcatccgcatgcccgacggtggcttccgcctcttcagcaagggggcctcagagatcctcttgaaaaagtgcaccaacatcttgaacagcaatggcgaactccggggctttcggcctcgggaccgggacgacatggtgaggaagatcatcgagccgatggcttgcgatggcctccgcaccatctgcatcgcctaccgggacttctctgcaggccaggagcccgactgggacaacgagaatgaggtcgtgggtgacctcacctgcatagctgtcgtgggcattgaggaccctgtgcggcccgaggtccctgaagctatccgaaaatgccagcgtgctggcatcacagtccgcatggtgactggggacaacatcaacacggcccgggccatcgcagccaaatgcggcatcatccagcccggggaggacttcctgtgcctagaagggaaggagttcaaccggcggatccgcaatgagaaaggcgagatagaacaggagcggctggacaaggtgtggcccaagctgagggtgctggcccggtcgtctcccaccgacaagcacacactggtcaaagggattatcgacagcaccactggtgagcagcggcaggtggtggctgtgacaggggatggcaccaacgatgggccggccctcaagaaggcggacgtgggcttcgccatgggcatcgcagggaccgacgtggccaaggaggcctccgacatcatcctgaccgatgacaacttcaccagcatcgtcaaggcagtcatgtggggccgtaacgtctatgacagcatctccaagttcctgcagtttcaactgacggtcaatgtggtggctgtgatcgtggccttcacaggtgcctgcattactcaggactctcctctcaaagccgtgcagatgttgtgggtgaacttgatcatggacacatttgcctctctggccctggcgacggagccacccacagagtcgctgctgctgcggaagccgtacggccgcgacaagcccctcatctcccgcaccatgatgaagaacattctgggccacgccgtgtaccagctcgccatcatcttcaccctgctgtttgtcggggagctcttcttcgacatcgacagcgggaggaatgcgcccctgcactcgccaccctcagagcactacaccatcatcttcaacacgttcgtcatgatgcagctctttaacgagatcaacgcccgcaagatccacggcgagaggaacgtgttcgacggcatcttcagcaaccccatcttctgcaccatcgttttgggcactttcgggattcagattgtcatcgtccagtttggcgggaagcccttcagctgctccccactatccacagaacagtggctctggtgcctgtttgttggtgttggggagctggtctggggacaggtcattgccaccatccccaccagccagctcaagtgcctgaaggaagccgggcacgggcccgggaaggacgagatgaccgacgaggagctggccgaaggcgaggaagagatcgaccatgccgagcgggagctccgcaggggccagatcctctggttccggggcctgaaccggattcagacgcagatggaggtagtgagtaccttcaagagaagcggttcagttcagggtgctgtgcgccggcggtcttcggtcctcagccagcttcatgacgtaaccaatctttctacccctactcacgcaattctctctgctgccaatcctaccagtgctgctgggagtgagtcttgacttcccttttctctcataaatggcatctctggggaagaataagcctccccagctcggccttctctcttttgcagtcttgcattccgctcaccgtggcttttctgttctttctttaccgccctgtccagtccttcccgcccagacggtgtctctcgaaagccatattcttttatgaaacgtattcaacccatggca

SEQ ID NO: 109714 - DNA, 4658 bp, Homo sapiens
  Payload ID: 1547
  Gene Symbol: ATP2B4
  Gene Name: ATPase, Ca++ transporting, plasma membrane 4
  Uniprot ID: P23634
  ENST ID: ENST00000341360
  CDS Start-End: 398-3910
gctggttgttgctaaggttgctgccatggtaacatgcacatcctgtttacaccttcatctgggcaagttggtctaagctaggaacctacctaccctggacaactactatcatcaccacctggggacaccaatcatcgtgacacggagtccaccttccactcagttcccccatcctcttcctcctctcgctgccagacttcatacggaagaaaggatctagacttcggacggctactcgggagcttattgcacaagatatattcaatctattccctcactgggcccccagagaagcaagaagtaggaagaagttgagacagggaggcaggagacactggtcagttgaagggaaacgctacatcttctctggttgaggggcttggtaacagcaggcaaaatgacgaacccatcagaccgtgtcttgcctgccaactcgatggccgagagccgtgaaggggactttggctgcacagtaatggaactgaggaagctcatggagctgcgttcaagggatgcactgacccagattaatgtccactatggaggtgtacagaatctctgcagtagactgaaaacctcccctgtggaaggtctgtctgggaaccctgcagatctggagaaacgtaggcaggtgtttggacacaacgtgatcccccccaaaaagcccaagactttcttagaattagtgtgggaagctcttcaagatgtcacgcttatcatcctggagattgcagccatcatctccctggtcctgtccttttatcgccctgctggtgaagaaaatgaactgtgtggtcaagtcgcaactaccccagaagatgaaaatgaggcacaagctggctggattgagggggcagccatccttttctcagtgatcatcgtggtgttagtgactgcctttaatgattggagcaaagagaagcaattccgggggctgcagtgccgcattgaacaggagcaaaagttctccatcatccgaaacggtcaactcatccagctccctgtggctgagattgtggttggtgatattgcccaagtcaaatacggtgatctgctgcctgcagatggaatcctgatccaagggaatgatctgaagattgatgagagctctctgacaggggaatctgaccatgtcaagaagtccctggacaaagaccccatgttgctctcagggacccatgtcatggaaggttctggccggatggtggtgacagctgttggtgtcaactctcagactggaatcatccttactctcttgggggtcaatgaggatgacgaaggggagaaaaagaagaaaggtaaaaaacaaggagtccctgaaaatcgcaacaaagcaaagacccaagacggagtggccctggaaatccagccactcaacagccaggagggaatcgacaatgaggaaaaggacaagaaggcagtcaaggtgcctaaaaaggagaagtcagtgctgcagggcaagctgactcgcctggctgttcagattgggaaagccggtctgctcatgtctgctctcacggttttcatcctgattctatactttgtgattgacaactttgtgataaatcgcagaccatggctccctgagtgtactcccatctacatccagtactttgtcaagttcttcatcatcggcatcactgtactggtggtggctgtgccagaggggctgcctctggctgtcaccatctcactggcctactctgtgaagaaaatgatgaaagacaataacctagtacggcacttggatgcttgtgagaccatgggcaacgccaccgccatctgctctgataagacaggcacgttgaccatgaaccgcatgactgtggtacaagcttatattgggggcatccattaccgtcaaatcccaagccctgatgtcttcctgcccaaagtcctggacctcattgtcaatggcatttctatcaacagtgcttatacctccaagattctgcctccagagaaggagggaggcctgcctcggcaggtgggcaacaagaccgagtgtgctctgctaggctttgtcacagatctgaagcaggattatcaggctgtgcgtaatgaagtgcccgaggagaagctctacaaggtgtacacctttaactcagtgcgcaagtcaatgagcaccgtcatcaggaatcccaacggtggcttccgtatgtacagcaagggcgcctctgagatcatcttgcgcaagtgtaatcgaatcctggaccggaaaggggaagcagtgccattcaagaataaagacagagatgatatggtacgcactgtcatcgagcccatggcctgtgatggactccggactatctgcatagcttaccgggacttcgatgacacagagccctcttgggacaatgagaatgagatcctcaccgaactgacctgtatcgcggtggtgggcattgaggaccctgtgcgcccagaggtgccagatgctattgccaaatgcaaacaagctggcattactgtcagaatggtgacaggtgacaacatcaacacagcccgggccattgccaccaaatgtggcattctgacacctggggatgacttcctgtgcttagaaggcaaagaattcaaccggctcatccgcaacgagaaaggcgaggtagagcaagaaaagctggacaagatctggcctaagcttcgggtcctggcgcgatcttctcccactgacaagcacaccctggtgaaaggcataattgacagcactgttggggaacaccggcaggtcgtggctgtcactggtgatggcacaaatgacgggcctgctctgaagaaagcggatgttggttttgccatgggcatcgcaggcacagatgtagcaaaggaggcttcagacatcatcctaacagatgacaacttcaccagcattgtgaaggcagtgatgtggggacgaaatgtctatgacagcatctccaagttcctgcagttccagctcactgtcaatgtggtggccgtgattgtagccttcactggagcctgtatcactcaggattccccattgaaagctgtgcagatgttgtgggttaatctgatcatggacacttttgcttcattggccctggccacagagccccctacggaatctctgttgaagcggcgcccctatggccgaaataagcctctgatctcacgcactatgatgaagaacatcttgggccatgcattctatcagctcattgtcatctttatccttgtctttgcgggtgagaaattctttgatattgatagtgggaggaaggcacctctacattcaccacccagccagcactataccattgtttttaacaccttcgtgctgatgcagctcttcaatgaaatcaactcccgaaagatccatggagagaagaacgtcttttcaggcatctaccgcaacattatcttctgctctgtagtcttgggcacattcatctgccagattttcatcgtggaatttgggggtaaacccttcagttgtacaagcctcagcctgtctcagtggctgtggtgtctcttcattgggattggagaacttctgtggggccagttcatctccgcaatacctacccgatccctgaagttcctgaaggaggctgggcatggcaccaccaaagaggagatcaccaaggatgccgagggactggatgagattgaccatgctgagatggagctgcgccgaggccagatcctctggttccggggcctgaaccgtatccagactcagatcgacgtaattaacacattccagacgggagcctcttttaagggagtcctaaggcgacagaacatgggtcaacaccttgatgtaaaacttgttcctagttcatcctatgtagcagttgcaccagtcaaatcttcccccaccacttctgttcctgctgtttcatctcctcctatgggcaatcaaagtggtcaaagcgttccatagttccctccacgaaagcattcagaaaccctacaaccaaaagtccatccacagcttcatgacccaccctgaattcgccatagaggaggagttgccacgaacaccactcctggatgaggaagaggaggaaaatcctgacaaggcttctaagtttgggactagggtgctcctgttggatggtgaggtcactccatatgccaatacaaacaacaatgcggtggattgcaaccaagtgcagctcccccagtcggacagctctctacagagcctagagacatcagtttgaattttctttctctgactctcatccctattttacctatttccattttcgtctatcccatctatgaggtgatgatgggacttttcattgtcacgtcagctgctgtgttaacagcagtgtgtgtgaagtgaacctctacctgaccatgaagaggcaagagcacagacttacaaggatttcaacttaagcttgacttggggtttgtagcgggacccagtcaaaccccattcaggtcatggtagaatctactccttggtagtcacttgtcatttttaaagaaatgatgacaatcctcttggcatcaccccaccccacattctccccgatgttcctctcctgaattctggattttgtcctacaagtctgtgccatttataagctaagttgagggttcagagggagacaaatatccccaagtgaaatatgttgcggtagagatggaatgtataaaatccgccagtagtgtga

SEQ ID NO: 109715 - DNA, 613 bp, Homo sapiens
  Payload ID: 1547
  Gene Symbol: ATP2B4
  Gene Name: ATPase, Ca++ transporting, plasma membrane 4
  ENST ID: ENST00000356729
  CDS Start-End: 1-389
ggattggagaacttctgtggggccagttcatctccgcaatacctacccgatccctgaagttcctgaaggaggctgggcatggcaccaccaaagaggagatcaccaaggatgccgagggactggatgagattgaccatgctgagatggagctgcgccgaggccagatcctctggttccggggcctgaaccgtatccagactcagatcgacgtaattaacacattccagacgggagcctcttttaagggagtcctaaggcgacagaacatgggtcaacaccttgatgtaaaacttgttcctagttcatcctatgtagcagttgcaccagtcaaatcttcccccaccacttctgttcctgctgtttcatctcctcctatgggcagtgagtgatagtctattatgatgcatgatttgctaaaatgaccacaagagagcacgtggcatccactttaaccaaccatggttatcttttccttttggtttttccctttgatattttgacttaagggaagaaaaagacaaaaatcctactctaaaaccagactgtgtgcccttgtattttatttttgtaatgtagaaaagctattaaaccttaactgttttaaagacaataa

SEQ ID NO: 109716 - DNA, 8968 bp, Homo sapiens
  Payload ID: 1547
  Gene Symbol: ATP2B4
  Gene Name: ATPase, Ca++ transporting, plasma membrane 4
  Uniprot ID: P23634
  ENST ID: ENST00000357681
  CDS Start-End: 1124-4741
caccctcacccctcctccacccctactcagctttctattcaacaagtgagagcaagggcggggaagaaagccgacaggggagaggattgcttccctttcttttcccattcccccttaagacgaaccaggaagtaaccgcaagaatcgggccaccttaacagtagagtaatggtttggcctcgcgccaagtcccacctctgttccagctcctgctcctcccctctctcttcccgcactgcttggggagagctggtgagcaagagtctggcccgagttagctagagctgttgccatgacaagcattttcttaagaaagctctgctgttgagatcgtccaaagctgggggctgggagggggggcacgaacttcgtggggcaccatccctccgaagagagcaagatcagagacacccgcccagctctcctgcaccctttttctttcaggaacctgagaggtccttcccattggaggggcagggggaggagacccagcccactccccggccttagccagaaaggcaagagagcaaagccagcgtctctagcttggttgccacactggggagactggtgggtggtcaccccaccctaccctcatccatggaaacccggagggagagtcccgcctgaagaaacctggatctttgctagaaagagagagatccagttgtcatcggtatccaggaagctctcctcttcctcctcctgacgtctactactacagttgctggttgttgctaaggttgctgccatggtaacatgcacatcctgtttacaccttcatctgggcaagttggtctaagctaggaacctacctaccctggacaactactatcatcaccacctggggacaccaatcatcgtgacacggagtccaccttccactcagttcccccatcctcttcctcctctcgctgccagacttcatacggaagaaaggatctagacttcggacggctactcgggagcttattgcacaagatatattcaatctattccctcactgggcccccagagaagcaagaagtaggaagaagttgagacagggaggcaggagacactggtcagttgaagggaaacgctacatcttctctggttgaggggcttggtaacagcaggcaaaatgacgaacccatcagaccgtgtcttgcctgccaactcgatggccgagagccgtgaaggggactttggctgcacagtaatggaactgaggaagctcatggagctgcgttcaagggatgcactgacccagattaatgtccactatggaggtgtacagaatctctgcagtagactgaaaacctcccctgtggaaggtctgtctgggaaccctgcagatctggagaaacgtaggcaggtgtttggacacaacgtgatcccccccaaaaagcccaagactttcttagaattagtgtgggaagctcttcaagatgtcacgcttatcatcctggagattgcagccatcatctccctggtcctgtccttttatcgccctgctggtgaagaaaatgaactgtgtggtcaagtcgcaactaccccagaagatgaaaatgaggcacaagctggctggattgagggggcagccatccttttctcagtgatcatcgtggtgttagtgactgcctttaatgattggagcaaagagaagcaattccgggggctgcagtgccgcattgaacaggagcaaaagttctccatcatccgaaacggtcaactcatccagctccctgtggctgagattgtggttggtgatattgcccaagtcaaatacggtgatctgctgcctgcagatggaatcctgatccaagggaatgatctgaagattgatgagagctctctgacaggggaatctgaccatgtcaagaagtccctggacaaagaccccatgttgctctcagggacccatgtcatggaaggttctggccggatggtggtgacagctgttggtgtcaactctcagactggaatcatccttactctcttgggggtcaatgaggatgacgaaggggagaaaaagaagaaaggtaaaaaacaaggagtccctgaaaatcgcaacaaagcaaagacccaagacggagtggccctggaaatccagccactcaacagccaggagggaatcgacaatgaggaaaaggacaagaaggcagtcaaggtgcctaaaaaggagaagtcagtgctgcagggcaagctgactcgcctggctgttcagattgggaaagccggtctgctcatgtctgctctcacggttttcatcctgattctatactttgtgattgacaactttgtgataaatcgcagaccatggctccctgagtgtactcccatctacatccagtactttgtcaagttcttcatcatcggcatcactgtactggtggtggctgtgccagaggggctgcctctggctgtcaccatctcactggcctactctgtgaagaaaatgatgaaagacaataacctagtacggcacttggatgcttgtgagaccatgggcaacgccaccgccatctgctctgataagacaggcacgttgaccatgaaccgcatgactgtggtacaagcttatattgggggcatccattaccgtcaaatcccaagccctgatgtcttcctgcccaaagtcctggacctcattgtcaatggcatttctatcaacagtgcttatacctccaagattctgcctccagagaaggagggaggcctgcctcggcaggtgggcaacaagaccgagtgtgctctgctaggctttgtcacagatctgaagcaggattatcaggctgtgcgtaatgaagtgcccgaggagaagctctacaaggtgtacacctttaactcagtgcgcaagtcaatgagcaccgtcatcaggaatcccaacggtggcttccgtatgtacagcaagggcgcctctgagatcatcttgcgcaagtgtaatcgaatcctggaccggaaaggggaagcagtgccattcaagaataaagacagagatgatatggtacgcactgtcatcgagcccatggcctgtgatggactccggactatctgcatagcttaccgggacttcgatgacacagagccctcttgggacaatgagaatgagatcctcaccgaactgacctgtatcgcggtggtgggcattgaggaccctgtgcgcccagaggtgccagatgctattgccaaatgcaaacaagctggcattactgtcagaatggtgacaggtgacaacatcaacacagcccgggccattgccaccaaatgtggcattctgacacctggggatgacttcctgtgcttagaaggcaaagaattcaaccggctcatccgcaacgagaaaggcgaggtagagcaagaaaagctggacaagatctggcctaagcttcgggtcctggcgcgatcttctcccactgacaagcacaccctggtgaaaggcataattgacagcactgttggggaacaccggcaggtcgtggctgtcactggtgatggcacaaatgacgggcctgctctgaagaaagcggatgttggttttgccatgggcatcgcaggcacagatgtagcaaaggaggcttcagacatcatcctaacagatgacaacttcaccagcattgtgaaggcagtgatgtggggacgaaatgtctatgacagcatctccaagttcctgcagttccagctcactgtcaatgtggtggccgtgattgtagccttcactggagcctgtatcactcaggattccccattgaaagctgtgcagatgttgtgggttaatctgatcatggacacttttgcttcattggccctggccacagagccccctacggaatctctgttgaagcggcgcccctatggccgaaataagcctctgatctcacgcactatgatgaagaacatcttgggccatgcattctatcagctcattgtcatctttatccttgtctttgcgggtgagaaattctttgatattgatagtgggaggaaggcacctctacattcaccacccagccagcactataccattgtttttaacaccttcgtgctgatgcagctcttcaatgaaatcaactcccgaaagatccatggagagaagaacgtcttttcaggcatctaccgcaacattatcttctgctctgtagtcttgggcacattcatctgccagattttcatcgtggaatttgggggtaaacccttcagttgtacaagcctcagcctgtctcagtggctgtggtgtctcttcattgggattggagaacttctgtggggccagttcatctccgcaatacctacccgatccctgaagttcctgaaggaggctgggcatggcaccaccaaagaggagatcaccaaggatgccgagggactggatgagattgaccatgctgagatggagctgcgccgaggccagatcctctggttccggggcctgaaccgtatccagactcagatcaaagtggtcaaagcgttccatagttccctccacgaaagcattcagaaaccctacaaccaaaagtccatccacagcttcatgacccaccctgaattcgccatagaggaggagttgccacgaacaccactcctggatgaggaagaggaggaaaatcctgacaaggcttctaagtttgggactagggtgctcctgttggatggtgaggtcactccatatgccaatacaaacaacaatgcggtggattgcaaccaagtgcagctcccccagtcggacagctctctacagagcctagagacatcagtttgaattttctttctctgactctcatccctattttacctatttccattttcgtctatcccatctatgaggtgatgatgggacttttcattgtcacgtcagctgctgtgttaacagcagtgtgtgtgaagtgaacctctacctgaccatgaagaggcaagagcacagacttacaaggatttcaacttaagcttgacttggggtttgtagcgggacccagtcaaaccccattcaggtcatggtagaatctactccttggtagtcacttgtcatttttaaagaaatgatgacaatcctcttggcatcaccccaccccacattctccccgatgttcctctcctgaattctggattttgtcctacaagtctgtgccatttataagctaagttgagggttcagagggagacaaatatccccaagtgaaatatgttgcggtagagatggaatgtataaaatccgccagtagtgtgattgtttttcaatttttcccactttgaaaacttacacctaaaggcctgtaggcctctaactctttctgccctttcattcaaacctctccaaagttctttgtcttttgtcttcccttcctttccttttttttttttttttttatgatgattaagaaaatggaaaggatatggatgaattgtgtaaacttagatccttctcccttttggcccaaaagaacccttgatttagttccagaatccaaccagtttctttgttaaaagggtccttttgaagcaattaagtgctggtaagaatatttctctgttgttgccaggttaccttctgcttttaaattgccatcttgtaaagtgtatgtggttcttaagtgccagggagatcagccttgcccatgaaggttgcatatgtgtggtatacagtttttacctgaaagcctgagctttctcttattcctaaagtggtggcaaaagaatgaactgggtatgaccctgcccccttactgggcttggatattgaggaccagacgctgccaaatctaggacaagacagaccatcaaagcagacttttgtgggctcctctttggggtgaccactgctttcaaagccatctgccaaggctctccagggcaggacctgactggtggggaatgagtgttcagaagccttgggagaggccaaagagccattctagcatgatctgagaaaaccttcctgcagaggccagaaaccttgagcttaggtgcctggggaccagcttcgacattctctccagtttctgattctaatttttgccacgtgtcacaacttttccagtctctgagaaggtcccagcctttctcaaatattctgattttgaaaatatgtatccaaagtgggaggcccctgtgacattttgccaacttaaacgagaaaaagaccccccgcacccggcacactcccccttcctccagccccgcttcagccacatgctccagctgctgcccagtaaagccctgtgcctttttttcccctgaatactgcccaaagcatccccttcccatctgcctctcaggagttggggactttgctaggagattttttaagtgttccttactgggacaacgtggagccacgtttgcaggagctccatttgtatccctgctggtgttgacttctgtgtaggggccagttcatgtccctgactctcacctcccattagataaatgaagcccacccccctttctagagtgatgagagtcaagaagaggggatgtatgaacggccaaattcccatgtgagaggaagatgacctgatccacctagccttttcttctggatctgtcctccctcacccctttcacctgagctgtccacagtaggaaacataaagaaacaatgtcccctacatatccccatgactacataatccatcatcgtaggaaataggaaagcaaatttgattttggttttgtaaaacgtacatgcttcaataattcttttttgtgtcttaaatactcataggggaaaaaaacagctcacccaaggtgttaggtttcacatatatattcatcaactattttagaagatttaattctatcaaatcttgtattacctcagatcattttaaatagcaagccaataacgagctttgaaggctattttaccattcctgttcacaaaaggttctcatggtgcctgacaggttacccttgagggcttgtgtctactttttaaaagtcaatggttttttttcttgtgttctagtttccataataggagagaaaatatagaaatatatgcaaaaattatagttttctttagatcagaaactgatatttttgggtcagccatatgtattttgtttaaaggatttaaaataaagtgccgtcatgtagccctgtggaagggagcacataaccagctgtttggcatgacaggtgacttagtatatttgtaattggttttaaaaccaatacaccatactttctttctgcaaacagccatctttatacttagggaagaaaaattgttgggttctagacttttttaatataaattttgttgatatggaattaggtaagtttaagtgtctatgtgcatatgttttttatataagttttttctattcagtttcactgatccaactggcagtgggtaaatatggcataagttaataacacttttccccaaaatggtgctttggatttgaaaagggtctgatggggagaaggagaacgtatcatcctagcttcctctcttaataaacctagaaaaacgggtagtaaactgtggatagtcaggaaaacacccagcaagggacacagctgtcaggaaatgaatcttccccccaacccccaccatgcagatggatagacagaatctttcctgactagtcattaggatcaggggcctctgttggatttgtgtttcttgaagaatagctggcagagtggtataaaagacacgaatatctcctggtctataaggatactctgatttggggtttgcatttttcatggtttttatttcctgttccccctggagttttccattagtgagtttttgtgcaaggatcttatttgtgatgccttccctcccctagaaagattttgtgcaatatattaaatggggacagaattctaaatggataaaacaatggctggttctagccctgagtgacagtcttaaggctagatccttcccatagtatcatctgtcctctggaatgactctcctgtccctaaaggggttaagagagagatcacctagaaatccctctggacacttgtgggttctttagggtttgagtttcttcttccccttgagcttcagagaggagagttggcatggttaaatctgaatggttacctcactgctgaaaacccagaggggcgtggcacactcgcttgtgtggaaaagcctctaaatgcatcccttcctttctttcctgcttcctttgccttacaattgaagcagcccgtggtaccatcacagtatgcagagacttcctcacctttcatatctagggaccacccccgatgcattggtgagggtgggcacttataaatgcctgctattgttaagccattccagcctcttcctctgaatagaccagacgccctttcacttagttcagtgccagtccttttgccttcccaaccctgctgttaggcctgctgttccctttgctcttgattaggagagatggaaggagatgagctcccataactgaattggcctttggttcatgttttctccccatatgtatatatgccatatgtgaatatgccatatatatgtgccaacaaatctatctacgttgttcttttcaaattagcacgcagataggaattttgagtttcttcttcttttagtaactagtataacaagcactggtatttttgtacaaaaaagaaaaacaaaagattgactattgtggtctgcatgacataaacaaacaaatggtgatatcaaagcaacgtataccccagtccagtgtgtgttgccataatttgcaattcagcttaacagtgcacccaatctatatttgcattttgatattatttaagctctatgtacaaggttttgcatgtatttatatggttcttagggaaaaaaaatgctataaactgcaaatctgaaattcaaatgtgttgttccactgagaccagaagaagaagaggagttttaaaagggataatttgttggagccaataaagctttttgctgatgaacagaaaccaatactgctgtgcactgagaataaaaactcatgcccacttgtaa

SEQ ID NO: 109717 - DNA, 8918 bp, Homo sapiens
  Payload ID: 1547
  Gene Symbol: ATP2B4
  Gene Name: ATPase, Ca++ transporting, plasma membrane 4
  Uniprot ID: P23634
  ENST ID: ENST00000367218
  CDS Start-End: 898-4410
cttcccgcactgcttggggagagctggtgagcaagagtctggcccgagttagctagagctgttgccatgacaagcattttcttaagaaagctctgctgttgagatcgtccaaagctgggggctgggagggggggcacgaacttcgtggggcaccatccctccgaagagagcaagatcagagacacccgcccagctctcctgcaccctttttctttcaggaacctgagaggtccttcccattggaggggcagggggaggagacccagcccactccccggccttagccagaaaggcaagagagcaaagccagcgtctctagcttggttgccacactggggagactggtgggtggtcaccccaccctaccctcatccatggaaacccggagggagagtcccgcctgaagaaacctggatctttgctagaaagagagagatccagttgtcatcggtatccaggaagctctcctcttcctcctcctgacgtctactactacagttgctggttgttgctaaggttgctgccatggtaacatgcacatcctgtttacaccttcatctgggcaagttggtctaagctaggaacctacctaccctggacaactactatcatcaccacctggggacaccaatcatcgtgacacggagtccaccttccactcagttcccccatcctcttcctcctctcgctgccagacttcatacggaagaaaggatctagacttcggacggctactcgggagcttattgcacaagatatattcaatctattccctcactgggcccccagagaagcaagaagtaggaagaagttgagacagggaggcaggagacactggtcagttgaagggaaacgctacatcttctctggttgaggggcttggtaacagcaggcaaaatgacgaacccatcagaccgtgtcttgcctgccaactcgatggccgagagccgtgaaggggactttggctgcacagtaatggaactgaggaagctcatggagctgcgttcaagggatgcactgacccagattaatgtccactatggaggtgtacagaatctctgcagtagactgaaaacctcccctgtggaaggtctgtctgggaaccctgcagatctggagaaacgtaggcaggtgtttggacacaacgtgatcccccccaaaaagcccaagactttcttagaattagtgtgggaagctcttcaagatgtcacgcttatcatcctggagattgcagccatcatctccctggtcctgtccttttatcgccctgctggtgaagaaaatgaactgtgtggtcaagtcgcaactaccccagaagatgaaaatgaggcacaagctggctggattgagggggcagccatccttttctcagtgatcatcgtggtgttagtgactgcctttaatgattggagcaaagagaagcaattccgggggctgcagtgccgcattgaacaggagcaaaagttctccatcatccgaaacggtcaactcatccagctccctgtggctgagattgtggttggtgatattgcccaagtcaaatacggtgatctgctgcctgcagatggaatcctgatccaagggaatgatctgaagattgatgagagctctctgacaggggaatctgaccatgtcaagaagtccctggacaaagaccccatgttgctctcagggacccatgtcatggaaggttctggccggatggtggtgacagctgttggtgtcaactctcagactggaatcatccttactctcttgggggtcaatgaggatgacgaaggggagaaaaagaagaaaggtaaaaaacaaggagtccctgaaaatcgcaacaaagcaaagacccaagacggagtggccctggaaatccagccactcaacagccaggagggaatcgacaatgaggaaaaggacaagaaggcagtcaaggtgcctaaaaaggagaagtcagtgctgcagggcaagctgactcgcctggctgttcagattgggaaagccggtctgctcatgtctgctctcacggttttcatcctgattctatactttgtgattgacaactttgtgataaatcgcagaccatggctccctgagtgtactcccatctacatccagtactttgtcaagttcttcatcatcggcatcactgtactggtggtggctgtgccagaggggctgcctctggctgtcaccatctcactggcctactctgtgaagaaaatgatgaaagacaataacctagtacggcacttggatgcttgtgagaccatgggcaacgccaccgccatctgctctgataagacaggcacgttgaccatgaaccgcatgactgtggtacaagcttatattgggggcatccattaccgtcaaatcccaagccctgatgtcttcctgcccaaagtcctggacctcattgtcaatggcatttctatcaacagtgcttatacctccaagattctgcctccagagaaggagggaggcctgcctcggcaggtgggcaacaagaccgagtgtgctctgctaggctttgtcacagatctgaagcaggattatcaggctgtgcgtaatgaagtgcccgaggagaagctctacaaggtgtacacctttaactcagtgcgcaagtcaatgagcaccgtcatcaggaatcccaacggtggcttccgtatgtacagcaagggcgcctctgagatcatcttgcgcaagtgtaatcgaatcctggaccggaaaggggaagcagtgccattcaagaataaagacagagatgatatggtacgcactgtcatcgagcccatggcctgtgatggactccggactatctgcatagcttaccgggacttcgatgacacagagccctcttgggacaatgagaatgagatcctcaccgaactgacctgtatcgcggtggtgggcattgaggaccctgtgcgcccagaggtgccagatgctattgccaaatgcaaacaagctggcattactgtcagaatggtgacaggtgacaacatcaacacagcccgggccattgccaccaaatgtggcattctgacacctggggatgacttcctgtgcttagaaggcaaagaattcaaccggctcatccgcaacgagaaaggcgaggtagagcaagaaaagctggacaagatctggcctaagcttcgggtcctggcgcgatcttctcccactgacaagcacaccctggtgaaaggcataattgacagcactgttggggaacaccggcaggtcgtggctgtcactggtgatggcacaaatgacgggcctgctctgaagaaagcggatgttggttttgccatgggcatcgcaggcacagatgtagcaaaggaggcttcagacatcatcctaacagatgacaacttcaccagcattgtgaaggcagtgatgtggggacgaaatgtctatgacagcatctccaagttcctgcagttccagctcactgtcaatgtggtggccgtgattgtagccttcactggagcctgtatcactcaggattccccattgaaagctgtgcagatgttgtgggttaatctgatcatggacacttttgcttcattggccctggccacagagccccctacggaatctctgttgaagcggcgcccctatggccgaaataagcctctgatctcacgcactatgatgaagaacatcttgggccatgcattctatcagctcattgtcatctttatccttgtctttgcgggtgagaaattctttgatattgatagtgggaggaaggcacctctacattcaccacccagccagcactataccattgtttttaacaccttcgtgctgatgcagctcttcaatgaaatcaactcccgaaagatccatggagagaagaacgtcttttcaggcatctaccgcaacattatcttctgctctgtagtcttgggcacattcatctgccagattttcatcgtggaatttgggggtaaacccttcagttgtacaagcctcagcctgtctcagtggctgtggtgtctcttcattgggattggagaacttctgtggggccagttcatctccgcaatacctacccgatccctgaagttcctgaaggaggctgggcatggcaccaccaaagaggagatcaccaaggatgccgagggactggatgagattgaccatgctgagatggagctgcgccgaggccagatcctctggttccggggcctgaaccgtatccagactcagatcgacgtaattaacacattccagacgggagcctcttttaagggagtcctaaggcgacagaacatgggtcaacaccttgatgtaaaacttgttcctagttcatcctatgtagcagttgcaccagtcaaatcttcccccaccacttctgttcctgctgtttcatctcctcctatgggcaatcaaagtggtcaaagcgttccatagttccctccacgaaagcattcagaaaccctacaaccaaaagtccatccacagcttcatgacccaccctgaattcgccatagaggaggagttgccacgaacaccactcctggatgaggaagaggaggaaaatcctgacaaggcttctaagtttgggactagggtgctcctgttggatggtgaggtcactccatatgccaatacaaacaacaatgcggtggattgcaaccaagtgcagctcccccagtcggacagctctctacagagcctagagacatcagtttgaattttctttctctgactctcatccctattttacctatttccattttcgtctatcccatctatgaggtgatgatgggacttttcattgtcacgtcagctgctgtgttaacagcagtgtgtgtgaagtgaacctctacctgaccatgaagaggcaagagcacagacttacaaggatttcaacttaagcttgacttggggtttgtagcgggacccagtcaaaccccattcaggtcatggtagaatctactccttggtagtcacttgtcatttttaaagaaatgatgacaatcctcttggcatcaccccaccccacattctccccgatgttcctctcctgaattctggattttgtcctacaagtctgtgccatttataagctaagttgagggttcagagggagacaaatatccccaagtgaaatatgttgcggtagagatggaatgtataaaatccgccagtagtgtgattgtttttcaatttttcccactttgaaaacttacacctaaaggcctgtaggcctctaactctttctgccctttcattcaaacctctccaaagttctttgtcttttgtcttcccttcctttccttttttttttttttttttatgatgattaagaaaatggaaaggatatggatgaattgtgtaaacttagatccttctcccttttggcccaaaagaacccttgatttagttccagaatccaaccagtttctttgttaaaagggtccttttgaagcaattaagtgctggtaagaatatttctctgttgttgccaggttaccttctgcttttaaattgccatcttgtaaagtgtatgtggttcttaagtgccagggagatcagccttgcccatgaaggttgcatatgtgtggtatacagtttttacctgaaagcctgagctttctcttattcctaaagtggtggcaaaagaatgaactgggtatgaccctgcccccttactgggcttggatattgaggaccagacgctgccaaatctaggacaagacagaccatcaaagcagacttttgtgggctcctctttggggtgaccactgctttcaaagccatctgccaaggctctccagggcaggacctgactggtggggaatgagtgttcagaagccttgggagaggccaaagagccattctagcatgatctgagaaaaccttcctgcagaggccagaaaccttgagcttaggtgcctggggaccagcttcgacattctctccagtttctgattctaatttttgccacgtgtcacaacttttccagtctctgagaaggtcccagcctttctcaaatattctgattttgaaaatatgtatccaaagtgggaggcccctgtgacattttgccaacttaaacgagaaaaagaccccccgcacccggcacactcccccttcctccagccccgcttcagccacatgctccagctgctgcccagtaaagccctgtgcctttttttcccctgaatactgcccaaagcatccccttcccatctgcctctcaggagttggggactttgctaggagattttttaagtgttccttactgggacaacgtggagccacgtttgcaggagctccatttgtatccctgctggtgttgacttctgtgtaggggccagttcatgtccctgactctcacctcccattagataaatgaagcccacccccctttctagagtgatgagagtcaagaagaggggatgtatgaacggccaaattcccatgtgagaggaagatgacctgatccacctagccttttcttctggatctgtcctccctcacccctttcacctgagctgtccacagtaggaaacataaagaaacaatgtcccctacatatccccatgactacataatccatcatcgtaggaaataggaaagcaaatttgattttggttttgtaaaacgtacatgcttcaataattcttttttgtgtcttaaatactcataggggaaaaaaacagctcacccaaggtgttaggtttcacatatatattcatcaactattttagaagatttaattctatcaaatcttgtattacctcagatcattttaaatagcaagccaataacgagctttgaaggctattttaccattcctgttcacaaaaggttctcatggtgcctgacaggttacccttgagggcttgtgtctactttttaaaagtcaatggttttttttcttgtgttctagtttccataataggagagaaaatatagaaatatatgcaaaaattatagttttctttagatcagaaactgatatttttgggtcagccatatgtattttgtttaaaggatttaaaataaagtgccgtcatgtagccctgtggaagggagcacataaccagctgtttggcatgacaggtgacttagtatatttgtaattggttttaaaaccaatacaccatactttctttctgcaaacagccatctttatacttagggaagaaaaattgttgggttctagacttttttaatataaattttgttgatatggaattaggtaagtttaagtgtctatgtgcatatgttttttatataagttttttctattcagtttcactgatccaactggcagtgggtaaatatggcataagttaataacacttttccccaaaatggtgctttggatttgaaaagggtctgatggggagaaggagaacgtatcatcctagcttcctctcttaataaacctagaaaaacgggtagtaaactgtggatagtcaggaaaacacccagcaagggacacagctgtcaggaaatgaatcttccccccaacccccaccatgcagatggatagacagaatctttcctgactagtcattaggatcaggggcctctgttggatttgtgtttcttgaagaatagctggcagagtggtataaaagacacgaatatctcctggtctataaggatactctgatttggggtttgcatttttcatggtttttatttcctgttccccctggagttttccattagtgagtttttgtgcaaggatcttatttgtgatgccttccctcccctagaaagattttgtgcaatatattaaatggggacagaattctaaatggataaaacaatggctggttctagccctgagtgacagtcttaaggctagatccttcccatagtatcatctgtcctctggaatgactctcctgtccctaaaggggttaagagagagatcacctagaaatccctctggacacttgtgggttctttagggtttgagtttcttcttccccttgagcttcagagaggagagttggcatggttaaatctgaatggttacctcactgctgaaaacccagaggggcgtggcacactcgcttgtgtggaaaagcctctaaatgcatcccttcctttctttcctgcttcctttgccttacaattgaagcagcccgtggtaccatcacagtatgcagagacttcctcacctttcatatctagggaccacccccgatgcattggtgagggtgggcacttataaatgcctgctattgttaagccattccagcctcttcctctgaatagaccagacgccctttcacttagttcagtgccagtccttttgccttcccaaccctgctgttaggcctgctgttccctttgctcttgattaggagagatggaaggagatgagctcccataactgaattggcctttggttcatgttttctccccatatgtatatatgccatatgtgaatatgccatatatatgtgccaacaaatctatctacgttgttcttttcaaattagcacgcagataggaattttgagtttcttcttcttttagtaactagtataacaagcactggtatttttgtacaaaaaagaaaaacaaaagattgactattgtggtctgcatgacataaacaaacaaatggtgatatcaaagcaacgtataccccagtccagtgtgtgttgccataatttgcaattcagcttaacagtgcacccaatctatatttgcattttgatattatttaagctctatgtacaaggttttgcatgtatttatatggttcttagggaaaaaaaatgctataaactgcaaatctgaaattcaaatgtgttgttccactgagaccagaagaagaagaggagttttaaaagggataatttgttggagccaataaagctttttgctgatgaacagaaaccaatactgctgtgcactgagaataaaaactcatgcccacttgt

SEQ ID NO: 109718 - DNA, 429 bp, Homo sapiens
  Payload ID: 1547
  Gene Symbol: ATP2B4
  Gene Name: ATPase, Ca++ transporting, plasma membrane 4
  ENST ID: ENST00000458092
  CDS Start-End: 1-353
ttgggggtaaacccttcagttgtacaagcctcagcctgtctcagtggctgtggtgtctcttcattgggattggagaacttctgtggggccagttcatctccgcaatacctacccgatccctgaagttcctgaaggaggctgggcatggcaccaccaaagaggagatcaccaaggatgccgagggactggatgagattgaccatgctgagatggagctgcgccgaggccagatcctctggttccggggcctgaaccgtatccagactcagcatcttttgcaggattcagacttgcttcctgacaaggaggaagcaataatttcttcaagcctcttcccttcttgcaatttctgaaatgggatagaagccacccctgctgctcttatgtcccctgtctatagccccacaataacttttattttttccactt

SEQ ID NO: 109719 - DNA, 4697 bp, Homo sapiens
  Payload ID: 1547
  Gene Symbol: ATP2B4
  Gene Name: ATPase, Ca++ transporting, plasma membrane 4
  ENST ID: ENST00000484746
  CDS Start-End: 1-308
tcaccaaggatgccgagggactggatgagattgaccatgctgagatggagctgcgccgaggccagatcctctggttccggggcctgaaccgtatccagactcagatcgacgtaattaacacattccagacgggagcctcttttaagggagtcctaaggcgacagaacatgggtcaacaccttgatgtaaaacttgttcctagttcatcctatgtagcagttgcaccagtcaaatcttcccccaccacttctgttcctgctgtttcatctcctcctatgggcaatcaaagtggtcaaagcgttccatagttccctccacgaaagcattcagaaaccctacaaccaaaagtccatccacagcttcatgacccaccctgaattcgccaatacaaacaacaatgcggtggattgcaaccaagtgcagctcccccagtcggacagctctctacagagcctagagacatcagtttgaattttctttctctgactctcatccctattttacctatttccattttcgtctatcccatctatgaggtgatgatgggacttttcattgtcacgtcagctgctgtgttaacagcagtgtgtgtgaagtgaacctctacctgaccatgaagaggcaagagcacagacttacaaggatttcaacttaagcttgacttggggtttgtagcgggacccagtcaaaccccattcaggtcatggtagaatctactccttggtagtcacttgtcatttttaaagaaatgatgacaatcctcttggcatcaccccaccccacattctccccgatgttcctctcctgaattctggattttgtcctacaagtctgtgccatttataagctaagttgagggttcagagggagacaaatatccccaagtgaaatatgttgcggtagagatggaatgtataaaatccgccagtagtgtgattgtttttcaatttttcccactttgaaaacttacacctaaaggcctgtaggcctctaactctttctgccctttcattcaaacctctccaaagttctttgtcttttgtcttcccttcctttccttttttttttttttttttatgatgattaagaaaatggaaaggatatggatgaattgtgtaaacttagatccttctcccttttggcccaaaagaacccttgatttagttccagaatccaaccagtttctttgttaaaagggtccttttgaagcaattaagtgctggtaagaatatttctctgttgttgccaggttaccttctgcttttaaattgccatcttgtaaagtgtatgtggttcttaagtgccagggagatcagccttgcccatgaaggttgcatatgtgtggtatacagtttttacctgaaagcctgagctttctcttattcctaaagtggtggcaaaagaatgaactgggtatgaccctgcccccttactgggcttggatattgaggaccagacgctgccaaatctaggacaagacagaccatcaaagcagacttttgtgggctcctctttggggtgaccactgctttcaaagccatctgccaaggctctccagggcaggacctgactggtggggaatgagtgttcagaagccttgggagaggccaaagagccattctagcatgatctgagaaaaccttcctgcagaggccagaaaccttgagcttaggtgcctggggaccagcttcgacattctctccagtttctgattctaatttttgccacgtgtcacaacttttccagtctctgagaaggtcccagcctttctcaaatattctgattttgaaaatatgtatccaaagtgggaggcccctgtgacattttgccaacttaaacgagaaaaagaccccccgcacccggcacactcccccttcctccagccccgcttcagccacatgctccagctgctgcccagtaaagccctgtgcctttttttcccctgaatactgcccaaagcatccccttcccatctgcctctcaggagttggggactttgctaggagattttttaagtgttccttactgggacaacgtggagccacgtttgcaggagctccatttgtatccctgctggtgttgacttctgtgtaggggccagttcatgtccctgactctcacctcccattagataaatgaagcccacccccctttctagagtgatgagagtcaagaagaggggatgtatgaacggccaaattcccatgtgagaggaagatgacctgatccacctagccttttcttctggatctgtcctccctcacccctttcacctgagctgtccacagtaggaaacataaagaaacaatgtcccctacatatccccatgactacataatccatcatcgtaggaaataggaaagcaaatttgattttggttttgtaaaacgtacatgcttcaataattcttttttgtgtcttaaatactcataggggaaaaaaacagctcacccaaggtgttaggtttcacatatatattcatcaactattttagaagatttaattctatcaaatcttgtattacctcagatcattttaaatagcaagccaataacgagctttgaaggctattttaccattcctgttcacaaaaggttctcatggtgcctgacaggttacccttgagggcttgtgtctactttttaaaagtcaatggttttttttcttgtgttctagtttccataataggagagaaaatatagaaatatatgcaaaaattatagttttctttagatcagaaactgatatttttgggtcagccatatgtattttgtttaaaggatttaaaataaagtgccgtcatgtagccctgtggaagggagcacataaccagctgtttggcatgacaggtgacttagtatatttgtaattggttttaaaaccaatacaccatactttctttctgcaaacagccatctttatacttagggaagaaaaattgttgggttctagacttttttaatataaattttgttgatatggaattaggtaagtttaagtgtctatgtgcatatgttttttatataagttttttctattcagtttcactgatccaactggcagtgggtaaatatggcataagttaataacacttttccccaaaatggtgctttggatttgaaaagggtctgatggggagaaggagaacgtatcatcctagcttcctctcttaataaacctagaaaaacgggtagtaaactgtggatagtcaggaaaacacccagcaagggacacagctgtcaggaaatgaatcttccccccaacccccaccatgcagatggatagacagaatctttcctgactagtcattaggatcaggggcctctgttggatttgtgtttcttgaagaatagctggcagagtggtataaaagacacgaatatctcctggtctataaggatactctgatttggggtttgcatttttcatggtttttatttcctgttccccctggagttttccattagtgagtttttgtgcaaggatcttatttgtgatgccttccctcccctagaaagattttgtgcaatatattaaatggggacagaattctaaatggataaaacaatggctggttctagccctgagtgacagtcttaaggctagatccttcccatagtatcatctgtcctctggaatgactctcctgtccctaaaggggttaagagagagatcacctagaaatccctctggacacttgtgggttctttagggtttgagtttcttcttccccttgagcttcagagaggagagttggcatggttaaatctgaatggttacctcactgctgaaaacccagaggggcgtggcacactcgcttgtgtggaaaagcctctaaatgcatcccttcctttctttcctgcttcctttgccttacaattgaagcagcccgtggtaccatcacagtatgcagagacttcctcacctttcatatctagggaccacccccgatgcattggtgagggtgggcacttataaatgcctgctattgttaagccattccagcctcttcctctgaatagaccagacgccctttcacttagttcagtgccagtccttttgccttcccaaccctgctgttaggcctgctgttccctttgctcttgattaggagagatggaaggagatgagctcccataactgaattggcctttggttcatgttttctccccatatgtatatatgccatatgtgaatatgccatatatatgtgccaacaaatctatctacgttgttcttttcaaattagcacgcagataggaattttgagtttcttcttcttttagtaactagtataacaagcactggtatttttgtacaaaaaagaaaaacaaaagattgactattgtggtctgcatgacataaacaaacaaatggtgatatcaaagcaacgtataccccagtccagtgtgtgttgccataatttgcaattcagcttaacagtgcacccaatctatatttgcattttgatattatttaagctctatgtacaaggttttgcatgtatttatatggttcttagggaaaaaaaatgctataaactgcaaatctgaaattcaaatgtgttgttccactgagaccagaagaagaagaggagttttaaaagggataatttgttggagccaataaagctttttgctgatgaacagaaaccaatactgctgtgcactgagaataaaaactcatgcccacttgta

SEQ ID NO: 109720 - DNA, 3484 bp, Homo sapiens
  Payload ID: 1548
  Gene Symbol: ATP2C1
  Gene Name: ATPase, Ca++ transporting, type 2C, member 1
  Uniprot ID: P98194
  ENST ID: ENST00000328560
  CDS Start-End: 323-2989
gctggcgtgagctggggacgttgcgggcacacgacggggcgggtgcgggatcttggggaggggggctcccgagatagtggctgggcggggaactccttcctcagcctctcgtcagcgccgcttctcctggtttctcttgcagatgctgctgctaggggtggtgggagcagccgtgggacgcgtggccgggagcgggggtgacagcctgggattccgggggcttctcttccttgtcctcctcctctcctctctattcccagtgtggccgtggctgacactaaagactttgtagccatcaacccgagtgcagtttcgatggaaaatgaaggttgcacgttttcaaaaaatacctaatggtgaaaatgagacaatgattcctgtattgacatcaaaaaaagcaagtgaattaccagtcagtgaagttgcaagcattctccaagctgatcttcagaatggtctaaacaaatgtgaagttagtcataggcgagcctttcatggctggaatgagtttgatattagtgaagatgagccactgtggaagaagtatatttctcagtttaaaaatccccttattatgctgcttctggcttctgcagtcatcagtgttttaatgcatcagtttgatgatgccgtcagtatcactgtggcaatacttatcgttgttacagttgcctttgttcaggaatatcgttcagaaaaatctcttgaagaattgagtaaacttgtgccaccagaatgccattgtgtgcgtgaaggaaaattggagcatacacttgcccgagacttggttccaggtgatacagtttgcctttctgttggggatagagttcctgctgacttacgcttgtttgaggctgtggatctttccattgatgagtccagcttgacaggtgagacaacgccttgttctaaggtgacagctcctcagccagctgcaactaatggagatcttgcatcgagaagtaacattgcctttatgggaacactggtcagatgtggcaaagcaaagggtgttgtcattggaacaggagaaaattctgaatttggggaggtttttaaaatgatgcaagcagaagaggcaccaaaaacccctctgcagaagagcatggacctcttaggaaaacaactttccttttactcctttggtataataggaatcatcatgttggttggctggttactgggaaaagatatcctggaaatgtttactattagtgtaagtttggctgtagcagcaattcctgaaggtctccccattgtggtcacagtgacgctagctcttggtgttatgagaatggtgaagaaaagggccattgtgaaaaagctgcctattgttgaaactctgggctgctgtaatgtgatttgttcagataaaactggaacactgacgaagaatgaaatgactgttactcacatatttacttcagatggtctgcatgctgaggttactggagttggctataatcaatttggggaagtgattgttgatggtgatgttgttcatggattctataacccagctgttagcagaattgttgaggcgggctgtgtgtgcaatgatgctgtaattagaaacaatactctaatggggaagccaacagaaggggccttaattgctcttgcaatgaagatgggtcttgatggacttcaacaagactacatcagaaaagctgaatacccttttagctctgagcaaaagtggatggctgttaagtgtgtacaccgaacacagcaggacagaccagagatttgttttatgaaaggtgcttacgaacaagtaattaagtactgtactacataccagagcaaagggcagaccttgacacttactcagcagcagagagatgtgtaccaacaagagaaggcacgcatgggctcagcgggactcagagttcttgctttggcttctggtcctgaactgggacagctgacatttcttggcttggtgggaatcattgatccacctagaactggtgtgaaagaagctgttacaacactcattgcctcaggagtatcaataaaaatgattactggagattcacaggagactgcagttgcaatcgccagtcgtctgggattgtattccaaaacttcccagtcagtctcaggagaagaaatagatgcaatggatgttcagcagctttcacaaatagtaccaaaggttgcagtattttacagagctagcccaaggcacaagatgaaaattattaagtcgctacagaagaacggttcagttgtagccatgacaggagatggagtaaatgatgcagttgctctgaaggctgcagacattggagttgcgatgggccagactggtacagatgtttgcaaagaggcagcagacatgatcctagtggatgatgattttcaaaccataatgtctgcaatcgaagagggtaaagggatttataataacattaaaaatttcgttagattccagctgagcacgagtatagcagcattaactttaatctcattggctacattaatgaactttcctaatcctctcaatgccatgcagattttgtggatcaatattattatggatggacccccagctcagagccttggagtagaaccagtggataaagatgtcattcgtaaacctcctcgcaactggaaagacagcattttgactaaaaacttgatacttaaaatacttgtttcatcaataatcattgtttgtgggactttgtttgtcttctggcgtgagctacgagacaatgtgattacacctcgagacacaacaatgaccttcacatgctttgtgttttttgacatgttcaatgcactaagttccagatcccagaccaagtctgtgtttgagattggactctgcagtaatagaatgttttgctatgcagttcttggatccatcatgggacaattactagttatttactttcctccgcttcagaaggtttttcagactgagagcctaagcatactgggtctggctctgggagaggagtggacagcagctggttgagatacatccccatctggagacaggactgccactgacagaagatgtgagctgtgtctaagtccagtcttgtgcccagccgtgtctgcgccttcactctttggaactctgcatacaacatcttagcaccatcttcctgcagctcttccttacctaaataaagaaacagcccaagggcagtatttctaaaagcactgtaacagcttttcattttctccacatatactacaaattctataaagaaagaaattaatttaaaaaaactaagatgtttttctcttctggcttcataaatgccttgctgtataaattgaaatattgatactgaactgtctttttaatgatgacctaactttattcaacccatcggaatttactttttccctgaaataagatcttttccactggtctactacctgaccataaacatgtctgcatttgaattctctaaaccctaaatctgtgtctatgaaaaatacaaatgactattaaatatta

SEQ ID NO: 109721 - DNA, 3401 bp, Homo sapiens
  Payload ID: 1548
  Gene Symbol: ATP2C1
  Gene Name: ATPase, Ca++ transporting, type 2C, member 1
  Uniprot ID: P98194
  ENST ID: ENST00000359644
  CDS Start-End: 130-2979
gggggtgacagcctgggattccgggggcttctcttccttgtcctcctcctctcctctctattcccagtgtggccgtggctgacactaaagactttgtagccatcaacccgagtgcagtttcgatggaaaatgaaggttgcacgttttcaaaaaatacctaatggtgaaaatgagacaatgattcctgtattgacatcaaaaaaagcaagtgaattaccagtcagtgaagttgcaagcattctccaagctgatcttcagaatggtctaaacaaatgtgaagttagtcataggcgagcctttcatggctggaatgagtttgatattagtgaagatgagccactgtggaagaagtatatttctcagtttaaaaatccccttattatgctgcttctggcttctgcagtcatcagtgttttaatgcatcagtttgatgatgccgtcagtatcactgtggcaatacttatcgttgttacagttgcctttgttcaggaatatcgttcagaaaaatctcttgaagaattgagtaaacttgtgccaccagaatgccattgtgtgcgtgaaggaaaattggagcatacacttgcccgagacttggttccaggtgatacagtttgcctttctgttggggatagagttcctgctgacttacgcttgtttgaggctgtggatctttccattgatgagtccagcttgacaggtgagacaacgccttgttctaaggtgacagctcctcagccagctgcaactaatggagatcttgcatcgagaagtaacattgcctttatgggaacactggtcagatgtggcaaagcaaagggtgttgtcattggaacaggagaaaattctgaatttggggaggtttttaaaatgatgcaagcagaagaggcaccaaaaacccctctgcagaagagcatggacctcttaggaaaacaactttccttttactcctttggtataataggaatcatcatgttggttggctggttactgggaaaagatatcctggaaatgtttactattagtgtaagtttggctgtagcagcaattcctgaaggtctccccattgtggtcacagtgacgctagctcttggtgttatgagaatggtgaagaaaagggccattgtgaaaaagctgcctattgttgaaactctgggctgctgtaatgtgatttgttcagataaaactggaacactgacgaagaatgaaatgactgttactcacatatttacttcagatggtctgcatgctgaggttactggagttggctataatcaatttggggaagtgattgttgatggtgatgttgttcatggattctataacccagctgttagcagaattgttgaggcgggctgtgtgtgcaatgatgctgtaattagaaacaatactctaatggggaagccaacagaaggggccttaattgctcttgcaatgaagatgggtcttgatggacttcaacaagactacatcagaaaagctgaatacccttttagctctgagcaaaagtggatggctgttaagtgtgtacaccgaacacagcaggacagaccagagatttgttttatgaaaggtgcttacgaacaagtaattaagtactgtactacataccagagcaaagggcagaccttgacacttactcagcagcagagagatgtgtaccaacaagagaaggcacgcatgggctcagcgggactcagagttcttgctttggcttctggtcctgaactgggacagctgacatttcttggcttggtgggaatcattgatccacctagaactggtgtgaaagaagctgttacaacactcattgcctcaggagtatcaataaaaatgattactggagattcacaggagactgcagttgcaatcgccagtcgtctgggattgtattccaaaacttcccagtcagtctcaggagaagaaatagatgcaatggatgttcagcagctttcacaaatagtaccaaaggttgcagtattttacagagctagcccaaggcacaagatgaaaattattaagtcgctacagaagaacggttcagttgtagccatgacaggagatggagtaaatgatgcagttgctctgaaggctgcagacattggagttgcgatgggccagactggtacagatgtttgcaaagaggcagcagacatgatcctagtggatgatgattttcaaaccataatgtctgcaatcgaagagggtaaagggatttataataacattaaaaatttcgttagattccagctgagcacgagtatagcagcattaactttaatctcattggctacattaatgaactttcctaatcctctcaatgccatgcagattttgtggatcaatattattatggatggacccccagctcagagccttggagtagaaccagtggataaagatgtcattcgtaaacctcctcgcaactggaaagacagcattttgactaaaaacttgatacttaaaatacttgtttcatcaataatcattgtttgtgggactttgtttgtcttctggcgtgagctacgagacaatgtgattacacctcgagacacaacaatgaccttcacatgctttgtgttttttgacatgttcaatgcactaagttccagatcccagaccaagtctgtgtttgagattggactctgcagtaatagaatgttttgctatgcagttcttggatccatcatgggacaattactagttatttactttcctccgcttcagaaggtttttcagactgagagcctaagcatactggatctgttgtttcttttgggtctcacctcatcagtgtgcatagtggcagaaattataaagaaggttgaaaggagcagggaaaagatccagaagcatgttagttcgacatcatcatcttttcttgaagtctggctctgggagaggagtggacagcagctggttgagatacatccccatctggagacaggactgccactgacagaagatgtgagctgtgtctaagtccagtcttgtgcccagccgtgtctgcgccttcactctttggaactctgcatacaacatcttagcaccatcttcctgcagctcttccttacctaaataaagaaacagcccaagggcagtatttctaaaagcactgtaacagcttttcattttctccacatatactacaaattctataaagaaagaaattaatttaaaaaaactaagatgtttttctcttctggcttcataaatgccttgctgtataaattgaaatattgatactgaactgtctttttaatgatgacctaactttattcaacccatcggaatttactttttccctgaaataagatcttttccactggtctactacctgaccataaacatgtctgcatttgaattctctaaaccctaaatctgtgtctatgaaaaatacaaat

SEQ ID NO: 109722 - DNA, 4795 bp, Homo sapiens
  Payload ID: 1548
  Gene Symbol: ATP2C1
  Gene Name: ATPase, Ca++ transporting, type 2C, member 1
  Uniprot ID: P98194
  ENST ID: ENST00000428331
  CDS Start-End: 236-2995
gggaactccttcctcagcctctcgtcagcgccgcttctcctggtttctcttgcagatgctgctgctaggggtggtgggagcagccgtgggacgcgtggccgggagcgggggtgacagcctgggattccgggggcttctcttccttgtcctcctcctctcctctctattcccagtgtggccgtggctgacactaaagactttgtagccatcaacccgagtgcagtttcgatggaaaatgaaggttgcacgttttcaaaaaatacctaatggtgaaaatgagacaatgattcctgtattgacatcaaaaaaagcaagtgaattaccagtcagtgaagttgcaagcattctccaagctgatcttcagaatggtctaaacaaatgtgaagttagtcataggcgagcctttcatggctggaatgagtttgatattagtgaagatgagccactgtggaagaagtatatttctcagtttaaaaatccccttattatgctgcttctggcttctgcagtcatcagtgttttaatgcatcagtttgatgatgccgtcagtatcactgtggcaatacttatcgttgttacagttgcctttgttcaggaatatcgttcagaaaaatctcttgaagaattgagtaaacttgtgccaccagaatgccattgtgtgcgtgaaggaaaattggagcatacacttgcccgagacttggttccaggtgatacagtttgcctttctgttggggatagagttcctgctgacttacgcttgtttgaggctgtggatctttccattgatgagtccagcttgacaggtgagacaacgccttgttctaaggtgacagctcctcagccagctgcaactaatggagatcttgcatcgagaagtaacattgcctttatgggaacactggtcagatgtggcaaagcaaagggtgttgtcattggaacaggagaaaattctgaatttggggaggtttttaaaatgatgcaagcagaagaggcaccaaaaacccctctgcagaagagcatggacctcttaggaaaacaactttccttttactcctttggtataataggaatcatcatgttggttggctggttactgggaaaagatatcctggaaatgtttactattagtgtaagtttggctgtagcagcaattcctgaaggtctccccattgtggtcacagtgacgctagctcttggtgttatgagaatggtgaagaaaagggccattgtgaaaaagctgcctattgttgaaactctgggctgctgtaatgtgatttgttcagataaaactggaacactgacgaagaatgaaatgactgttactcacatatttacttcagatggtctgcatgctgaggttactggagttggctataatcaatttggggaagtgattgttgatggtgatgttgttcatggattctataacccagctgttagcagaattgttgaggcgggctgtgtgtgcaatgatgctgtaattagaaacaatactctaatggggaagccaacagaaggggccttaattgctcttgcaatgaagatgggtcttgatggacttcaacaagactacatcagaaaagctgaatacccttttagctctgagcaaaagtggatggctgttaagtgtgtacaccgaacacagcaggacagaccagagatttgttttatgaaaggtgcttacgaacaagtaattaagtactgtactacataccagagcaaagggcagaccttgacacttactcagcagcagagagatgtgtaccaacaagagaaggcacgcatgggctcagcgggactcagagttcttgctttggcttctggtcctgaactgggacagctgacatttcttggcttggtgggaatcattgatccacctagaactggtgtgaaagaagctgttacaacactcattgcctcaggagtatcaataaaaatgattactggagattcacaggagactgcagttgcaatcgccagtcgtctgggattgtattccaaaacttcccagtcagtctcaggagaagaaatagatgcaatggatgttcagcagctttcacaaatagtaccaaaggttgcagtattttacagagctagcccaaggcacaagatgaaaattattaagtcgctacagaagaacggttcagttgtagccatgacaggagatggagtaaatgatgcagttgctctgaaggctgcagacattggagttgcgatgggccagactggtacagatgtttgcaaagaggcagcagacatgatcctagtggatgatgattttcaaaccataatgtctgcaatcgaagagggtaaagggatttataataacattaaaaatttcgttagattccagctgagcacgagtatagcagcattaactttaatctcattggctacattaatgaactttcctaatcctctcaatgccatgcagattttgtggatcaatattattatggatggacccccagctcagagccttggagtagaaccagtggataaagatgtcattcgtaaacctcctcgcaactggaaagacagcattttgactaaaaacttgatacttaaaatacttgtttcatcaataatcattgtttgtgggactttgtttgtcttctggcgtgagctacgagacaatgtgattacacctcgagacacaacaatgaccttcacatgctttgtgttttttgacatgttcaatgcactaagttccagatcccagaccaagtctgtgtttgagattggactctgcagtaatagaatgttttgctatgcagttcttggatccatcatgggacaattactagttatttactttcctccgcttcagaaggtttttcagactgagagcctaagcatactggatctgttgtttcttttgggtctcacctcatcagtgtgcatagtggcagaaattataaagaaggttgaaaggagcagggaaaagatccagaagcatgttagttcgacatcatcatcttttcttgaagtatgatgcatattgcattattttatttgcaaactaggaattgcagtctgaggatcatttagaagggcaagttcaagaggatatgaagatttgagaactttttaactattcattgactaaaaatgaacattaatgttaaagacttaagactttaacctgctggcagtcccaaatgaaattatgcaactttgatatcatattccttgatttaaattggcttttgtgattgagtgaaactttataaagcatatggtcagttatttaattaaaaaggcaaaacctgaaccaccttctgcacttaaagaagtctaacagtacaaatacactatctatcttagatagatatatttttttttatttttaaatattgtactatttatggtggtggggctttcttactaatacacaaataaatttaatcatttcaaaggcattctatttggtttagaagttgattcccaggagtgccatatttcagctactgtatttcctttttcttgtaatgtaagcagctcagataccatgtgctatcatttttgtatcaagttttttgcacaggatgtgaccactgtcagatcactgttcttttctttctttttgtgattgaaaagcctatactacaatttgaagtaaatttttgtttttcttagtaagtgtaaatggttgctttatttttattttaaaaaggtatgtctttggtttggcagaattcatgcagggctatcaagtggtgttctagggtaacagtgtccataattaacgcttagtcatagagtcaaaaacatttaagactgattgggttgaagtttataataaattatattaacatgtcttcctttttgaggtaaagatatatactttgtcaaatatcattttgtcatcctctaaatataaatccaaatacctcagctaagtaattctattttattatttttactgttatgtatgtttttaatcatatttcttaggaagtataggctactggacttagaataaaaagtccccaaacccaaacaaatggtttatgaaccagagtatatgtggaagattctttgctggtcttgctctgtgtgcatctgaagcttctttggcctagattttagcacaaacctgagtatatctcttctactttcatcatgtgttctgtaccttctttttgtttcattgggcatgctagggaaataggtggattttgtgtgtaatgccatcagtttttatgaaagcttgatgaggtataggtcatttgttttgagtatgtgggccagaaatttaaaattagaaatttgtttttctgttgagtatataaacaaaaattggtcccaattctaacaggtttaatccttcttgaagccaataagttttatcttttataatctgtcaggatgaaccactccttagcttttatccaatattaaactgcaagtgttagcactgaaatattgtcattgatagggaaaatatctattctttgagtcattgttactgaggcagttgagtgtaaggagctggctgcagtttattctacttaaccctttaaggctgaattgtcaaatgtacattgttccatgtcgttagatggaacatggaagccattgtctaatcaactctatcattagtgacttgatgtctcataccttaattttgtaatgatttttattctctgttacaaagacttgaaatacgtattaaatgcacgttaatgttttgctttgcattttaggttcagattatgacttgattgaaataaatgtgcctatacattcatttgctttgtactataaaaataaaaatgatttcttaagttaa

SEQ ID NO: 109723 - DNA, 3386 bp, Homo sapiens
  Payload ID: 1548
  Gene Symbol: ATP2C1
  Gene Name: ATPase, Ca++ transporting, type 2C, member 1
  Uniprot ID: P98194
  ENST ID: ENST00000422190
  CDS Start-End: 130-2949
gggggtgacagcctgggattccgggggcttctcttccttgtcctcctcctctcctctctattcccagtgtggccgtggctgacactaaagactttgtagccatcaacccgagtgcagtttcgatggaaaatgaaggttgcacgttttcaaaaaatacctaatggtgaaaatgagacaatgattcctgtattgacatcaaaaaaagcaagtgaattaccagtcagtgaagttgcaagcattctccaagctgatcttcagaatggtctaaacaaatgtgaagttagtcataggcgagcctttcatggctggaatgagtttgatattagtgaagatgagccactgtggaagaagtatatttctcagtttaaaaatccccttattatgctgcttctggcttctgcagtcatcagtgttttaatgcatcagtttgatgatgccgtcagtatcactgtggcaatacttatcgttgttacagttgcctttgttcaggaatatcgttcagaaaaatctcttgaagaattgagtaaacttgtgccaccagaatgccattgtgtgcgtgaaggaaaattggagcatacacttgcccgagacttggttccaggtgatacagtttgcctttctgttggggatagagttcctgctgacttacgcttgtttgaggctgtggatctttccattgatgagtccagcttgacaggtgagacaacgccttgttctaaggtgacagctcctcagccagctgcaactaatggagatcttgcatcgagaagtaacattgcctttatgggaacactggtcagatgtggcaaagcaaagggtgttgtcattggaacaggagaaaattctgaatttggggaggtttttaaaatgatgcaagcagaagaggcaccaaaaacccctctgcagaagagcatggacctcttaggaaaacaactttccttttactcctttggtataataggaatcatcatgttggttggctggttactgggaaaagatatcctggaaatgtttactattagtgtaagtttggctgtagcagcaattcctgaaggtctccccattgtggtcacagtgacgctagctcttggtgttatgagaatggtgaagaaaagggccattgtgaaaaagctgcctattgttgaaactctgggctgctgtaatgtgatttgttcagataaaactggaacactgacgaagaatgaaatgactgttactcacatatttacttcagatggtctgcatgctgaggttactggagttggctataatcaatttggggaagtgattgttgatggtgatgttgttcatggattctataacccagctgttagcagaattgttgaggcgggctgtgtgtgcaatgatgctgtaattagaaacaatactctaatggggaagccaacagaaggggccttaattgctcttgcaatgaagatgggtcttgatggacttcaacaagactacatcagaaaagctgaatacccttttagctctgagcaaaagtggatggctgttaagtgtgtacaccgaacacagcaggacagaccagagatttgttttatgaaaggtgcttacgaacaagtaattaagtactgtactacataccagagcaaagggcagaccttgacacttactcagcagcagagagatgtgtaccaacaagagaaggcacgcatgggctcagcgggactcagagttcttgctttggcttctggtcctgaactgggacagctgacatttcttggcttggtgggaatcattgatccacctagaactggtgtgaaagaagctgttacaacactcattgcctcaggagtatcaataaaaatgattactggagattcacaggagactgcagttgcaatcgccagtcgtctgggattgtattccaaaacttcccagtcagtctcaggagaagaaatagatgcaatggatgttcagcagctttcacaaatagtaccaaaggttgcagtattttacagagctagcccaaggcacaagatgaaaattattaagtcgctacagaagaacggttcagttgtagccatgacaggagatggagtaaatgatgcagttgctctgaaggctgcagacattggagttgcgatgggccagactggtacagatgtttgcaaagaggcagcagacatgatcctagtggatgatgattttcaaaccataatgtctgcaatcgaagagggtaaagggatttataataacattaaaaatttcgttagattccagctgagcacgagtatagcagcattaactttaatctcattggctacattaatgaactttcctaatcctctcaatgccatgcagattttgtggatcaatattattatggatggacccccagctcagagccttggagtagaaccagtggataaagatgtcattcgtaaacctcctcgcaactggaaagacagcattttgactaaaaacttgatacttaaaatacttgtttcatcaataatcattgtttgtgggactttgtttgtcttctggcgtgagctacgagacaatgtgattacacctcgagacacaacaatgaccttcacatgctttgtgttttttgacatgttcaatgcactaagttccagatcccagaccaagtctgtgtttgagattggactctgcagtaatagaatgttttgctatgcagttcttggatccatcatgggacaattactagttatttactttcctccgcttcagaaggtttttcagactgagagcctaagcatactggatctgttgtttcttttgggtctcacctcatcagtgtgcatagtggcagaaattataaagaaggttgaaaggagcagggaaaagatccagaagcatgtctggctctgggagaggagtggacagcagctggttgagatacatccccatctggagacaggactgccactgacagaagatgtgagctgtgtctaagtccagtcttgtgcccagccgtgtctgcgccttcactctttggaactctgcatacaacatcttagcaccatcttcctgcagctcttccttacctaaataaagaaacagcccaagggcagtatttctaaaagcactgtaacagcttttcattttctccacatatactacaaattctataaagaaagaaattaatttaaaaaaactaagatgtttttctcttctggcttcataaatgccttgctgtataaattgaaatattgatactgaactgtctttttaatgatgacctaactttattcaacccatcggaatttactttttccctgaaataagatcttttccactggtctactacctgaccataaacatgtctgcatttgaattctctaaaccctaaatctgtgtctatgaaaaatacaaatgactattaaatatta

SEQ ID NO: 109724 - DNA, 540 bp, Homo sapiens
  Payload ID: 1548
  Gene Symbol: ATP2C1
  Gene Name: ATPase, Ca++ transporting, type 2C, member 1
  ENST ID: ENST00000508297
  CDS Start-End: 295-540
gactgactaagaggagtagttaaaatggagaaagcttagctgtactttgtcttgcatgttaaacgtaatgagtttagaggattatgattatttgtaatcatcaggatctgctagacaggacatctgttttactttttactcttatgttggtggagaaatagcgtgcttttcattcaatgtgaaaattttgtgttctagctgggcaccgatggcttagtttttgaaatgtaatttcttgagaagtagcatgtggttgcacgttttcaaaaaatacctaatggtgaaaatgagacaatgattcctgtattgacatcaaaaaaagcaagtgaattaccagtcagtgaagttgcaagcattctccaagctgatcttcagaatggtctaaacaaatgtgaagttagtcataggcgagcctttcatggctggaatgagtttgatattagtgaagatgagccactgtggaagaagtatatttctcagtttaaaaatccccttattatgctgcttctggcttctgcagtcatcagtgttttaatgcat

SEQ ID NO: 109725 - DNA, 3579 bp, Homo sapiens
  Payload ID: 1548
  Gene Symbol: ATP2C1
  Gene Name: ATPase, Ca++ transporting, type 2C, member 1
  Uniprot ID: P98194
  ENST ID: ENST00000507488
  CDS Start-End: 221-3142
tttctggacgcttctagacagtgttcatacttggctgtctggtttcaccaggaactctacccaaaagaggaaacagcaaggagaacatttgctttgtttgtaggagggaagttgtcgagctacaaacaaatctttaggcatctgaggaattgctaagtttctaatttcatatggttgctgacaaggaggtgcagacaaggaccctcttgctttcctcactatggatagtctgttgcctccatctagattctcttatttcaaaaaatatcctctccatgcaattaggagatatttatcgacgctgagaaaccaaagagccgaagaacaggttgcacgttttcaaaaaatacctaatggtgaaaatgagacaatgattcctgtattgacatcaaaaaaagcaagtgaattaccagtcagtgaagttgcaagcattctccaagctgatcttcagaatggtctaaacaaatgtgaagttagtcataggcgagcctttcatggctggaatgagtttgatattagtgaagatgagccactgtggaagaagtatatttctcagtttaaaaatccccttattatgctgcttctggcttctgcagtcatcagtgttttaatgcatcagtttgatgatgccgtcagtatcactgtggcaatacttatcgttgttacagttgcctttgttcaggaatatcgttcagaaaaatctcttgaagaattgagtaaacttgtgccaccagaatgccattgtgtgcgtgaaggaaaattggagcatacacttgcccgagacttggttccaggtgatacagtttgcctttctgttggggatagagttcctgctgacttacgcttgtttgaggctgtggatctttccattgatgagtccagcttgacaggtgagacaacgccttgttctaaggtgacagctcctcagccagctgcaactaatggagatcttgcatcgagaagtaacattgcctttatgggaacactggtcagatgtggcaaagcaaagggtgttgtcattggaacaggagaaaattctgaatttggggaggtttttaaaatgatgcaagcagaagaggcaccaaaaacccctctgcagaagagcatggacctcttaggaaaacaactttccttttactcctttggtataataggaatcatcatgttggttggctggttactgggaaaagatatcctggaaatgtttactattagtgtaagtttggctgtagcagcaattcctgaaggtctccccattgtggtcacagtgacgctagctcttggtgttatgagaatggtgaagaaaagggccattgtgaaaaagctgcctattgttgaaactctgggctgctgtaatgtgatttgttcagataaaactggaacactgacgaagaatgaaatgactgttactcacatatttacttcagatggtctgcatgctgaggttactggagttggctataatcaatttggggaagtgattgttgatggtgatgttgttcatggattctataacccagctgttagcagaattgttgaggcgggctgtgtgtgcaatgatgctgtaattagaaacaatactctaatggggaagccaacagaaggggccttaattgctcttgcaatgaagatgggtcttgatggacttcaacaagactacatcagaaaagctgaatacccttttagctctgagcaaaagtggatggctgttaagtgtgtacaccgaacacagcaggacagaccagagatttgttttatgaaaggtgcttacgaacaagtaattaagtactgtactacataccagagcaaagggcagaccttgacacttactcagcagcagagagatgtgtaccaacaagagaaggcacgcatgggctcagcgggactcagagttcttgctttggcttctggtcctgaactgggacagctgacatttcttggcttggtgggaatcattgatccacctagaactggtgtgaaagaagctgttacaacactcattgcctcaggagtatcaataaaaatgattactggagattcacaggagactgcagttgcaatcgccagtcgtctgggattgtattccaaaacttcccagtcagtctcaggagaagaaatagatgcaatggatgttcagcagctttcacaaatagtaccaaaggttgcagtattttacagagctagcccaaggcacaagatgaaaattattaagtcgctacagaagaacggttcagttgtagccatgacaggagatggagtaaatgatgcagttgctctgaaggctgcagacattggagttgcgatgggccagactggtacagatgtttgcaaagaggcagcagacatgatcctagtggatgatgattttcaaaccataatgtctgcaatcgaagagggtaaagggatttataataacattaaaaatttcgttagattccagctgagcacgagtatagcagcattaactttaatctcattggctacattaatgaactttcctaatcctctcaatgccatgcagattttgtggatcaatattattatggatggacccccagctcagagccttggagtagaaccagtggataaagatgtcattcgtaaacctcctcgcaactggaaagacagcattttgactaaaaacttgatacttaaaatacttgtttcatcaataatcattgtttgtgggactttgtttgtcttctggcgtgagctacgagacaatgtgattacacctcgagacacaacaatgaccttcacatgctttgtgttttttgacatgttcaatgcactaagttccagatcccagaccaagtctgtgtttgagattggactctgcagtaatagaatgttttgctatgcagttcttggatccatcatgggacaattactagttatttactttcctccgcttcagaaggtttttcagactgagagcctaagcatactggatctgttgtttcttttgggtctcacctcatcagtgtgcatagtggcagaaattataaagaaggttgaaaggagcagggaaaagatccagaagcatgtctggctctgggagaggagtggacagcagctggttgagatacatccccatctggagacaggactgccactgacagaagatgtgagctgtgtctaagtccagtcttgtgcccagccgtgtctgcgccttcactctttggaactctgcatacaacatcttagcaccatcttcctgcagctcttccttacctaaataaagaaacagcccaagggcagtatttctaaaagcactgtaacagcttttcattttctccacatatactacaaattctataaagaaagaaattaatttaaaaaaactaagatgtttttctcttctggcttcataaatgccttgctgtataaattgaaatattgatactgaactgtctttttaatgatgacctaactttattcaacccatcggaatttactttttccctgaaataagatcttttccactggtctactacctgaccataaacatgtctgcatttgaattctctaaaccctaaatctgtgtctatgaaaaatacaaatgactattaaatatta

SEQ ID NO: 109726 - DNA, 786 bp, Homo sapiens
  Payload ID: 1548
  Gene Symbol: ATP2C1
  Gene Name: ATPase, Ca++ transporting, type 2C, member 1
  ENST ID: ENST00000504571
  CDS Start-End: 1-648
gtcacagtgacgctagctcttggtgttatgagaatggtgaagaaaagggccattgtgaaaaagctgcctattgttgaaactctgggctgctgtaatgtgatttgttcagataaaactggaacactgacgaagaatgaaatgactgttactcacatatttacttcagatggtctgcatgctgaggttactggagttggctataatcaatttggggaagtgattgttgatggtgatgttgttcatggattctataacccagctgttagcagaattgttgaggcgggctgtgtgtgcaatgatgctgtaattagaaacaatactctaatggggaagccaacagaaggggccttaattgctcttgcaatgaagatgggtcttgatggacttcaacaagactacatcagaaaagctgaatacccttttagctctgagcaaaagtggatggctgttaagtgtgtacaccgaacacagcaggacagaccagagatttgttttatgaaaggtgcttacgaacaagtaattaagtactgtactacataccagagcaaagggcagaccttgacacttactcagcagcagagagatgtgtaccaacaagagaaggcacgcatgggctcagcgggactcagagtgtatcttgtattttaacaggttgcagtattttacagagctagcccaaggcacaagatgaaaattattaagtcgctacagaagaacggttcagttgtagccatgacaggagatggagtaaatgatgcagttgctctgaaggctgcagacattgga

SEQ ID NO: 109727 - DNA, 3439 bp, Homo sapiens
  Payload ID: 1548
  Gene Symbol: ATP2C1
  Gene Name: ATPase, Ca++ transporting, type 2C, member 1
  Uniprot ID: P98194
  ENST ID: ENST00000513801
  CDS Start-End: 203-2974
cttcctccctcccgctcgcttcttctcacgccgggagcaggctcccgcctcgcaccgctgccccgcgagcagctcctcttctcccgaggcgcgcggggcgcccccgcgagccccgcggctgagaccccgcagcctggaggagggctgtccggggctttgggttgcacgttttcaaaaaatacctaatggtgaaaatgagacaatgattcctgtattgacatcaaaaaaagcaagtgaattaccagtcagtgaagttgcaagcattctccaagctgatcttcagaatggtctaaacaaatgtgaagttagtcataggcgagcctttcatggctggaatgagtttgatattagtgaagatgagccactgtggaagaagtatatttctcagtttaaaaatccccttattatgctgcttctggcttctgcagtcatcagtgttttaatgcatcagtttgatgatgccgtcagtatcactgtggcaatacttatcgttgttacagttgcctttgttcaggaatatcgttcagaaaaatctcttgaagaattgagtaaacttgtgccaccagaatgccattgtgtgcgtgaaggaaaattggagcatacacttgcccgagacttggttccaggtgatacagtttgcctttctgttggggatagagttcctgctgacttacgcttgtttgaggctgtggatctttccattgatgagtccagcttgacaggtgagacaacgccttgttctaaggtgacagctcctcagccagctgcaactaatggagatcttgcatcgagaagtaacattgcctttatgggaacactggtcagatgtggcaaagcaaagggtgttgtcattggaacaggagaaaattctgaatttggggaggtttttaaaatgatgcaagcagaagaggcaccaaaaacccctctgcagaagagcatggacctcttaggaaaacaactttccttttactcctttggtataataggaatcatcatgttggttggctggttactgggaaaagatatcctggaaatgtttactattagtgtaagtttggctgtagcagcaattcctgaaggtctccccattgtggtcacagtgacgctagctcttggtgttatgagaatggtgaagaaaagggccattgtgaaaaagctgcctattgttgaaactctgggctgctgtaatgtgatttgttcagataaaactggaacactgacgaagaatgaaatgactgttactcacatatttacttcagatggtctgcatgctgaggttactggagttggctataatcaatttggggaagtgattgttgatggtgatgttgttcatggattctataacccagctgttagcagaattgttgaggcgggctgtgtgtgcaatgatgctgtaattagaaacaatactctaatggggaagccaacagaaggggccttaattgctcttgcaatgaagatgggtcttgatggacttcaacaagactacatcagaaaagctgaatacccttttagctctgagcaaaagtggatggctgttaagtgtgtacaccgaacacagcaggacagaccagagatttgttttatgaaaggtgcttacgaacaagtaattaagtactgtactacataccagagcaaagggcagaccttgacacttactcagcagcagagagatgtgtaccaacaagagaaggcacgcatgggctcagcgggactcagagttcttgctttggcttctggtcctgaactgggacagctgacatttcttggcttggtgggaatcattgatccacctagaactggtgtgaaagaagctgttacaacactcattgcctcaggagtatcaataaaaatgattactggagattcacaggagactgcagttgcaatcgccagtcgtctgggattgtattccaaaacttcccagtcagtctcaggagaagaaatagatgcaatggatgttcagcagctttcacaaatagtaccaaaggttgcagtattttacagagctagcccaaggcacaagatgaaaattattaagtcgctacagaagaacggttcagttgtagccatgacaggagatggagtaaatgatgcagttgctctgaaggctgcagacattggagttgcgatgggccagactggtacagatgtttgcaaagaggcagcagacatgatcctagtggatgatgattttcaaaccataatgtctgcaatcgaagagggtaaagggatttataataacattaaaaatttcgttagattccagctgagcacgagtatagcagcattaactttaatctcattggctacattaatgaactttcctaatcctctcaatgccatgcagattttgtggatcaatattattatggatggacccccagctcagagccttggagtagaaccagtggataaagatgtcattcgtaaacctcctcgcaactggaaagacagcattttgactaaaaacttgatacttaaaatacttgtttcatcaataatcattgtttgtgggactttgtttgtcttctggcgtgagctacgagacaatgtgattacacctcgagacacaacaatgaccttcacatgctttgtgttttttgacatgttcaatgcactaagttccagatcccagaccaagtctgtgtttgagattggactctgcagtaatagaatgttttgctatgcagttcttggatccatcatgggacaattactagttatttactttcctccgcttcagaaggtttttcagactgagagcctaagcatactggatctgttgtttcttttgggtctcacctcatcagtgtgcatagtggcagaaattataaagaaggttgaaaggagcagggaaaagatccagaagcatgtctggctctgggagaggagtggacagcagctggttgagatacatccccatctggagacaggactgccactgacagaagatgtgagctgtgtctaagtccagtcttgtgcccagccgtgtctgcgccttcactctttggaactctgcatacaacatcttagcaccatcttcctgcagctcttccttacctaaataaagaaacagcccaagggcagtatttctaaaagcactgtaacagcttttcattttctccacatatactacaaattctataaagaaagaaattaatttaaaaaaactaagatgtttttctcttctggcttcataaatgccttgctgtataaattgaaatattgatactgaactgtctttttaatgatgacctaactttattcaacccatcggaatttactttttccctgaaataagatcttttccactggtctactacctgaccataaacatgtctgcatttgaattctctaaaccctaaatctgtgtctatgaaaaatacaaatgactattaaatattattctctttactgttctctttcaccgaaa

SEQ ID NO: 109728 - DNA, 561 bp, Homo sapiens
  Payload ID: 1548
  Gene Symbol: ATP2C1
  Gene Name: ATPase, Ca++ transporting, type 2C, member 1
  ENST ID: ENST00000515854
  CDS Start-End: 169-561
gataccaaaagggaaaaattggaaaagcaagtgagagagcagctgatggtaatgaagtcctgcagtggttggtaggagggagaacagatttttcctcaaaaggaagcatagagagaacggaccttttcaaataataaacaggcaccaaaaacccctctgcagaagagcatggacctcttaggaaaacaactttccttttactcctttggtataataggaatcatcatgttggttggctggttactgggaaaagatatcctggaaatgtttactattagtgtaagtttggctgtagcagcaattcctgaaggtctccccattgtggtcacagtgacgctagctcttggtgttatgagaatggtgaagaaaagggccattgtgaaaaagctgcctattgttgaaactctgggctgctgtaatgtgatttgttcagataaaactggaacactgacgaagaatgaaatgactgttactcacatatttacttcagatggtctgcatgctgaggttactggagttggctataatcaatttggggaagtgattgttgatggtgatgtt

SEQ ID NO: 109729 - DNA, 4714 bp, Homo sapiens
  Payload ID: 1548
  Gene Symbol: ATP2C1
  Gene Name: ATPase, Ca++ transporting, type 2C, member 1
  Uniprot ID: P98194
  ENST ID: ENST00000504948
  CDS Start-End: 203-2914
cttcctccctcccgctcgcttcttctcacgccgggagcaggctcccgcctcgcaccgctgccccgcgagcagctcctcttctcccgaggcgcgcggggcgcccccgcgagccccgcggctgagaccccgcagcctggaggagggctgtccggggctttgggttgcacgttttcaaaaaatacctaatggtgaaaatgagacaatgattcctgtattgacatcaaaaaaagcaagtgaattaccagtcagtgaagttgcaagcattctccaagctgatcttcagaatggtctaaacaaatgtgaagttagtcataggcgagcctttcatggctggaatgagtttgatattagtgaagatgagccactgtggaagaagtatatttctcagtttaaaaatccccttattatgctgcttctggcttctgcagtcatcagtgttttaatgcatcagtttgatgatgccgtcagtatcactgtggcaatacttatcgttgttacagttgcctttgttcaggaatatcgttcagaaaaatctcttgaagaattgagtaaacttgtgccaccagaatgccattgtgtgcgtgaaggaaaattggagcatacacttgcccgagacttggttccaggtgatacagtttgcctttctgttggggatagagttcctgctgacttacgcttgtttgaggctgtggatctttccattgatgagtccagcttgacaggtgagacaacgccttgttctaaggtgacagctcctcagccagctgcaactaatggagatcttgcatcgagaagtaacattgcctttatgggaacactggtcagatgtggcaaagcaaagggtgttgtcattggaacaggagaaaattctgaatttggggaggtttttaaaatgatgcaagcagaagaggcaccaaaaacccctctgcagaagagcatggacctcttaggaaaacaactttccttttactcctttggtataataggaatcatcatgttggttggctggttactgggaaaagatatcctggaaatgtttactattagtgtaagtttggctgtagcagcaattcctgaaggtctccccattgtggtcacagtgacgctagctcttggtgttatgagaatggtgaagaaaagggccattgtgaaaaagctgcctattgttgaaactctgggctgctgtaatgtgatttgttcagataaaactggaacactgacgaagaatgaaatgactgttactcacatatttacttcagatggtctgcatgctgaggttactggagttggctataatcaatttggggaagtgattgttgatggtgatgttgttcatggattctataacccagctgttagcagaattgttgaggcgggctgtgtgtgcaatgatgctgtaattagaaacaatactctaatggggaagccaacagaaggggccttaattgctcttgcaatgaagatgggtcttgatggacttcaacaagactacatcagaaaagctgaatacccttttagctctgagcaaaagtggatggctgttaagtgtgtacaccgaacacagcaggacagaccagagatttgttttatgaaaggtgcttacgaacaagtaattaagtactgtactacataccagagcaaagggcagaccttgacacttactcagcagcagagagatgtgtaccaacaagagaaggcacgcatgggctcagcgggactcagagttcttgctttggcttctggtcctgaactgggacagctgacatttcttggcttggtgggaatcattgatccacctagaactggtgtgaaagaagctgttacaacactcattgcctcaggagtatcaataaaaatgattactggagattcacaggagactgcagttgcaatcgccagtcgtctgggattgtattccaaaacttcccagtcagtctcaggagaagaaatagatgcaatggatgttcagcagctttcacaaatagtaccaaaggttgcagtattttacagagctagcccaaggcacaagatgaaaattattaagtcgctacagaagaacggttcagttgtagccatgacaggagatggagtaaatgatgcagttgctctgaaggctgcagacattggagttgcgatgggccagactggtacagatgtttgcaaagaggcagcagacatgatcctagtggatgatgattttcaaaccataatgtctgcaatcgaagagggtaaagggatttataataacattaaaaatttcgttagattccagctgagcacgagtatagcagcattaactttaatctcattggctacattaatgaactttcctaatcctctcaatgccatgcagattttgtggatcaatattattatggatggacccccagctcagagccttggagtagaaccagtggataaagatgtcattcgtaaacctcctcgcaactggaaagacagcattttgactaaaaacttgatacttaaaatacttgtttcatcaataatcattgtttgtgggactttgtttgtcttctggcgtgagctacgagacaatgtgattacacctcgagacacaacaatgaccttcacatgctttgtgttttttgacatgttcaatgcactaagttccagatcccagaccaagtctgtgtttgagattggactctgcagtaatagaatgttttgctatgcagttcttggatccatcatgggacaattactagttatttactttcctccgcttcagaaggtttttcagactgagagcctaagcatactggatctgttgtttcttttgggtctcacctcatcagtgtgcatagtggcagaaattataaagaaggttgaaaggagcagggaaaagatccagaagcatgttagttcgacatcatcatcttttcttgaagtatgatgcatattgcattattttatttgcaaactaggaattgcagtctgaggatcatttagaagggcaagttcaagaggatatgaagatttgagaactttttaactattcattgactaaaaatgaacattaatgttaaagacttaagactttaacctgctggcagtcccaaatgaaattatgcaactttgatatcatattccttgatttaaattggcttttgtgattgagtgaaactttataaagcatatggtcagttatttaattaaaaaggcaaaacctgaaccaccttctgcacttaaagaagtctaacagtacaaatacactatctatcttagatagatatatttttttttatttttaaatattgtactatttatggtggtggggctttcttactaatacacaaataaatttaatcatttcaaaggcattctatttggtttagaagttgattcccaggagtgccatatttcagctactgtatttcctttttcttgtaatgtaagcagctcagataccatgtgctatcatttttgtatcaagttttttgcacaggatgtgaccactgtcagatcactgttcttttctttctttttgtgattgaaaagcctatactacaatttgaagtaaatttttgtttttcttagtaagtgtaaatggttgctttatttttattttaaaaaggtatgtctttggtttggcagaattcatgcagggctatcaagtggtgttctagggtaacagtgtccataattaacgcttagtcatagagtcaaaaacatttaagactgattgggttgaagtttataataaattatattaacatgtcttcctttttgaggtaaagatatatactttgtcaaatatcattttgtcatcctctaaatataaatccaaatacctcagctaagtaattctattttattatttttactgttatgtatgtttttaatcatatttcttaggaagtataggctactggacttagaataaaaagtccccaaacccaaacaaatggtttatgaaccagagtatatgtggaagattctttgctggtcttgctctgtgtgcatctgaagcttctttggcctagattttagcacaaacctgagtatatctcttctactttcatcatgtgttctgtaccttctttttgtttcattgggcatgctagggaaataggtggattttgtgtgtaatgccatcagtttttatgaaagcttgatgaggtataggtcatttgttttgagtatgtgggccagaaatttaaaattagaaatttgtttttctgttgagtatataaacaaaaattggtcccaattctaacaggtttaatccttcttgaagccaataagttttatcttttataatctgtcaggatgaaccactccttagcttttatccaatattaaactgcaagtgttagcactgaaatattgtcattgatagggaaaatatctattctttgagtcattgttactgaggcagttgagtgtaaggagctggctgcagtttattctacttaaccctttaaggctgaattgtcaaatgtacattgttccatgtcgttagatggaacatggaagccattgtctaatcaactctatcattagtgacttgatgtctcataccttaattttgtaatgatttttattctctgttacaaagacttgaaatacgtattaaatgcacgttaatgttttgctttgcattttaggttcagattatgacttgattgaaataaatgtgcctatacattcatttgctttgtactataaaaataaaaatgatttcttaagttaa

SEQ ID NO: 109730 - DNA, 4888 bp, Homo sapiens
  Payload ID: 1548
  Gene Symbol: ATP2C1
  Gene Name: ATPase, Ca++ transporting, type 2C, member 1
  ENST ID: ENST00000505330
  CDS Start-End: 227-3088
attgcatttctggacgcttctagacagtgttcatacttggctgtctggtttcaccaggaactctacccaaaagaggaaacagcaaggagaacatttgctttgtttgtaggagggaagttgtcgagctacaaacaaatctttaggcatctgaggaattgctaagtttctaatttcatatggttgctgacaaggaggtgcagacaaggaccctcttgctttcctcactatggatagtctgttgcctccatctagattctcttatttcaaaaaatatcctctccatgcaattaggagatatttatcgacgctgagaaaccaaagagccgaagaacaggttgcacgttttcaaaaaatacctaatggtgaaaatgagacaatgattcctgtattgacatcaaaaaaagcaagtgaattaccagtcagtgaagttgcaagcattctccaagctgatcttcagaatggtctaaacaaatgtgaagttagtcataggcgagcctttcatggctggaatgagtttgatattagtgaagatgagccactgtggaagaagtatatttctcagtttaaaaatccccttattatgctgcttctggcttctgcagtcatcagtgttttaatgcatcagtttgatgatgccgtcagtatcactgtggcaatacttatcgttgttacagttgcctttgttcaggaatatcgttcagaaaaatctcttgaagaattgagtaaacttgtgccaccagaatgccattgtgtgcgtgaaggaaaattggagcatacacttgcccgagacttggttccaggtgatacagtttgcctttctgttggggatagagttcctgctgacttacgcttgtttgaggctgtggatctttccattgatgagtccagcttgacaggtgagacaacgccttgttctaaggtgacagctcctcagccagctgcaactaatggagatcttgcatcgagaagtaacattgcctttatgggaacactggtcagatgtggcaaagcaaagggtgttgtcattggaacaggagaaaattctgaatttggggaggtttttaaaatgatgcaagcagaagaggcaccaaaaacccctctgcagaagagcatggacctcttaggaaaacaactttccttttactcctttggtataataggaatcatcatgttggttggctggttactgggaaaagatatcctggaaatgtttactattagtgtaagtttggctgtagcagcaattcctgaaggtctccccattgtggtcacagtgacgctagctcttggtgttatgagaatggtgaagaaaagggccattgtgaaaaagctgcctattgttgaaactctgggctgctgtaatgtgatttgttcagataaaactggaacactgacgaagaatgaaatgactgttactcacatatttacttcagatggtctgcatgctgaggttactggagttggctataatcaatttggggaagtgattgttgatggtgatgttgttcatggattctataacccagctgttagcagaattgttgaggcgggctgtgtgtgcaatgatgctgtaattagaaacaatactctaatggggaagccaacagaaggggccttaattgctcttgcaatgaagatgggtcttgatggacttcaacaagactacatcagaaaagctgaatacccttttagctctgagcaaaagtggatggctgttaagtgtgtacaccgaacacagcaggacagaccagagatttgttttatgaaaggtgcttacgaacaagtaattaagtactgtactacataccagagcaaagggcagaccttgacacttactcagcagcagagagatgtgtaccaacaagagaaggcacgcatgggctcagcgggactcagagttcttgctttggcttctggtcctgaactgggacagctgacatttcttggcttggtgggaatcattgatccacctagaactggtgtgaaagaagctgttacaacactcattgcctcaggagtatcaataaaaatgattactggagattcacaggagactgcagttgcaatcgccagtcgtctgggattgtattccaaaacttcccagtcagtctcaggagaagaaatagatgcaatggatgttcagcagctttcacaaatagtaccaaaggttgcagtattttacagagctagcccaaggcacaagatgaaaattattaagtcgctacagaagaacggttcagttgtagccatgacaggagatggagtaaatgatgcagttgctctgaaggctgcagacattggagttgcgatgggccagactggtacagatgtttgcaaagaggcagcagacatgatcctagtggatgatgattttcaaaccataatgtctgcaatcgaagagggtaaagggatttataataacattaaaaatttcgttagattccagctgagcacgagtatagcagcattaactttaatctcattggctacattaatgaactttcctaatcctctcaatgccatgcagattttgtggatcaatattattatggatggacccccagctcagagccttggagtagaaccagtggataaagatgtcattcgtaaacctcctcgcaactggaaagacagcattttgactaaaaacttgatacttaaaatacttgtttcatcaataatcattgtttgtgggactttgtttgtcttctggcgtgagctacgagacaatgtgattacacctcgagacacaacaatgaccttcacatgctttgtgttttttgacatgttcaatgcactaagttccagatcccagaccaagtctgtgtttgagattggactctgcagtaatagaatgttttgctatgcagttcttggatccatcatgggacaattactagttatttactttcctccgcttcagaaggtttttcagactgagagcctaagcatactggatctgttgtttcttttgggtctcacctcatcagtgtgcatagtggcagaaattataaagaaggttgaaaggagcagggaaaagatccagaagcatgttagttcgacatcatcatcttttcttgaagtatgatgcatattgcattattttatttgcaaactaggaattgcagtctgaggatcatttagaagggcaagttcaagaggatatgaagatttgagaactttttaactattcattgactaaaaatgaacattaatgttaaagacttaagactttaacctgctggcagtcccaaatgaaattatgcaactttgatatcatattccttgatttaaattggcttttgtgattgagtgaaactttataaagcatatggtcagttatttaattaaaaaggcaaaacctgaaccaccttctgcacttaaagaagtctaacagtacaaatacactatctatcttagatagatatatttttttttatttttaaatattgtactatttatggtggtggggctttcttactaatacacaaataaatttaatcatttcaaaggcattctatttggtttagaagttgattcccaggagtgccatatttcagctactgtatttcctttttcttgtaatgtaagcagctcagataccatgtgctatcatttttgtatcaagttttttgcacaggatgtgaccactgtcagatcactgttcttttctttctttttgtgattgaaaagcctatactacaatttgaagtaaatttttgtttttcttagtaagtgtaaatggttgctttatttttattttaaaaaggtatgtctttggtttggcagaattcatgcagggctatcaagtggtgttctagggtaacagtgtccataattaacgcttagtcatagagtcaaaaacatttaagactgattgggttgaagtttataataaattatattaacatgtcttcctttttgaggtaaagatatatactttgtcaaatatcattttgtcatcctctaaatataaatccaaatacctcagctaagtaattctattttattatttttactgttatgtatgtttttaatcatatttcttaggaagtataggctactggacttagaataaaaagtccccaaacccaaacaaatggtttatgaaccagagtatatgtggaagattctttgctggtcttgctctgtgtgcatctgaagcttctttggcctagattttagcacaaacctgagtatatctcttctactttcatcatgtgttctgtaccttctttttgtttcattgggcatgctagggaaataggtggattttgtgtgtaatgccatcagtttttatgaaagcttgatgaggtataggtcatttgttttgagtatgtgggccagaaatttaaaattagaaatttgtttttctgttgagtatataaacaaaaattggtcccaattctaacaggtttaatccttcttgaagccaataagttttatcttttataatctgtcaggatgaaccactccttagcttttatccaatattaaactgcaagtgttagcactgaaatattgtcattgatagggaaaatatctattctttgagtcattgttactgaggcagttgagtgtaaggagctggctgcagtttattctacttaaccctttaaggctgaattgtcaaatgtacattgttccatgtcgttagatggaacatggaagccattgtctaatcaactctatcattagtgacttgatgtctcataccttaattttgtaatgatttttattctctgttacaaagacttgaaatacgtattaaatgcacgttaatgttttgctttgcattttaggttcagattatgacttgattgaaataaatgtgcctatacattcatttgctttgtactataaaaataaaaatgatttcttaagttaa
